United States Patent Application Publication US 2018/0305689 A1 - sequence listing, part 25

SEQ ID NO: 317403 - DNA, 4001 bp, Homo sapiens
cgggtaatcggggatggaggagaccctgtcctgttacgttccgcagccgcagaccgtcgcccaccccgccacccaaccttgagcccccagaagccgcggcccccagggggcagggagcggcgggaggggccgcgccgagcgaggtcgtccctcccctcccctcctctcccggagtcctggctcgggcagcagcgccgccgagtccgcacctgccgcgccgagcgagccccgcccgcgcgcctacagcccagcgggccgagggcggccgccgcacacactcacctaggccgaagcggtggccgggggccaagccgtgcgacccggcccaggtcctggtgcgggcggcggcgtgcacgtgccgcatcaaccgcggcggggagggcgaggcggcatcgccggagttggagcgcctcggctcgcggcctcccccgcccccgccgccaccggccaggagcgctccccgcggcccccttccggctgcggagggcagttctcccgcggctccgcgcggccgggcccggacctgtcacggctggtgctcgccgggcggctcagtaacatccacctcgggaggtcttctgcagcccctttccaagaaccagtttttacaaatcctttcaggaaggcttcccaagtctcagaaaaacaagtaggggagtggcggagtcgagtgcgtgacgggccagctgacggcacggtgtgctcagagaactcgggttctagtcgctcctcgcaaggaacgaaggaagggatggcggcttcctgacgagcgaaaaatccacgtcacgggcgttcgagactccgcagcgcccgggtcggggcccgaaccgccgtcggcgggtgggtcacggagccgcgcagtaccccggcgaaacctcggagcacgcgcctgccaggcagaggctgccgcggccgggagggggagggggatttttttacccttttctttttttttttttttttagcggggaggagtgaagagagtgaggtttggggatccttctcggagagagaaaggcgggcgtcgtcccttgtgccccgcgcaggccgacgcgcttagccgattccgcacgttgggcaagtgggggcacagcgtccccgggcactccggtcccggcaggtcagcctctcccgggcagcgctcacacccagtcctccgagcctggggttccacggccgaaatgcctgcgacagagaattagagatagaagctcgtgaatgtccctttcttcgaagggctgggaccccgggcgggccgctggccagctcgcccgcagcccgttgccatgtgctccctgttgctgctcccggtgattgacaggccggcgcacagtcggcgtgtcagccgcgaaccaaagtaacatgcagtcctgcacgtttttgccgaggtgcttttgccccctggaatgcctaggagttcaaacaacgttcaagcaacgcctctgcgcgttaggaatcaatacacagagacgggaaattcaggttttaaaccaatgcttcactcgggattcggtcgccaacaatgcctaaacaaacacgcatttggtccacacaccgagtgctagcccctcttcgcataaaggcattaacggctctgtgtttcacaaattcgatcgtttcagactttaaacgtctactgttcggttaaggaaaggtgaaagggaccctgctttttcttttagcggtagcatttactttaagagcattagttttagcagtgggaatgctaccggtgttttgaaatgcaaccagtaaccttagctggaaagcaagttcaaataaataaatgttcagttccttgcaaaagtcaacatttctcaccttatctttcctaaaatgtctacggaaggaaacggtacttacctaatgcaaagattgcaaattgcttttcaggcacatttaacagcgactgtagctgttccttatccagggcagggaactgtgctgataatcactctgcaaagcacgcagtggtttgcagagcggtctcactccggctacgcagaatttcagctccttgcctccacctccacctccactccaggacacgcctccggtgatatcatgtgtcaatcactcgggctgcccgaaaacctggaacaggatttccttaactatcgtttcctctttcgtttatgtgtaccaacttggaaatgttgccctacagactcgtgtaataaacatcctcttaaaacttcgggagtgcctctaaaaattctgcaaatgcagtttgtcatagaggaatacattcggatttagttagcaatcttcagttgtcgatctcaattaaaaggattggtggactctactcttaagttgaattagaaaagaattgtgaagaataaaagaaaatgaaaaaagttgtatgccaagccatcacttctgaccaactagagggaaaacgtatattgacacaaaaagatgattatataacattacagttcctatttacaacaaagttcagaatatgtgaaacctaaagttcaaaaggtggcactccttactgcaaatgtaatataagcatatgtaataaaggtgaaattttctgctgtgggttttttaaataattgctttaccttggcttgttatatgatttcccaaaaatcaagcacatggagaaaaaaccaaattctttcaattttgtaatatagttgtataattttgcaaaaaatacaaacccgtatattttttaattagctaaaagtcaattaattagaatagaaaaaatttatcaagaagttttataattcttagtaatagctgatatgactggaaaaaaaacactttaagtaggaaacttgatttctactttcttacaaactatgggattttaggcatttattatcaaagttgtgccttttcatgctgcagtgaggataactttttgtggaattgaaggttccgtagaaacttttaaaagccacctaaagaccaaaaacttagtggaaaggaaatatttttccaggtactatatatcaggagtagcttaaagtctggcaaaacaaagcaaacaataacaaaactctagaatctaaatcatataaacatataagtatggaaatttttagttcaaagtacatttttagtctcatttacaatagcaagtggttctgttgaaactataaatatatacatacataacacacacgcacacacacaggactttcaaatgtctgagcactttcaaaaattaaagttgtgtttggaattgcctctgaagaacacagagcattgttaagaacatgaataacaataaaaaagcatcattagaaaatagcatagaataagaatcaagccaaaaagctacatattcactcttaatattatgaattgtattaaaataggctatttaaaagaataaaattgatttcattgtatttttttcatagatctcattagatttggggatgtaatgaaattttactagtgatggataggtttcttgtgaatgtatttggaatagacaaatcaaaaatagactatcctatcagagtatcttatttggttcttcaaaactattaccacagttgtgagctgagaggtcagttcaccaatatgataaaacctggagagggagcactgaacattctaccttcataaatcctacaaaatatatttgaaagatttctattgcaaatacactctatttcaaccagaaatgtattaaaataattttcattagatcaagtatttttaaattataataatcaaatccatgagatttttatctaaaacaccatcaccatgggtcatgttgtattaagaaattaaatatgctgtacagagttgatcaataaccctccatgtcatttagcactaaaatgcattaatatgtttttctctaaatattacattacaaataaatgtacgtatagctctgtcaccttggttctaaaagacattgaatgaaacttgcctctcctgattccccgcaactataagactttgtagaaattctaaatttttagcttaaagtatacattgtttttcacttggtaagt

SEQ ID NO: 317404 - DNA, 4001 bp, Homo sapiens
accaacctgaggcaaaaaacatggtttaaggaacaacgcagaaagaagtccatttcctatatttcctaaactaatgtctctaaactatgtcttacatgttaacttcttggagctccccctcgttttcacaactcagctctctcgagtttctactttattctaccttctttgcgcatgaggagtaacacattcataacctgcggggatttagtctcggagtcctcaacatctaatcctgactcctgcacaattattcctcttcttcaagaacttcttaactcagtgctttcaaagcaaaaggtagctaaaagtactaagccagattcacaaaaccgcagaggatttgaatagtgtaacccataacaccaggcacaacttcaatttgcatttccaatgatagttgtaacaaacttcatactggctgggaaataaagttgccagacaaaaaaattaaaagcaaagaaaattcgccacctccgatccgaagaaaagcccattttcaagcagtgacagtcttggacaagccccaaacacgctcacacgcgctcggcacactgccttccccaagaaaacgcgaatggaagtagaataccttttcggacaatcccatcaccatattaaggatcaccgtggatttccaacacactttttgggtggcccaccaaggtttctgagaaatcatgaagagccttcagcgtccacgcgggagcccaaagcaagcccacggtctggctgaccctaagcaaggatttgtctatgctttaaaggaaaagctgggttcaccgagggccgaggagaaagaagccagcgcaggggcggccacattgcaagttaccacggtggagctgcgccctctgcaatccgcactgaataaatagttgacggaagaaggaaaaggaaaaagttatgaatgaaaacaagttctttctccctctctctgtggtaggaggaggggaggaggctgaggttaccatgagctcaggagggcggacttccccactttttttttttgagccggagtctcactttgtctcccaggctggagtgcagtggcgcgaccttggctcactgcaacctccgcctcccgggttcaagcgggtctcccgcctcagtctctcgagtagctgtgactacagtcgcgcgtcaccacggccggctaatttttgcatttttagtaaagacggggtttcatcagttggtcgggctggtctcgaactcctgacctcaggtgatcagcgcgcctcggcccccccaagtgctgggattacaggcgtgagccaccgcgcccagccgacttccccacttttaaagtggcagtgccctctcccttcccctgtctttgcactgtgctccaaaccagaagaaagttgcggctggctttggggctgcctaattctatcgagggggtaatcggcgaattccggggatgtgcctacacacacacacgcacacacacagcctttgtcgtccccctgcttgaggcacactcctccaaagagggcctccggggacatccccagagccgcctgaaatcccccttgggcgtgaagggctctccgagaggacaacctgggccaccgcgccgccgctccgggtaatcggggatggaggagaccctgtcctgttacgttccgcagccgcagaccgtcgcccaccccgccacccaaccttgagcccccagaagccgcggcccccagggggcagggagcggcgggaggggccgcgccgagcgaggtcgtccctcccctcccctcctctcccggagtcctggctcgggcagcagcgccgccgagtccgcacctgccgcgccgagcgagccccgcccgcgcgcctacagcccagcgggccgagggcggccgccgcacacactcacctaggccgaagcggtggccgggggccaagccgtgcgacccggcccaggtcctggtgcgggcggcggcgtgcacgtgccgcatcaaccgcggcggggagggcgaggcggcatcgccggagttggagcgcctcggctcgcggcctcccccgcccccgccgccaccggccaggagcgctccccgcggcccccttccggctgcggagggcagttctcccgcggctccgcgcggccgggcccggacctgtcacggctggtgctcgccgggcggctcagtaacatccacctcgggaggtcttctgcagcccctttccaagaaccagtttttacaaatcctttcaggaaggcttcccaagtctcagaaaaacaagtaggggagtggcggagtcgagtgcgtgacgggccagctgacggcacggtgtgctcagagaactcgggttctagtcgctcctcgcaaggaacgaaggaagggatggcggcttcctgacgagcgaaaaatccacgtcacgggcgttcgagactccgcagcgcccgggtcggggcccgaaccgccgtcggcgggtgggtcacggagccgcgcagtaccccggcgaaacctcggagcacgcgcctgccaggcagaggctgccgcggccgggagggggagggggatttttttacccttttctttttttttttttttttagcggggaggagtgaagagagtgaggtttggggatccttctcggagagagaaaggcgggcgtcgtcccttgtgccccgcgcaggccgacgcgcttagccgattccgcacgttgggcaagtgggggcacagcgtccccgggcactccggtcccggcaggtcagcctctcccgggcagcgctcacacccagtcctccgagcctggggttccacggccgaaatgcctgcgacagagaattagagatagaagctcgtgaatgtccctttcttcgaagggctgggaccccgggcgggccgctggccagctcgcccgcagcccgttgccatgtgctccctgttgctgctcccggtgattgacaggccggcgcacagtcggcgtgtcagccgcgaaccaaagtaacatgcagtcctgcacgtttttgccgaggtgcttttgccccctggaatgcctaggagttcaaacaacgttcaagcaacgcctctgcgcgttaggaatcaatacacagagacgggaaattcaggttttaaaccaatgcttcactcgggattcggtcgccaacaatgcctaaacaaacacgcatttggtccacacaccgagtgctagcccctcttcgcataaaggcattaacggctctgtgtttcacaaattcgatcgtttcagactttaaacgtctactgttcggttaaggaaaggtgaaagggaccctgctttttcttttagcggtagcatttactttaagagcattagttttagcagtgggaatgctaccggtgttttgaaatgcaaccagtaaccttagctggaaagcaagttcaaataaataaatgttcagttccttgcaaaagtcaacatttctcaccttatctttcctaaaatgtctacggaaggaaacggtacttacctaatgcaaagattgcaaattgcttttcaggcacatttaacagcgactgtagctgttccttatccagggcagggaactgtgctgataatcactctgcaaagcacgcagtggtttgcagagcggtctcactccggctacgcagaatttcagctccttgcctccacctccacctccactccaggacacgcctccggtgatatcatgtgtcaatcactcgggctgcccgaaaacctggaacaggatttccttaactatcgtttcctctttcgtttatgtgtaccaacttggaaatgttgccctacagactcgtgtaataaacatcctcttaaaacttcgggagtgcctctaaaaattctgcaaatgcagtttgtcatagaggaatacattcggatttagttagcaatcttcagttgtcgatctcaattaaaaggattggtggactctactcttaagttgaattagaaaagaattgtgaagaataaaagaaaatgaaaaaagttgtatgccaagccatcacttctgaccaactagagggaaaacgtatatt

SEQ ID NO: 317405 - DNA, 4001 bp, Homo sapiens
agcattttttttggggggggggaatcctgtcaaatcacaaattgcctaaaccgcctagtaatgacctccttcatcagtggattacaatgatgctggggtcctggccagagtccaattctaggagaggctggggaccacatcatagaggaagactataaacaagagaccccatgccatgaacattataagtttttccaacttttaagaagcagaatcaggagaaagtaatgccttcctgtttgtgaatctaataattaaaatggagcatgccttcgcagggaatactgagtataagcaggagaataactctcatctaaagaaagctcagttatcagttcataggtggcttccataaaggaaaatgtctaccttttaagaaattgagaatggctttggtgctacagcctttttgttgtgtgctgttatatgcattagattaatgatgaaaaaaattaaggcattaaaaaattgagactcttaaaatgaaatcgcaaaataataggtaattttctatataaatcagaattttaaaactaccttattattcatctatgagatgcaaaaataaatgtatcaggtacacaacgattcttggtgttttggagctacaaacacacacacacacaagactcaatgtatagtccagtgaatgatatataacagtactcatatttgaaatcctgagaggattttttttaagctgaagggctcactcacaaaacaaagtaagttttatgcacaaataagtgtgaggcctttaacgcagtgtagggaaatcctggcagttttaattatctgtatttcctctgatttaaaaatctgtatttacatgacagaccttgattttcaaacgcactgccaattctgattcaacgttcttcttgtaacaaaatcagcacactaatatccagataaaaataagcagttgtgtttccatactaatagtaagttatttctaatttatgtgttcttcacaaactgccaaagatgaaagtttctgctttcagtggtgaactagagtatttttcacacaaattccttctaaagtctacagagtcgacccaattcaagaatgaaaagaaaaagaaatgtccattctccactaccaacctgaggcaaaaaacatggtttaaggaacaacgcagaaagaagtccatttcctatatttcctaaactaatgtctctaaactatgtcttacatgttaacttcttggagctccccctcgttttcacaactcagctctctcgagtttctactttattctaccttctttgcgcatgaggagtaacacattcataacctgcggggatttagtctcggagtcctcaacatctaatcctgactcctgcacaattattcctcttcttcaagaacttcttaactcagtgctttcaaagcaaaaggtagctaaaagtactaagccagattcacaaaaccgcagaggatttgaatagtgtaacccataacaccaggcacaacttcaatttgcatttccaatgatagttgtaacaaacttcatactggctgggaaataaagttgccagacaaaaaaattaaaagcaaagaaaattcgccacctccgatccgaagaaaagcccattttcaagcagtgacagtcttggacaagccccaaacacgctcacacgcgctcggcacactgccttccccaagaaaacgcgaatggaagtagaataccttttcggacaatcccatcaccatattaaggatcaccgtggatttccaacacactttttgggtggcccaccaaggtttctgagaaatcatgaagagccttcagcgtccacgcgggagcccaaagcaagcccacggtctggctgaccctaagcaaggatttgtctatgctttaaaggaaaagctgggttcaccgagggccgaggagaaagaagccagcgcaggggcggccacattgcaagttaccacggtggagctgcgccctctgcaatccgcactgaataaatagttgacggaagaaggaaaaggaaaaagttatgaatgaaaacaagttctttctccctctctctgtggtaggaggaggggaggaggctgaggttaccatgagctcaggagggcggacttccccactttttttttttgagccggagtctcactttgtctcccaggctggagtgcagtggcgcgaccttggctcactgcaacctccgcctcccgggttcaagcgggtctcccgcctcagtctctcgagtagctgtgactacagtcgcgcgtcaccacggccggctaatttttgcatttttagtaaagacggggtttcatcagttggtcgggctggtctcgaactcctgacctcaggtgatcagcgcgcctcggcccccccaagtgctgggattacaggcgtgagccaccgcgcccagccgacttccccacttttaaagtggcagtgccctctcccttcccctgtctttgcactgtgctccaaaccagaagaaagttgcggctggctttggggctgcctaattctatcgagggggtaatcggcgaattccggggatgtgcctacacacacacacgcacacacacagcctttgtcgtccccctgcttgaggcacactcctccaaagagggcctccggggacatccccagagccgcctgaaatcccccttgggcgtgaagggctctccgagaggacaacctgggccaccgcgccgccgctccgggtaatcggggatggaggagaccctgtcctgttacgttccgcagccgcagaccgtcgcccaccccgccacccaaccttgagcccccagaagccgcggcccccagggggcagggagcggcgggaggggccgcgccgagcgaggtcgtccctcccctcccctcctctcccggagtcctggctcgggcagcagcgccgccgagtccgcacctgccgcgccgagcgagccccgcccgcgcgcctacagcccagcgggccgagggcggccgccgcacacactcacctaggccgaagcggtggccgggggccaagccgtgcgacccggcccaggtcctggtgcgggcggcggcgtgcacgtgccgcatcaaccgcggcggggagggcgaggcggcatcgccggagttggagcgcctcggctcgcggcctcccccgcccccgccgccaccggccaggagcgctccccgcggcccccttccggctgcggagggcagttctcccgcggctccgcgcggccgggcccggacctgtcacggctggtgctcgccgggcggctcagtaacatccacctcgggaggtcttctgcagcccctttccaagaaccagtttttacaaatcctttcaggaaggcttcccaagtctcagaaaaacaagtaggggagtggcggagtcgagtgcgtgacgggccagctgacggcacggtgtgctcagagaactcgggttctagtcgctcctcgcaaggaacgaaggaagggatggcggcttcctgacgagcgaaaaatccacgtcacgggcgttcgagactccgcagcgcccgggtcggggcccgaaccgccgtcggcgggtgggtcacggagccgcgcagtaccccggcgaaacctcggagcacgcgcctgccaggcagaggctgccgcggccgggagggggagggggatttttttacccttttctttttttttttttttttagcggggaggagtgaagagagtgaggtttggggatccttctcggagagagaaaggcgggcgtcgtcccttgtgccccgcgcaggccgacgcgcttagccgattccgcacgttgggcaagtgggggcacagcgtccccgggcactccggtcccggcaggtcagcctctcccgggcagcgctcacacccagtcctccgagcctggggttccacggccgaaatgcctgcgacagagaattagagatagaagctcgtgaatgtccctttcttcgaagggctgggaccccgggcgggccgctggccagctcgcccgcagcccgttgccatgtgctccctgttgctgct

SEQ ID NO: 317406 - DNA, 4001 bp, Homo sapiens
aggttctactgtagaattctggaagaagaaaaaggtgtaaattatttcacaatagagtagaaattacaggaagtccaaacagaaccaactgttacagtaatgaataaggaaaaggtaccaagtctctttcttggctgtcatgtaataacagacttgagttgcaacagctggggtgtatgcaagttcaggggatgattttacatgtgccatttaatccaggtacactagactagtacctttctcaaaactcagaaaataaattgctgtgaagtataaaaggattcaaccctgattacaaatgggataacaggtaatttttgcttaaaaagagcctctaggaaacaggaggtttgatcaatttgtttcatgtacttctacttcttccctttagggtgcctcagaatgacctagttctcccttctctgtgttaacacatgacacatctttctctgacagtcaaaattcgcagattatccaagttttagaagccaaattatacttgtccctttgttgcctgcggacctggggcactgcctatgagtgtttcaagcgacaacccagatgtttttaacctttaaaaaaaaattttttttaaatacaaggtatttctctgttgcccaggctagagtgcagtgccatgattatagcccactgcagtctccaatgcctgatctcagatgatcttcctgccttcattccaagtagctggcactacaggcacacgccaccaagccctgccaattttttgtattttcaggagagacggagtctcactatatttcccagcctggtctcgaactcctgaactcaagcgatccgcctgcctcagcctcctaaagtgctgggattacaggcgtgagccactgcgcccggcctaagatgcatcttaaggggcactgttctatttctaccatctcgaatagtatttggccaactctttccagctatgtcctgaatttaaagtggaaaaaggagaagaagaaaattataacaggtctctatttaaaacctgacgatttaatccttcgctgaactgggttacagaatttttcgaaagtcaaatggagcttcgggacgggcctgcctatgacctgcaccttgggccaccttccccaggggcacctgccaaggtgcaggttagggcgactcagtcctttgtccccactgcaagggttgggaagagaaacgggggaagccgaggccgaagagccggcctaacttcatttccacaaatgattcccggtgacctcaagttagagtatgagccactggagtgcagggtacgggaaaaaggagaatttggggcaaggggcacttcaatttgccgcctaaattcgcatgaccaggcctaaattcggatgcgttgccatttcccacagggaaaggctccgtgcggctaccagttcacattcctccagctgagtgcaagcggctccgctctccctcggcgtccgcggacacccgggcactgctccccggagccacgcagcagccggggcatggccggggccaggccgagggagcgccgtgctgcgcccgggaacccgccagggcctcccaggccgggtcccgcctctgctgccccctgctggctgcccgcgagccggggcgccccgaactctcagcgccttgaccaccgcggctcgggaccggggcgcggttacctcttggggacatcaaaggctcggcaggcggcggggcgcgacggctccccacacttggttttcccatagcggatcaggtcctggaagatcgcgcagcccgggagcaggccgggcggcaggagctgcagcagtagggtcagcaggaaggcggcggtcagcgtgagccacaccgcgcgcagcgggttcagcgccgagtgctcggcctccgcccagggagccatggcccgcgtgcccgccttccgcgctgctggcgcccccaccgcccgctagcccgcggaagagcggccactagcgcgcggcgcaccggtctcagcctagcgggacgtcggtgacgcggcgcggggcggggacgcgcagagcccctcccggactcgccgctcagccgcggaggtccttggtcctggtcgcgctggcgctgggtggtcgctcgcagtccctaatctgggcatggggattcttagatggagctccagaatatgattcatcagaagcaaagacgcaaaacagacgagaccacgtgtctgccactcttatcaacattatctccaaagcaaaaaatggaaaccttacatgttgcattttagtttatttagctaaattatgatacactgacatgttagaatatcatgcagtcattgagaattattatgacgagtgtagaaacagggaaagctgtttaggaaacaatatgtgaagtgaaaaacaaaaccaaccataaaaatacatagctatgattgcaaacaactatattaatatgaatgtgtgtatatatggataaagaaggcagatcacacccaaaaatgaataattatgttaggatgctggaaatgtgttggatatgtgtataatgtaaacatgtagacaagtaattgcacataataataaaaatcatagtggtaaaaactgtgtttaaaaaacagcagtcgcttaccaatagggttccaatccttagaagcaaagtttttaaattccatcagctgtttcctgtaacatttatctcaggtagtgacaatgctatttattgactcactgattttaaacaacactgattttatttactataagtgaaaatctagctcttttaagtatttaaaagtctttaaaatgttaattctgaagtattgtatgcctactgtatgacaggcatcattttggatactgaggacagaggggtttacaagataattgtcactgcttatttggagcttacatttttgagattgggtggtgggtgagaagtggaagaggggagaggtagccaactcatcacccttaccccaatgagatacccgatatgtgtgttgaataaacatcagggtgggtaggttagtgggactttggactgttaaatgagcaagcttttaaagttttcttctttgtgcaaaagacacctaaggctttacccgtcctttgacagccaggtgattaaggatggttaaattggcattctagctaggacaatgaggccttattgagtgatcctggatctcttttgcgggagtcaccctttcactgtttctttcttttcttttttttttttttgagatggagtctcgctttgtcgcccaggctggagtgcagtggcctgatctctgctcactgcaagctctgcctcccaggttcacaccattctcctacctcagcctcccgaatagctgggactacaggtgcccccccaaccacgcctggctttttttttttttttttttttgtatttttagtggagatggggtttcactgtgttagccaggatggtcttgatctcctgacctcgtgatccatctgcctcggcctcccaaagtgctgggattacaagcatgagccaatgctcctggcaccccttcactgtttctttatttttcttaggttaactctctgtaaatgcagctggtctgtccatgatctttttcttttcagagaagctacttgtaagtgcattgcagggactcagtttcctgggtaggagtttctcttacagttgtctgacctggggcaagattgaaaacaagataagtgtgtgtgtatgtgtgagtgtgtgtgtagtggaaacaggaagggttgaggaggctggaggggaaaatcatcccatatattttttagatttttttttttgagaccgagtttcactcttgttgcccgggctggagtgcaatggcacgatcttggctcaccgtgacctctgcctcctgggttcaagctattctgcctcagcctcccgagtagctgggattacaggcatgtgacaccacaccaggctaattttgtattattagtagagacggggtttctccatgttggtcaggctggtctcaaactcccgacctcaggtgatccgct

SEQ ID NO: 317407 - DNA, 4001 bp, Homo sapiens
actaaattttcccaccctgtctctccgaaagctaaatttctacttttattgcaacagaaataattggtcagaacaactggaagaaacagcaacaaaacaaaacaaacccagaaaacaactaatctttgcttttaacttaagaagtgacaataaggagagttatagattaaattttcaatgagataaagattcccaatatacatgtaccaaaaaagtgcagtgaaataaagaagaaagaagcaatttctccagatatttcatcttgaaatgcatgctacattctacatagttcattacttcacagggaaaaagttcaggtagaatttggaagcaaatgacctaggtttggtgcaagcttgccactaaatgctttgaggtattgggcatatcacttaacagccaaatctcagttttcttagctacaaaatgattagaaaagcattacctatttaataaggttactgacaatatgaaatgaatattttggaaaaatcttataaagtataatacaaaggcaatttatcttgctggcaacgtttccaaaaatcattaaaatttccccttttcaactaagatgaccaaagtataaggaagaactcaggtggcaagtttcaacgctaacaactgttcggtgttaaaatgaccaggatcatagttactcttgctcctgtgcaactacagaagtccaattctcaaagaatcacaagaatttctaccaattaagaaaacatactggtaaacaagttgacaatctttgctgattaaagaattcctgcaaaatactatactaagtatacagtactggttggaaggctagagttaattcaaacaaatttagggatcaaataattctaattcgtagctattttcctcaatgtctgaaatcaccaaaagtgcactgtgggcacaatcactacttttcacgttaacccagtactagagtgttgaaaattacttagatagctttgcatgttactgacacaccttttaggttactgctactctgaacagctaagccctgccttggtaattacatttccaaatctaacatgcacaggctgtatcttcagtagagaagaactgcgcaccaccgagaacattaagcagcatggccatattccaggtatgtagtaaggaacaaaagaatatgatgaattaaacctcacaccaaaggcggtaaaaaccgaaatcatcccttacagggcaaaaaaacaggccaaacttttcttccgacattatttcaagtgttggtgcttccacacacatatttcctaacttaataacactgaagagatctcatctatgggaatgacaggcctgacatccagatccagccctttcctctcgccccgtagaacccgtacagcttccacctggttagcaccagcctctaaactacgtgtcccaagcaggttcctccccctttagcggccaaagagaacaagctccctcagcaatagagtcctgatcactgcgctcaagacgaagaagaaaaggaggcactttggaatatttgtgaaataaagcagcaaaggagtcaaataagaaaacagtttgaaatggactccgggagctgcggtctctttaaaaccttccctcgcttcccgcggagggtaaaaagagaagtacacgtggctgtaagcaaccagggaccccaggctggcctggtgaagccgaggagtgagacctgcgtcttccgggcgctagggcccgagccgggcggacaatagacgggggggtttcgggggtctccccttcccgtgcctcccgcgcgaggtggtctcgcgcgccggaaacaggccgcatcctccagccggcctgggcccgccccagtgcccaccccgacacttactcttattgacggtcttgagagcgcgcgtgaagtcgccgttctggccataccggttcacttcactccacagcgcaggtactgacacccccccgctgccgccgctcgccatcttggaggagacgaggggcggggcggggagacctctgccccggaacaggatctccgaggcagccaagaggaggaggaagtcgatgattgctaagcgtcgccgagttgggagtgtcttcagccctaaggcagcatcagagatcataatcttctgctctcgtggcaagaaatttgtgcggatagagttgatacacctcacttgaagttggcctggagaaaagaggcgtcggactcctggacggggttgggaaacggtcaccagtttcggctcaaagcagcctgtttccaggagaccgccatggtcgaggcagcgtcctggtcccacggtgcggggccggacgatcatttatgggatataaataaaaggactatgaggtggtaaataaaagactaccaactagaagccatagggagtcatttgaaggagaaataggcacggctcatctgtggttgagggaaagggatcttgaaagatgattaggagaacttgggttctggggaaagtgcgggaagacattctggcagagaagcaaacgtgaggaaaggtaagaaggcaagaatctcccattacaaagggtttggtgaaaccctttgcctgtccttttcgctcccttcgggagcagtcggcaataagctggaagggtaatggggtgaaaatgcccgtggtcagttccctggctctgcgactcactagatgtctgacaataaacaagttacttagcttctgggagtctgttttcccgattgtgaaatggggatactatatttgttctagagatataaaatattagggtttgcttgcgaccgttaatatcaagatgtgttcagatgtacgaagggaatggatatctgttgggtacacttgatgtgagtgatttttttttttttttgagacggggatcttgccgtgttgcccaagctggtctggaactcctgggctcaagcaatcctcccaccacagcctccccaagtgctgggattacaggcatgagccaccacaccaagacgatgtgagtgattcacttgatgtgaatgttgtatttcattgaatggcctgctcttcagactcatatctcgtcatgacctttacaacttctactacttcctgtgtccctcaggaacctagctttttttttttttttttttttttttttttgagacgtagtctagctctgtgacccaggatgaacctcactgcaatctccacctcctgggttaaagcgattcttttgcctcagcctcccaagtagcatgagccaccacgcccggttaatttttgaatttttagtagagatggggtttcactgtgttggccaagctggtctcaaactcctgacctcaagtgatccgccctctctcagcctcccaaagtacagggattacaggcgtaagccaccgtgcccggccttgctaactactttttgtctttcagtctttctggttatacgttgaaagttactttgaggaaacatttgatcttgcagactgggcagccttctggttgcatcctcttagaacaggggtccccaacccttgtactggtctgcagcctgttaggaaccgggcggcacagcagtaggtgatcggtgggccagtgagcagtaccgcctgagctcctgtcagatcagctgtgatattagcttctcacagctcaaaccctattgtgaactgggaatgtgaaggatctaggttgctcactccttaagagaatctaatgggaaatgtaatgagcttgaatcatactgaaaccagctgtccaactcctgtggaaagattgtcttccctgaaaccggtccctggtgccaaaaaggttgggagactccctataggactccacttctgagcactgataattaagggttatctcactctgtatggactatagttctgaggccaaggaaccatatttaccttgctcactgcagtatccctaggatctagcatactgcctggcacatagttggcattttttgtttcacattccttgcctaatcttgagttccttgagggcagaaactgcccagctcctgatatggcatat

SEQ ID NO: 317408 - DNA, 4001 bp, Homo sapiens
atgactagtgattgcaccattgcactccagcttgggcaacagaggagacactgtcacacacacacacacacacacagacacacacccacacacacaaagatactttactataaattcaaatagaaacacaagttaatttcattggaaatatttatgcctataggtattcattctgcttcaaagaatgctttctaagagaaggtaaagagtagaaatttggtaaggaagacatcattcctactatattaagcctcttgaaaataaaatctttgtgtttttttccatattctccagaaatgagtgatgcttggtgcataggaggcacacaataaatgttgagtgaataaattgattgaacacctactgaatcctagaatgtaccttaggaggcaagtagcaagtagtatactctctatcttatagttgaaacagtctcaaggagattgagtaacttgcacaagatcacaagctataagtggcaaaaccatcagataaaggacactctaaaattcttattctttctgctaaccataccaatgacatgtcttctttaagcatttaaaaaaaactgctatcataaacagttattataaataccttggaaaacattcaatgaacaacctgatttaaattactaattagaatttttttttctcaacttccctttcctggcaaagtgtgactatgtggcttacctgtggtgacaagattgaatttacattaaaagcatataggatcaatctaaaaaattctaatataactgaaaggtaattatttatgcatgtttaacatccataacagaatacaaattaccatgtctttactctcaaatagtaaatgatctgattatatatgtaagaaatgtgaatatgctattatagatttttcatatatataatttttccacaagtattcataaatcctcagaaaatatattttagcatcattaaacatttctgatggaatttctgaaaaccttaaaatttttctagttttagtcagtatacaatttcataaaatttgacctaacttaatgatttttttatttaataacaggcaattttgggcttatttctctaattaatttcaagtcatccataattactgttttaaaagtaatgattttaactaactataagttttaattattacatttaaaaatacagaatgcttcatggattttcttagagcaaaggtatttatgtagcttagtgtacttaatacccacagtagtaccccaaaaattaaaagtcactatcttgaatagtattttagaacacataactatatataatgttaaacagtatgaactttgtcattttaacaatttttacaaaagccatttttaataatttgatcattataaacttcaaatgactcagaacaggagcaggtttaattttaatcatgatatcattttatcttaatggtacatgtcatcattgaagcatagcaataaattgtggagaaaatacaagaaacattttatctcccaagccaaaatcttttgtgatatttaaataaattctttggaaatttagcttattgacttttttatattagtgccttaatattacaacctctgttattatacatattatatatgtgtatacatacaggtttaagccagacattgtatttaaattatgaaaaattggaatcatttttctgagctcaaagaagagaagatgatttaatttcaacagaaacaaggaggtcttaacacatcacatcaccatgaaataaatattaaattaaaacagaagtcttaggtttaacattatcatctatagactcacccggtatcctgaccgcttgattaataaaaaaccttcaaagtacaaaggtagagcagtaatctttaacctttcctggaagatcctgcgaggggctggttttgggggcttcttagccatcatacccctctctttggtgtgtggtttggtttctcgtctcaaacaaaatgaaatcttccttctgtgagaggaaaaggcaactgttcaaagaggaagtcccaaattgctttttaaccaccaacactaccaccaacaggacacacacacacacagacgcacacacacacacacacacttttttttccattactttttgtgaggtaagaaagaacaggtgtagactgactttcagagggcaatctctgggtaatccacatgtgcttagatttaaagcgcaaaataaacagaagattaacatcaccagaagatgaaagaaacaggtgtagagattgtgaactttaggggagatatcaagaacacagttattctttctatctttgtttttgtttattggtgtccatttttatttgcagaagacatgacttgaataaactcagcttcattaaaaattacttcatagaataattttattagtactacttctgttggttaaatattttagggtcaagttttgtgtaaataaaaaaaatagttgtatctcatgctcatttgatgcttcactaaatataaaccacaattatgggaacacggaatatggaatttttttcttttttctttctttcttttttttttttttttgccagtagatattccaagtacatgagttcccaatgaatatttagtgctatgttttgaatgtgtcctccaaaacttatgtgttagaaacttaatccccaatgcaacagtgtttagaaatgggacttttagaaggtgattaagtcatgaggcctctgccctcatgaatgaatgaattaattaatgctgtgggagtgggtttctttctcttttttcagaggcagggtcttgctctgttgcccaggctggaatacactggtgcaatcacagctcactgcagccttgacctctcaggctcaaacaatcctcacacatcagcctcctaagtagctgggactacaaggcacgcgccaccactcctagctaactttttcattttttgtatagacagtatctccctatgttgcccaggttggtctcaaactcttgggctcaagcgattctcctgctgtggcctcccaaagtgctgggattacatgtgtgagccattgcacctggcctggaagtgggttttttataaaatcaagtttggcactttctcacatgctatcatcctctcttgctcttctatcttctgccatggaatgatgctgcatgaaggtcctcatcagatgctggccatgttctttgacttccagactccagaaccatgagcgaaatacatttctgttcattataaattaccagtctgtggcattctgttacagcaacacaaaggagtctaagatatttggcaaaaaaatatctggcagagaaagctgtaagttttcaaacttttattttgttcttttgtgctttctgagctgcagaccattgatactatgattcatggatggacttcccacagttatctagtgagatttataaagctatactggggccaaagtgcactcaatggttgcatgtaggaaatggtccttaagagattggatttggcgtagcacagtgcaggaaatgatgggagaaaagaatactagaaggaattttgatttgtcttacaggggtcctaagaatttctaccattgcctatttcacactcagtatttcagaactactctagatttagaacagcctgggcccagtgagaccagcctattattagaaatcaaagcaagtcaggagtcttcagtctgattctcctttcctaatggagagactgcatggttttctccaccagtatgggtcccactgatcctgcagctgtagatatgggatgacaaattgtctacaaagtgaggtagaacaatacggactgattatcagtaagttagagaagagtgttcagatgtattatcaaaatgaaaacagctcaagacagaaatagggagttgaagatccaaaatgactgctttgcttttgtaagtttagacctgcttcttgctacccaaccttcaaataataaaatataagtccaactgaattttttgaggcaaaaaccataactatttt

SEQ ID NO: 317409 - DNA, 4001 bp, Homo sapiens
agggatgatatttaaggtacagtgtaaagagatgtttggatgttagaatgaccagcaatgggcaatcgctttataatgttactgaaaatgagccagatttctgtcttgagagttgcaaaaatggggtcaccttcagattagaacattaatgatactgggtagagaacaatcaaactgataagaagtcacagagaaaatattcgtacctcctctgagaagttgaattggtgaagatgacttaatattttaaataatctcattcaacaaaattaaccttatctgggactgtgatatgttatcataaacagtataagccagttaacccagttcctttgttattaaacaaaaaacgttagattatttatttgtaaattataaacatctaaataaagacattttcagtgaaacacataattgccacaagagttacaaataaatgacatttttacctgtttattgaaaactatagagtaattcatataaaggtaatggtcttcattattttaatctcttttaccaataacttgtgataaaacattacaagaatattttttacctaattataaaaaaaattactgttattaataaccccaaatctccaaaacataaagcagaactcatgatttatggcatttgctttgttacttattcactgatttgcctcagttattcaaactgaaatttctggccgggtgtggtggctcatgcctgtaatcacagcactttggaaggccaaggtgggcagatcacctgtggtcaggagttcaagaccagcctgaccaacatggagaaaccccgtctctactaaaaataataataataaaaatttagctgggcatggtggtgagtgcctataatcccagctacttaggaagctgaggcaggagaatcacttgagcccgggaggtggaggttgcggtgagccgagattgcaccattgcactccagcctgggcaacaagagcgaaactctgtctcaaattaaaaaaaaaaaaaaaaaaaaaaggaaatttctggtattagagtaagtgtaaaaataatatgtactttggggtttttctatcacctgatagataaacctacccatcagtcattttatgatgcaaaaagcataaaaactttagtgtattttatacctgtaaattttattgaaagtatggaatcaaaaaatgctcatagaagagtagttttgttttactaaccttgataaactgaaagatggatatatagacatagatatataaatatatatgtcatggttttaaaaaaatatttccccaatgaaaaataataaaaatatgaaatagtaaaatctttgttttctgccatatcacaactgaatgaaaacaacttaagtaatataaaacagtaaggcagtaaagcatgactgttatacaacattttttattatgcagaatgacataactgtttaaaatgatggaaaggtcaatgaaaaggtagtgagaaatgtttacttatgggaaaaaagtaaatttttaaaagttaaacttgtgaaacaatatatacatttgcaaaaaagagaacgtatgctattttcttaaaatatgaacttcgaataaaggtaaaagtagtaagtagcagagtagatgccagtacgtagacaaggaaataaaaagcttttcagaagttccatcaggagagaagttggaatatgtctccatattccacattatttactttgcatgatgattgctgatttcaatgtatagttattcagattctcaacttaccttcagatcctaagaaggtcatcatttctctcaattgtttctttatgagaaattatcattacataaatacacatttttataattagttttcaaaagattttaggaagcaacactctagattaagacaacatattcgattatacatgaacatattaccttttactcaagatgagactacagaagtagtgaagttgaagtgaagcttcaagagatgatgtgctaccctagagggccaatgtatttaaacactctgaagtcccccatttgtttttgttaaataatggcaattatgagatcacattatggaaactaaaagtaatgcccaaaatctgtctctacaaatgataaaaataaccgtaacaaagtgattttgcaatagatgattgtgaagacaaagtaaccaggaaacaactgtacccactgcatgttaatcccactgttagtctagcgctgagtgagtcagatgacagaaaagcatgctggaggaaaccaggcatagaaataattgcagtgataaagatgtttccacaagtatgtgtccaaggtggaacaactctatgacacaaataatacttaccatgttatcaagattttacatgttctctgataactcgtggtaactggcataataaaattacagtcttcatatacttcaagagtttttcttcaaatcattatttatctcatacttttaccatcttctattgactttagaatattttaagttacaaagtgaacgtaaacatttgccaaattcagtaatcttttgggtactatatgataaaaaattattatatttatggtgaaatgactctaagtgctcactgatacatatctcacatatgactgaatatatgtatttggaaattcaatttaatttcctggagtttttaaggctacatatttttccatagcagccatgtgttgacatgattacactagagtgaaggaaaaaatgttttcattacattcctaggaaaatttgtgtaaaaattaccctactcactgctggttggataactcaatgtactaagaaacgaatatcaaaaacttatatataaagttgaggtaagttatacagcctagtgcattgttcctcagagtgtgccatatgggaacatcacagacagcatcagctggagcctgtggaaatgtaaattcttagtccaccttcgcaaacttgctgagtcagaatcttggggttgtcctaaggcgtttgcattttaacattatctccaggtgattctttgggtactgtgaagtttgaaacaaggctggtctcagtggctcatgtctgtaatcccagcactttgggaggccgaggcaggaggattgcttgagcatagaagttcaagaatagcctaggcaacatagtgagacccgtatctccacaaaaacataaaaaaaaaaacaaccacatatttgtctcttgaatgcattagttatccttaggctttaaccagtaaagataatttgtggtttaattttgtatcagattttttaaggaagtatttattaggtaaatttttatgctgtattggaacagccttactggaaattatgattactctctgggtaatatacaagaaaatataaatcatttcttaaggcaaataaataattcaaattaaattagatagatattattcttattcttttgtcatgagatttataagcattatagatacaaagtttcttctcatgtgtaaaacaaacacaatctctttacattctgagtggaaaaaagttacatagggttcagtaactattttatttttccagagatggggtcttgctgcatagcacagtcttgagtgcattggtgagatcatagttcacagatgcctggaactcctgggctcaagtggtcctacaacctcagcctcatgtttagctgggactacagacatgtgttatcactcttggttaatttaatttaaattgtttttggtggagacttggtcttgctatgttgcccatgctggtcttgaacttttgaccacaaaaatccttctgccttagcctccaagtagtgctgggattgcagtcatgagccattgtgcctggcccatggttcagtaactactgaactatatctgattttaaaaataaactgcttcgattacttggggaaagtcaaatgattttcttcttttcttctttctttcttctccctctcttctcctttcttacctctggttttcttcaccacttcatttatccaacaatactaggtactgttctagtagat

SEQ ID NO: 317410 - DNA, 4001 bp, Homo sapiens
ggagttggaagtgagaatgaacaaatattattctggattcccaacttttcaacctaaagcatgagattggtcttcagaaaaaagataagtgaactgtctaggcatcccagaccaatcacagtaaaggcacacgggcagattttcatatggctgcacatgaacaccactgggctaaaaataaagttcacagatgtcattttcaccattaggcttctgtccaggcatgggcagcttgccaagggagggcactggacggtaagcttttctgccagtgttcgctctctgcttagcaaacggtccctaaaatacagaaatttaaacccagatgtcaattctactcatcagggttgggtcccctatttaagtagtcccttcctagggatgactatccggccctattctggggcagcgtggaggggactgccgacagtgctgaaaggggtgaccaaggcacatccccagggcctcagccacagccttcatggccagagtccaacctgaactttgccttcctaaagaagcatccagatagcaggaggcgcccgcagttcgggtgttcccaaacccagctcttcatgggctgtgcgatgggaggatgtcagactacccggattgggacttagaaaatgtccctgcttgggcagagatcgaagaggcttgtaggatcccctaaacctaagcccccctttccaaaggccgggaaggggcgccgccactgcagccgcccgcactgcaccaagcgccgccaagtggaggagctcatccccgccggaggggcaggaccaagtcctcaggcgcgggcgctgagggactcggcaagggcgcggcccttggaggaccagacaagaaacctgcctgcgcgtaccaaccagcctgggaaaccgaggggcgtggggatggcccagtccccttaggagagcccgtccgcaggaatgggcccctaggaaagctccaggtgggtttgtctctttgctcccttcctcgatgaacctcaaagctctggcagatgtgccctggagtcacggggggaagaatacctggtttggtgaccagctcctgcccggaaggtccagggctcagtccgctgctgccactctgatggcctcccggaatcgcagctcccccaagaggggcgtctttctcctgctccgcatccccgtccttcccggtgtcgccagggccgccccgcagcagccaaacgaaaagtgctccggccagaccccctccaaccagcagggcggaccagacggcgcccatggctgagaggccgcggccgcaggagactacagggactgggaccggggctcaggtcacgcacacagagccacacctaccccgcccgctccagccttttacggtttctgcgccgggcactccggcggagcccggccctgagcgaccagtactcaactttcccagccccgccccgctccccgcccctgggctgcagccccgggctccctcccggggaagactccagcgctcttctgtccctacactttctgttcccggccttgccagttgccagcggccaggggcgcaggggtcggcgttccacgtgtgtcccgcgtgaagaacccaagtgcgcacaactgccccgcgcagccgggacctgccccaccgcccttccttcttccgcctgctgcccgcgaggcccagccctgcctcggcccgcaccgggcacctcggcgccttctccccagggaagctcagcagcaacgcggtcagctagaggccgagagcttcctggaacttagaggtgggagaggccgcgggcgtcggtgacgcgcgggctggagcgcgggctagagcggtggcgcgttcgggtgggatgggtggcccggaggacggcgggcgcggtgcggggaaactgggagccctagtggaagctccgctccgccgccagctcagcgcgcttagcctccccaagcttccgcctcctcgcctgtaaaatggaaggactggactgaggaccatccatctaaagatgccagtcagctcaatcacatccagtctcgtcctctttgggcgtgtatggctgctgcgaaatgcgcacgcatctgtatgaactggatgttgtccatggacgagctcctacagataagtttgttaataaaaacagcagctctttattaagcactgtctgtattccggatgttttaagtgtgtatttaatttaatcctcacaagacaacaaccctgtgcggtgttatatatatttctttgtaaatcctttcctctgctgatctgatgactttgcacaacagcttcaagctgatgatccccacgtctatgtctgcagctcacacctttcccttggactccgacattcaactgctaaaggccacagataccaaacacctgccttggagtaattgctataattgctctctctggtagggcaaattatctaatgtgccccttgctccgaatggacagtagcccttaacggggtgcaaggttctgccagtggggttactggaaggctgatgcacgccttgatgcaggccacaacttctgtaatcataagagaggaggtagaggagaggtgagggcgaagactgcctactgggcatctcctcgtggatgtctaatagacatctcaaacccaactcatccagacctgaactccccacctaactccccaaacctactactctccccaccttccccatctcaggaagtggcaaccacatccttcccattgctgcaaaacaaaacacagcaagctcccacaggccactttcaaaccaccagtcagcgtgatcctgttaaaacaccccagttctctgctcaagaccctccagttgctccagatcacacggaagaacctttaagaccctacaggatctgttccccatgaccactgtgcactcatctccatcttgccaccttcaaccacactggcttccttgcctagagtcatccttcctgcagacatcctctctctctcatcccctttaggtcttggcacaagtgtcatctgcatccccactaccccctcccctgcccagcccttccttgacaatcccagttttaattacaatcctactccctatatccttcccctgctccattgttctcattagcacttagggcgtcatttctaatacactctataatctgtgtgtctgtggtttaatttctctttcctcccttcagagtgtaaatgacagcggggatggttgtcctttgttctctgctgaattcttagcacctgtaacctctccggagtgagcgcttagaagtacaggttgaatgaatgaattaaaagccccaggtaatttcaccctagagcattattggcatttttcttacgtagattccatatgcatttttagcccatgtggatattaccgttccttgaaattcattttatgtataataaaaagtaaccgtaaagctatatttttaagagaatgaatgtcactgtataaaataagattctttcagcctgggcagcatagcaaaaccctgtctctatggaaaaatacaaaaatgagctgggcaaggcagtggcgcctatagtcccagctactcaggaggctgaggatcacttaagcctgggaggtgaaggctgcagtgagccatgatcatgccactgcactccagcctgggtgacagagggagactgtctcaaaaaatctgataaaaatataagatcccttgcatgtgcggttcacatagggtttgtgctcctatgagagtctaatgccgctactgatctgataggaggtgcagctcaggctgtaatgttcacttgccaaccactcacctccttactgtgcagcctgcttcctaacaggcctcagaccaaggtctggggactcctgtctaagggataaaaatcccagagaatctgtaaaatccttcagatgtaagccccactattcacttataatacctaaaaggctcttaatatttattgctgtcataaatgtccattcatttatttaaaataataccaaaaattattttctcaacccatcagaattattttt

SEQ ID NO: 317411 - DNA, 4001 bp, Homo sapiens
gtaggtttgatgtatcaagttccatttaatagggcttgatatgcttcagggtaaagttaaacatgctgaccattatgttctatactctacatcctccaaagcttttaaagtttaccaacatccttcttctctctagaatagtaaatatcctatcatagaaatcagagaaactgcttggctttaaagaatacagttcctgagcacttgtcagagaagctgttagtaacttccagacgcccgcaggactatcattttggttaaattaatcacgggtcatcttctgccactttaaactttttagtcttacaattattgtaggaaatctacagatctactttaaaaataagtgaaatactaaaaaaaaaaaaaaaaaccattattttagctccattacttttcccaaagaaatcatttcagggtccttatataataacttttacttaaaccacaactgatcagttgtacataacaccggaaggctttaaaaaggatacaattctgcacttaaccttacaaaacacgtttccaagttttcaattatgagatcgttctatatattaaaaaaaaggtgctagtgcagtctatcagaactgtgctgccagctgcaagccccgagtatgctgcactttgcaaattttaggtataatttctggttacctgctgaggtttctacaccctttgtcacccagtgatgctcccaccaccaaacactttccatcaccacttaaaacggcctccttccaccccgcaaaaaatgcactgtaaacttaggcatttctgcatactaacacggaaccactaatatcactaggtattatggctctcaaagaatcccctttagcaggctcccctgggacgctgtgctcaagcggagctttgaaccggtgagactcgctgccagctgcctttgcaaaagcagcaccagaggtagactcaataccgcaatgctgctgctgactttttctagcagcctcaaaaaaaaaaaaaaaaaaaaaatcagcccagtcccctgcagaccctgctggcacttctgcagcacgaaagagaaaccaccgcattgctcagcttggaagatcggagagcccgactgaagggaggggaatcagtgccgtcgagaggctcggcgagggcggggtgtcggggtgaaaaggaaagacgtccggagtgcaggggaccgcgacgaagcagcaggcagggctccgcatcgcgccctggccggagccgcggaatagcggacgtccggcggagatgctgacctctgcacgggttgggggtcccatcgctgccggccgagccccgcccgccgccccccggcccctcacctgtcatgagcgccgggctatcgccggccgccgcggcgggagaggaggcggcagttgcggcagagccagtcgcccgccgcccgcggaggtgccggggcacaagctcgcatccgtccgccgctccggctaccagcagcccgagcaccagcaacgcagcccagcgccgccgccgcagcagccagccccacgctgggccaggagtcgaggcgggatgaaggcgccgaggagaagccgggtgaaagcgcagcggcgccccggccgcctgcagctcgccggctccgcgaggcgccaccaccgccgccggcgactcctccggccgcccccgccgcctcagacacgggctcccgccgggcgccagcctggtcccatcggcaccggcggcctccggagctctgatcccggctgcgttcattggttccggttatttaaaaaaaaaaaaaaaaaaggtggggggtagaaaggtacggcgtcttcaggcggtgcacgacacccgcgctgctgctgcggcgagaccgggatccgctgctctggcgccgccaaacaccaaccccagctcccgcgccgccgccgccgcggcgcatccccccgccccctccggcccgcgctggtcgtagtaccacgctccgccgggacgcctccctcccctcgcacattcgctcgcataccaatcccccgcctccctcaggctctccacggcgcaggcgcggcgctgctgtactgcgcgtgcgcggcatcccagccccgccccggaggcgttcctagacggacggtagtaccgtggggcggctgataacgctttagcgagccgcgaagataggaggcggggaagaagggggacgtgtacctctccctcattcacggtaccaccgcgagggggagtggggggctacaaggggacggagagaagagtccagacgtcccacatcctgagggcgagtttcagcctcgtagagggcagcgaaagtaattgcatggatcaggaaaatcttgcaatcggaaaacagcagcgtccccgtaatttcaatataggtggggcttacaagtggctggctgtttagacgcggttagcatagcttagcgttttatttacttgccaaacatttcacaaagcgcgtgctatgtgtgagtgtaccaggcattgctctaaccgttttacacatttacatgctataactccaaaattatcgttacccccttttacgaatgaagagactaagacctagaaatgtgaagtaagttgtccccaatatcccacagctaattcatgggaaatgagcgagatttagcagccactgaaaaggcctatttaagagaatttactttagcctctgactctcctaggtacatttacctgaactcatcaccttcccacccccatcccatcgactctgtgctgtatcctgaaccggctgacagaacaatgatgtagacttgacttgttttcgccaacctggaatgaagcaaagctcttgtgcacccaagatctgctctctgttgtaaatcctgttcagacctggtctaattggtttgaataaataaagaaccggaatctttctcatccaaactagttgccagcatatttttaaggccacctcccttcaaatttaaaaggaagtgttgaatgtactgtcactataaattaaaagccctggaaattcacacgcaaggaggcattctttctcccaggggcacaaaattgtttaaaatttgcagatagggttattaaacacgaagatccttttgctattgggttttgttggtttcattctgcttattggtttgtttgcttgctttctcaagccaagaagatactcaaattacattctcctaaagtatttcttaggtagcctggccaagataaccacaaatatcgtttattgtggaagggcagatgcacactttagaaaagaatcaaggatgtctttgaggctaagtcaatctatcaacagttatttctcagcagacttcttgtgggcatagtgttcaggtggcaattctttatagggcaaccgggagattatatttcccctgctgaaaggcacagcgatgaagtcacaccagagtgctgagtgcccaccagagaagataattctgctaggggaccagaacaatataaataacaagcttgttcctgctctccaggaggcatttcatttattaaatgtttactgagtacctagtatgtgccaggcagagtactgagtggtgagggttaggcaagagagacacttgaaaaaggcaattaagtcagcagtcagggctatgagataaacagcacagtcccatgactaaggcatcttacaatctttttaaggagataaaatgtacacccattaaacaattagaggctaatacaaagtagtaatcagttgctaaatggtgtagtgcaaactgttacagtagtaacagtataaaaccacgaacaaattaacaaatcacaggggccaggattctttaaacaaagatgatttagtatttttttttcttcttttaaagatagggagggtattgacattgagagtgtattggactggagttttaagtgtttattcctctcactactggaaccggaaaggaactagggatccggcaagcactcaaaagaccaaggccaggaaggccaggggccaggaataaaccctccaccgcagatcatctttgccacagatatagaacttt

SEQ ID NO: 317412 - DNA, 4001 bp, Homo sapiens
catcatgttggccaggcaggcctctcctgacctcaggtgatccgtccacctcggcctcccaaagtactgggattacaggcatgagccaccgcgcccggcctcataaccttgtattttaacaagcaccgaaacaggcagttaaccttaggcccaatctgcttatagaataaggaacaggaacaggaaaatcaaaaggttggctacaccagagataactattttgccaatgaatattttcaagctggggataaatgacagagacggttttcaatataagggtggcaaatttcctctgtaaataaaagagaaagatgctaggaaaattagcaaaagcatgacctttgacccaggctagaaccacaagcccgtgcaattgagggtgatgctgcatagtgttcaaactcttactgggacatgcaagagcctccattacctctgtgcccacctctcctctgtccacaactggctccttacctgctcacctgcacatgctccagactaaagatcaggaaaagctggggcctctctgtgcccccaagaccctgcactggtttctcaatgcccttatcaccatggacggtcattcagggccattagactaggaactcctttaaggaaggctctcgtgggcctgacacagcaggtgctcacttaaccttgactgtgttcatctatctttttgagaagggctgtccaggcaggcatctgagtagcactcacagccttgggagttctagaagccatccatgatgtacgcacacagccagtgccctgggtaatgatgacaggcacagctttcaaagcagactgtcctgcctcaagcccagctctacttcttaccagcagtaaccaggacagacccctttctaaggtagccacctcaaggggcatgaaaaggatggagtgaacactatgtgctagcatggctggaacatagtaagtgctcagtatgtctcagctcttacctggggcacagtggagactggcgagtcagcacagtaggaaaccagctttgagaggcagagggctcttaacataaaaaacggcacagctcggtactgcttgcatttataaggcacttttcacgtggattactagtggttaagcttcaaacaaccctataaagtagctagtggtatcataactcacatttcattgatgaagggactaatgtttcagagaggtgaagtaagttttccagggacacgctgcactggaaagagggttctgctagtccaaatagggagctctatcgacctgaaccgcaaggatccagccaggaagttgagatgcggttggacagcctacaccacttctgcgccagggggaggctgcccagaacaggacgccctcctaggaaccacagagtttagcaaagaaaagtttccctctgtcctgggtgattgaggagagctgcatccaacaggcccttgcacgagaccaaatgcgtcgtgggcacgcgcacacacacacagacacacggtgcaacccgcccttccaggccacctccgtcagcctcaggctctcaaggaaacctcggtttcctggggagcccgagcctagaaccatcccgactggcctccgaagtcaactcctcccttccacacccccaagtgcaggtttcgggttcaactctctgaagccgcctccccagtcccgcgctaggcaccgtcccgactactaaacggcactgggtacctaggagttgcctcagcagaagcgccgcgcctggcacgggtcgggcacacactgcattcgctgggcgaagtggccatgcctgggtccccgcgccgggcagcatgcggtgccccgcagggctcggccgagggtggtggaggaaggggatgccccgcgaagcgggaattcgcacctctcgctctcttaccttcctcattctcgtcaaacacggggggcttgtgggagtggttcccgcccatattccgccgttgctgccgctgctacatgcccggccgctgggatgccggatgcgggatgtgggacgcgcgcagagatgcgggatgccgggggcgcgcccagtccgggttgtagccgcgcgcggagcccgagggggccgagcaccgtgcaggggcggggacggcgtcccccttctcctggacgcccttccgactgcgctcgcagggaccccgctctcgccgcgccttccgccgtgccccgcctcgggctgcgctcgcagctccttactccagtgcccgcccgggaacccgggagctcctcgcgccggggccaacgtgcggcgctcctcgccggctacagcgggcgggagacgcgaggcggcgcgggagcaggggaaggaggggaaggagcgggggaggaggggacggacgaaggcagcacgcagtgggcggcggcagggcggaaggagctgagaaagggatcggcccggaagaatctgaatccctgctcggccctcctccctcggccgggagctcggtccctgcaggcagtaagcggtttgtcagcacccactatggccaggcctcggctacgcgctttgttagcaccatcccacatccgcctccgacaacccagcagtaagaaagcatcgttcatattttagagcgcagtagacggaggtctagaggtagaggggctcttaggtctgtggttagtcggccccggctgcgaagggagtcccaggactccccgctagcctgtatttgcccattcatattgggatgggcagtggagtgtctgctggctctccaaccgacgctgttcctcttaaggtttttctcagtgtttaatgaatgaaagtatctgtttactttctgaccccttaagattagatactaatctgaccccttcattgtacatggggaaactgaggccccagacagccatagtttgccccaaaccattctccctgggaatggctgggcatgagtctcgggattcccccaaaattgggcggcatcggcgtccgatttaggggcgaggctagcatgagggtccctgggctcctgcggcgggagcctggatcgggagatacgcgccacagttgcgggtgcctaagtaaggggtgcggcagatgcgccccaagacgtgtggggcgagcgcgggttcccaggacgctccctgagggacaggcaggtccccctgccttgcagtcctgcgggcccagctctccgggactgcagggaatctttggctacatcctgccatctgctgggcgcctggaaccactgtccgtgctttgatagaaagcaggggttctttgtgactctctccatcctatctcgtcccccagtccccgtcccctacctggtctctctctccagttctctccccttctttctttttcttgggagaagggtgagggaagccggggagactcatacagaaacaaaacaaaacaaaacaaaacaaaaaatctcttaaaggcagtgggaaagaactgagaaggtctgaggcaggcccacccaccatgacccagagctggctctaccatttactggcaatgtgtcccactttggagttcttatctgcaaagtgggctgattgatattaactccttgggttgtctgtgagaattatatcaggtaatatttataaaagcaggcaacagtgcccggcatataataaatgatgaataaatatttcttgcctttcattccaccaacaagcatacactgagtagccagtgtgcagcaggcaatgccctgaacacagagctggcccctagctcaagaagcatagggcggaatgtggacaggcatgggctctgggctcattctacccaggtttcattctgctttgcccctcattagccagttaacttggataaattacttaacctgttctggactcagtttcttcatctgagtccagaaggtgctaataagagaactttccctttctaacattgttatgaggaatatattgatattgtgctaggccgggcgtgggggctcacacctgtaatcccagcactttgggaggctgaggcgggtggatcacctgaagtcaagagtttgagacta

SEQ ID NO: 317413 - DNA, 4001 bp, Homo sapiens
aacagggggctgctggaaatacccactcagataaccggccacaatgcagcagccagcaagcctggcactgcaggcaaccctgggcgcaggatcctccacaaagctcgaggaggctgcagcgccggggcttgcagtcatttatctccctgcagccaaaacgcccggctcgtcccccctccctcgttttacctaactaatagctctccaaccccatattgagagggcctgctgtggatcttgggaggtacaaaatggtggatgggagctaattttttcctgctttccccataacttatcgcatccatcactgcccgtcctctcctccaagcacccgggccgcggcgtaccgagcacgtcccgcggccccggcccgggggcagaaacgcggtcaccaaccaacctgatgtcatgtagccccgcgaagcctggggcgcgaaggccgcggggaaacgcttgtgcaggcggtagtccttctcgctgcgggacctcatgcggtccgaggcccggtccgagaaatccgagctaggccaggctcgccgcaaggttgtgctccgggtcttcttcatggtggggagggcgacctgccgccccgatcctcggggcctcagcgccggggcgcagcgcgctccttcatccgtctacggcgggcacgacccgggcggactctgcgcacattttcccagcccctcctcgtcggcgtctacaccgccagcggcgggtccggccctccccacgcccccccacacccccacggcgaaggctccgattttacacacgtcccacaatgcattacacttcatttgcaatccgcccggcttatagcttccagattcctggggggaaaggcacgttaggaggctccccggccgggaggaggcggggagggggcgggcggggtgggggcgccgagacttgcagcgtgaaggcaatgggagcgcagacaatggcccgattcagcgcaggagtgcttggccaactgggagccacggcacaaaagacccaaacaaatgaggcagccgaggcctccggggctgacccgggatcgggcgtgcgggaggccggaggggcggcggcagaccctccgcgccgggcagctcagcgcgaggcgtggggatgacagtgtccgagtcgtgtccccgcgggcctatcagccgcacggcccgcagtccccggcgctggctggctctgcctccgctgcagtccccgggagacagtcttcatcacagaggctcgagcggggggcgcgtgtgcacaggatccgagcaggctctgcagacagcagctgcggcgggcgggctcctgcggaatccaggaagagcccgcgtcgtccccgcgactgcagcgcctcgtcaatcttccccttgccgaggctccgggcgctgtgcgtgcgcgcgggtggatggctgggtgggtgcgccgacacgcatgtgccccctacacatgcatgctcctacttactggccgaggcggcgccggagccatggctgccaaggacgccgagcctgcgatcgacccccgcgcggcggcagcgctgctccggcgcgagcgcgcggaacggctattgaagggcaggaagcaggacagccgcccagtctcatgctaatcaccaggctgccttaagttagaacgcggttcccatcaggcttctcattttcatgtaaaacacccggcggcggcgcggggaccttggcagctgccccagcctggagccagcgcttggatatttacatatttttaggatggtccctcccgctcggagagagacagcgagccagccttcgtgggaacggggagatctgcggtgcgctgcctggcccacctgcgccaaccccaaaggaagctaaagccagagggaggggaggccacggcgagctcccccacaaccgcacacgccggggcgccgggtccacgcagcctggaagacgcaatgcaagtggcctgcagcgcttcctctctccctctggagtcccggtgtaagtcaccgccagcccgctacgctgcattcaggtccacagctctttagatggcacggctctgcacagctgtttctggtccaacaaccaatcgctaaaggacaacaatgcgcgcggcgcgcgaggggaggaggggccaatgcgccgcccgggcctgggcgctgggcccgggacgcgggcctgggacccggaggtcacgccgagttaaaggcgcccagccacgttgctgctaaccccgaccacgctttgcactgccgttcattcaaaaacggttatctcctcgatttgggttttcaaaaatgctttggtacagtaaacaacgacaaaaataagcccgatttcctttttcagcgctgcatttgacatgttggtgcattttttcatctgtgacaatgcaacgttcaaaatcatatttatgctgttgtttcatattcacaggtgccaagatgcagagacagggatattaaatctttatagggatatgcttctaacaggctgatatcgcaaaaacaagccagtggattctagctggttaggattcaggaagttctaacacaatctgtgctattccaaggcttgaattatttgaggggggtagcaactatcttgaagaaccaggcagagcaggatggcgttaagccacaggcattataaaatctagaattagagctctcctcattcagatctcaagaccgccctctataacctgtggccactgtactacctcttgggatacccagggtaaataaataaataatcactaagtagcctatggaatttatatttacataatcaaaatgtattactgtcaaccaattcactaatgttctgtggtttttatttttaattgggaaaggcacttctagttcaatgtcttctttcctgtaagagaactgctaagaacagaaagattacagctttagaagttatagaaggcacttttagttcaatgtcttctttcctgtaagagaactgctaagaacagaaagattacagctttagaagttatagaaagctagctgtataaagcagggatccccaattcccaggccatggactgcttggatatttacctaccccacagatatttacggaccccgtgcagcttctagtcctcggcccattagcaaccaggcagcacagcaggaggtgggtggtgaagcttcatctgtatttacaacagctctccattgcttactggcattacctcctgagttcagcctcctgtcagatcagtggctgcattagattctcacaggagcacgaaccctattgtgaaccatgcttggagggatctgggttgcgtgctccttatgagaatctaatgcctgatgatctatcactgtctcccatcacctccagatgggactctctagttgcaggaaaacaagctcagggctcccactgattccacattatggtgagtgtatatttatttcattatatattacaatgtaataataaaagaaataaagtgcacagtaaatgtaatgcactcaaatcatcccaaaaccttctgctctccaaccctacccccaccccagtccaaggaacaactgtcttccacgaaactggtccccagtgtgaaaaaggttgggggccgctggtgtaaaggaccataaggtaataacaagttgtattaatgaatgtaggagaactgacatttagatatctcaattcaacaattactcagtacctcccaagagccaaaggtggttatatgaatgattataatagctatgacttaaagctaatggtgactgctgtggcaactgtgatagtcattcattcagcaaacaatggctgactgtctagaatacgcaagccctgggatgggtgctgggcaaacagaacaccacacatgaccctgcagcaaaccgtctagtatggaagagaaacagtaggcaaataaatgcagaaattgtgctaagttctatgaagaacaataatctctctaagaaatgacagttgagctgagacctacagcatgaggagccactcaagcaaagagtgggggagatggtgtta

SEQ ID NO: 317414 - DNA, 4001 bp, Homo sapiens
ttccttgccataccttgaaattgccctgcaaagtctcttgtgggaaaaatcaacactctatagagaataccctttccccttcgttttccttcctttccagatgcaggagataatcaactaagagccaggcactcttttaggtctgataagaagcattttacaacctgctccctctctctgaagtctgctatctgagagtttcctctgcacaacaaaacttggtctccacaatcctgtatcttaacctgaacatttcttttgatgccagtcttcagatagactcaaccaattgtcaaccagaaaatgtttaaatttacctatagcctggaagcccccactttgagttgtcccgcctttctgaacaaagccaatgtatttattaagtgtacttgattaataactcatgcctccctgaaatacataaagccaagctgtaccccaaccaccttgggcacatgttctcaggacctcctgagggctgtgtcacaggccatggtcactcatatttggctcggaataaatctcttaaaatattttacagagtttgactcttttcatcaacaagaaacataaaaacatttaaagaaggccatgaaggactgcttggagagggggagaagatgatgccctgattcggcatttaacaaatgtttattaggtcccaatcatgttcccagacactcttccaagacagtagttgggaaaaaaaaaaaaaaaaaaaacaggaggaaatgatgttacattttggaaagaagtgtttccaagaataaagtggtcagttatgtcaaaattaaggattgcaaagtgtcacagggggtcattgttagccattgttaggggaattaatgcttataatgcccaactccattaaaataaagatagaataagctgcaagaatagtgataccagatactgtgaagcagtacaattcaacatgtgaaacactgacagaagtcaaatttgtactccaccccaagaaacctaaaccttcccttatctgatcagttatgtaacagaataatggatcctggcatttgcttgaaaatacatagtgtaggtatggggaaaatgtaggttaagaaaaactatcatttggacggtattaagctccagaaaatcaccagaatagaaaaagtagaaagcaaaattgatgtatttatttttgactaagtcactaactgcaaacaaacgaggagagcaaatattatttaaattatccatccccactccactggtcaaaaatataatttttctttacagaatgtggagaaaaggggctcccctgaagtgtgttaaaagagatgaggacggtcagaaaaatctgtctgaaaaaaaaacggaactatctttaaataatactgcaaaatagaaatataagctacatcttaataaataaatgtctctggttaatgggaggaaagatgtgaggcaggcaggattacaaagcaacgagacagcgggaggtaagggcacaggatttggagactcatatattatgtcaacacagccaggaaatcaaaatcctagacctaaactgcacaatcaaaagtaggatgtagacaactattgcggaatcaaaagtcctagccatatgctcaccagccttttgaaatgggacaagtgatactatcagtctcatctgtaaaataaaagtatagtgttttccctgcctacttcatgttttgttatgtttacaaaatggtactattccgctctatgtttaactcacaagcacgcagaagcggagcaggctgaagataggatgcctgtcacaggagctctgcctcttcctacatcttacctgtcgcctgctgcttcaggaaaggtacctggtaggatccaggacccacatgggcctcagtgctgccaccttcagccaatttgagcaggcggggagcccgatcatacatagtgctcggggtggtgggggcgctggggaagggcaggtgccgaaaacgataaaaacaaggtagctagaagtgtggagaaaaaggaagccgacaccagtctgaggaggccgggaaagaacttccgtaaacagggaaattaggggtggggttgtctccccgcccgctcattgataccagatttcctcaaatcgatttctagctctgtggtaaagtagaggggtgagcgactagagattagacgtcccacacaatcatcagtttgccaggtgcacgccaccaaaattgggtattagggattagacgctcgccccggtgcttccggccctgactccgcccacttctctccgcccggaagcctggggaggaggcgggcccagtctctggggaggaggcgggcccagtctctagggagcgaagtggaggtgccttcctgggccgagccctcggagcatgcgcaccgagcagccaccctttcccggctctttttacccggaacccggcgcgccttgaagaaggcaggcctaaacctcgtagctcttggggtcccggtaactacttaggtcccgaacttttttaagtatgcagaagaaccttagaaaacgcgttaggaagggtgaggactaacttgaccttgatctgcttcccgactcaacagaacctagtaaagaaaaatgcagtagcatgaagcagagagcttggggttccgcaagctctcccccgcttctactgcagccccactcgtactcacagagaaaaggcacctctgatcttaacctgtagatagtccaaactgctaagacaaacccagggctcagggcagtgacaagaaatggagaacccagaaaaaaaaataacaaataagataagggtaaaaaagaaaaaaaaaaaaaaagaaatgaggacaccaggcaaggaggcgaaaagctcaccaactgaagccgtggaagtgactgaaagctgcctcttttgtcgtatgccaggtaaccacaatactgattcatcaatatttaaaaagcaaagcgaaggcactgaaaaagcccagtccaccccaccaaaccaatgattctgaaccttgggcaaaagaaaccttgcttgtccttggggcttaaggaatctatgtcagaatccacctctgcatctcgcaggctgttttttctagcaagaattctgtccagattataaatatcctcagaggcttagacaaatcctaccttgatcatacctcacctccaaatggtctacagtacgttaatttgttcctactacaagtttttatagttttcatactctgtaatacacgatttgccactcaatcctgtgcaacatttactgtggcttcattgtgccatataggtcggaaccctctccttgcgaggctatatgcttctcaaggatgtatctgtagtacctttttttctgttcaatagctagctaaattatttatgcacttaaaaaacacgaattggcatatactgtaggttccatccctgctaagttatgaggatacaaaggcataagaaagtccctgccctcaggtgttctctctctaatggggaaagagacgtataatccaaaacgagaggtggcaaagattttttttaatggtaggaaaatgaatattgcaatattttggaaacatctcaccaacttcgattctccctgcattctgtcagaaaccctcataattctctcaatgttgttttaaccttattttccaagctgccacctatacccattcagaagatctagatatttactatgacatattagaaagagtcacagagatgaaagagaaaaattcatgtgctgtgtatgataatccagtggtgcttgtaaatttgcccgctatgtccttaaggacatcatttgaccttgatgatccaaacaaggatatcaacccaaactgcatactcaggtctaggccatggttgccgtaagcattgatgcagaatttcaagccctgtctggccattctgtctgcagtagtctacattactctttgcttgaatatacatatttttggagattggaaatggaaatggtaaagctggctttatatgctttctgtctgatttgattttcagccattga

SEQ ID NO: 317415 - DNA, 4001 bp, Homo sapiens
ctgggagggagagtgtcctgtttctcttcctcttatttcaacctaggaagctcccactttaatttgttacatatagaggaccaaggtagttttttaaaaggaggaggagaaaaaaaggaccatttacaggtaaataaactgaggtcttaaaacttgcttaatgaaatcatatagctaatagttgcagggttcagacaacaacctcgtctcttggctccttctctggtgctttctctaccagataacatctgaccatctacagggcaaaattcaaactctgcaatgatacacaaagccctttaagatctccgcgtccaatttttatgagagtcccacattccagtctcactcaaatgtttattgaaccaacttatgtcagactgttacctacctccacagcttagcgcatactattctcttagcctgagatgtccttctgcactggaaccaactaatcctctttcaagatttgttttaggcatcatcgcctctataaagccttttctggtcctcaggtagaactgaccacattctttttgtgccctacacaacacctgcaaggctttatggcacttgttttatgtctatgtccgtctactccaccactgcttttacatcatattactctaacacgaggctggtcagaaggtaggtgcttcatagacggtcatcaatagggcgagtgtattcatctggtccaatcccctttctaatgtttaagtatcctctgctaactgtcattaatgcatgcatgactacattcattcaaaaatatctgagtgtctatacagtgccaagtgtatgccaagcagagaaggatttactgtgaaattaatgaggcttaagctttagggtccctctcttcaatcttccaaagctctgaatctttcttggtgatttttatttcttgaagagggcagacagaactatataagctgtaggccccacaaaacctagatacctccttggtgtcacgaacacaaaagggaacaagacaaacagctctccccttatggagttttctgtttaatgggaaagacagccatttgttcattcactcattcaacaaacatttactaagcaatgctatgagtcatgcattctgagatgaaaacaacactgtccctgcccttaaggaaaaggttcctgttcccagggagatgaagggacacctgctctgatcagggaacagaaagtagttgaggtgactgtaacactgtgtttgcgaaagattaccctaaacccgtctcaagaggaactgagtcctacttattgcagagacaaagggaagaaagagttcggctgaatacagtttttaatctcaactaggggtgggaggcagacaagtaaatagaacaggcaaatatggtgtggtcagtgctgcaacaggaagcgaaggactgtcaggaggtttcccctgagtgcaagtctgtagtgacggcgaactcatgacctcacaaagccgcccatgcactttccagatagagatttctgaggatctcctttcttgtcccccaatccctgtcgccgcaggagaaatctgttccccaatatgcgtcccccttcctcaaaataaggctgttccttcccccaaaaagctgtagggtctctgaggccaactcttctgtcccccttagagccacccccttcacacaatgcttacgggacggggtctggtttggggcccggggtccctgtcgcaggactgccccctcctcaacccgccgtttccatagcaaccagctcaccacttcgcgggcccggctggagaagtcgcccttgggccgggggctccggcggaacagctcgtcccggctgccatcgaccccgccgcccaccgccactcccagcgccttgttccgcgtcttcacggtcttgacgctggcccggaatagcagcgtgatgtccaccgccatagcgacccgcaccctcagccccacactaggcccgcccacgtaagcagccggcgaccgcggcgcgaacccggccgctgaaggactggtcctgccccacacgcctccccccggcaacggcgacgcgagaagaaaggttccggcctgcgccctgctaccgcggcgggaggaaaaaggttccggcctcagccggcgcacctggcggaggaggaacctcgcgacgcgctctcgggcatcggtttctcccagcaaagcttggagggtttagctgcgcggagagctcagcgagctcttctgtgtctgtttggggcgtgtgggctccgggagcgtgaggaccgggaagctaggaggctccttcccttctggcggctccctcactgagaccgggcggtttggttgcgggggaagtggagacgagccacccttgacctttgactgcaagaactcaccttgagcaggatagaggcacgtggacggtgaccctcgggatgcaataaatgctgagacagatcaggtgtgcaaggcacagagctagaggccagaggcctttcttctccaaccttcagtcacctctttttaaagtgaagccagcatcctcctcggggtttactgtgaaaattaagtgagctgacgcgtgctgtgttttgatgttgcttggctcctagtaagtggccaataaatggtagtaatcgttaataatgttattattataatcactgttatttgtggtaaaggaagaggctttagagaaaaggcgtcacctgtgcagagatttgaaggatgaataggaagtttagatggagacaaaggtgaaagagtggccctaatgccgctggattctcttcatccttcatgcatagtttttaattgtaccgtcttgagccatagctattaaaattgacaactcaatcaatgagtttcttctgcattttaggttcatgttctgttttgtgttgttttttgagacgggggtctactatgttgcccaggctggattgcagtggctagtcagaggcgccatcctagctcactacagctggaacgccagggctcaaacgatcctcccggactcagcctcctgagtagctgggactataggcacgtgcaaccgtgcctggcctatggttcagttttaattcaaaatctcattgatttcttcaagatttcttttttcataaagaggaagcacaagtagaatatgtattaaaacagcagttttaatggtcatcaagataaaattttcacaatactaagatgttatttgccttttcgctctgattttcttatgagttgcatacagttgagtttgctggagactgtgatattgcaacggagtaaatgcagaacagctgttttctattaagccagactccaaaaaaagactttcaaaaacatcaagtttttgttttgatttctcatatagtaaatgtcgataatgtcaatataaaccaaaattgtttagagcccttaataatttttaagtgtgcaaaagagttgagaccaaaagtttgagaaccactgtgttaaaaaaataaagtttatcagaaatagatgtcaagaaagtatatatttaccagaaaggaggaaggaaaagattttttttttctttgaggcggagtcttgctctgtcgcccaggctggagcaagctccgcctcccgggttcacgccattctcctgcctcagtctcccgagtagctgggactacaggcgcccaccgccacgcctggctaattcttttgtatttttagtagagatggggtttcaccgtgttagccaggatggtctcgatctcctgacctcgtgatccgcctgcctcagcctcccaaaatgctgggattacaggcgtgagccaccgcgcccggccaggaaaagattatttaaacccaaactgtagccacttcttgcagtttaaggaaaataaatttccatacagctttcttccacctactgaggaaaagagaaagaaattacaaaatctctgccaatgattctatcttgcataaatggccctttgtttaatccagacattaatcagtttttggccatgcaaagttaagcctggggtagagtagaaggaaagagagatt

SEQ ID NO: 317416 - DNA, 4001 bp, Homo sapiens
attgattccccatgtagcaagtagcttatattatatatttatagcatcatttctggttccatttcatgtcttggttcatcctttgccttttctttatttattcatcttaatttaatttgtactattcttttatatgcataaaattgatttacagtttctattcaaattacagtccatgtacaagccccatgtgttattggccttaacggagagcttgttggaaatgtggaatctcaggtttcaacccagaatcagaatctacattttagtaagatcctcaactaatttgtttgcacttaaaacttgagcaaatgactttaaactacctttaattatctaatgatacagggtgtaagtaaatgatttaatcaaaatgaattcagggtcttttaaaacaaattgtactgattgtgcttcatgtatatgatctctaatcattacctaccctgaaatgataagtcttacttgcattttgtggataagattaggaaacagatcttcagagcgtctgctcaaagaaacacagaaagggagtggcaacccaggaatggactttagtttgcccagctctgttcatgtgatcatactgaaaatttaccgtaggcccaacccagagtcaaaaatgtccgtgatttatctcattcaaacaagagtatttacaaattggaagggatttttgctttgacaatgaaaatcccccgtgacaaaaaggtcaggcacttcatgctgtaaaattgttgccggagaaggatggaatgagtaggaagatgaaaataaggcagctgtttgtgaatatatgctagtcacctctgggaagtgggtgtgtccaattcaggaagctacagggtattaggcatcaaacagcattacctcgtcatgaccagtggataaatgatgagttctgaattatatggggagaagagtatggagaggaggactggaagatgtcaaataattaatataattaaactagatatgctgaaagatgatttatgaatgacatttactttaaaatctaaaaattagttcataaaatattttaaaccctattggaaaggaacaggctatttaaagtagttgtaaattatacatgggatctcaagacttcctatttaagatgagccataggctgaaaattaaaatgtctaaaattgactttaaggaatattaatggaacaaaagagaaaaataaaaaacaatgcctgttttagaagaaactgagtcattttacattaaaactatatttttccatcaattagaaaaaacaatttctttcatttgtcatactctgacaaagtttagctctatctgatacacatcaaatcaagctacttaaataaatgtggtaaacgacatattttatattctggagtgcaccttaaaggtgtgtgtatgtgcatatgtgtgcatgaatgcatgtgagtaggactggatgaaggatgggagcagagaaacgaaaacttgaaaaagatttctttttctttaagtggcttacagtttcttgagaagacctccattccttgcatgcttcagttccactaaatgtagaaaaataaaattgaacattgaaagcttgagagattttagacagcataaacaatgaaagtttcctataagaaaattggaattatgcaaaagactttctaattataaaatatgttcaaaacagaaattgttctgaggcacacaatattctgcggggataggacaaaacttcaaggaaagaaattgaaaagcaaattttacctcacaatttaatccctttgttcagttttcattttcaggcagtgaagctgctgtagagtaaccatgggaaacggtggtggttctggcaggcaatggggagcacaggaaggctcctggcaccagaaaaaaaaaagttcaaggtttgatctgaacgtagcaatcactgagtttacaggcagctaagatataaaaaggttaaactacccacacccacaatcacacacacacacatacacacacatgaggcaagttccactgtttcaacagctagcaaagccaggaagccaggaagtggttcagggtggtggccataagtcagcacaagcacaggctgtttagattttaagctctctgcaagcttcaaagtgtctgagaaatgcagagggaaagaacatgaagggttagtggatcaaaattgttgcttctctatatcttataagaatgtcttctaacaattttggtcataacagaaataaaaattggttttgtgtgtgtttgtgcatgtgtcagtatgtttccatctggaataaacgtgagtttctaatatcattaaatgtcaaacatattaaagatgaaatgattaattactttggcatcagaaacacaaatactctaatcatttccacaactcttggttttttcttcttttggtatgcagaatcacataaacaagaaatgagtggaaatcaatccattttttaagagcactcgtctcaaacttacacacaactacaaccaccaagctcttgcccctgagttatacctatgaaggcctgggaaagtcaggaagaccagagggaaactagcacattcctttagaccatcagtttaacttataaatgtattaaagaaatgtaaagcatattttcttcttaaaagatgctgccgctctccctctccctctccctctccctctccctctcctctttccacggtctccctctgatgccgagccgaagctggactgtactgctgccatctcggctcactgcaacctccctgcctgattctcctgcctcagcctaccgagtgcctgcgattgcaggcgcgccgccacgcctgactggttttcgtattttttgggtggagacggggtttcgctgtgttggccgggctggtctccagctcctaaccgcgagtgatccgccagcctcggcctcccgaggtgccgggattgcagacggagtctccttcactcagtgctcaatggtgcccaggctggagtgcagtggcgtgatctcggctcgctacaacatccacctcccagcagcctgccttggcctcccaaagtgccgagattgcagcctctgcccggccgccaccccgtctgggaagtgagaagcgtctctgcctggccgcccatcgtctgggatgtgaggagcccctctgcctggctgcccagtctggaaagtgaggagcatctctgcccagccgccatcccatctaggaagtgaggagcgcctcttcccggccaccatctcatctaggaagtgaggagcgtctctgcccggctgcccatcgtctgagatgtggggagcgcctctgccctgtcgccctgtccgggatgtgaggagcgtctctgcccggccgccccgtctgagaagtgaggagaccctctgcctggcaaccgccctgtctgagaagtgaggagcccctccgcccagcagccgccccgtctgagaagtgaggagcccctccgcccggcagccaccccgtccgggagggaggtgggggggtcagccccccgcctggccagccgccccgtccgggaggtgaggggcgcctctgcccggccgcccctactgggaagtgaggagcccctctgcccggccagccgccccatccaggagggaggtggggggggtcagccccccgcctggccagccgccccatccgggagggagggggggggtcagccccccgcccggccagccaccccgtccgggaggtgaggggcgcctctgcccggccgcccctactgggaagtgaggagcccctctgcccggccaccaccccgtctgggaggtgtacccaacagctcattgagaacgggccatgatgacaatggcagttttgtggaatagaaaggggggaaaggtggggaaaggattgagaaatcggatggttgccgtgtctgtgtagaaagaggtagacatgggagacttttcattttgttctgtactaagaaaaattcttctgccttgggatcctgttgatctgtgaccttacccccaaccctgtgctctctgaaacat

SEQ ID NO: 317417 - DNA, 4001 bp, Homo sapiens
accaaatgcttggtgaatgtatttaaaagaaaagatgaaattaattacactgtaatggttatatcaaagaaatggaatcttgagagtataaaggattcctctgtgacctttaaaattacttttttccccattcgatcaataaggtagtggatactcccattgaatgacttggctaaaaatgataaggttaagcaagatggttatcatttcctaattcatctcctgatcccatgacaatctatttcatgttcaaggttactaacagaatttttaattaggcatactttctttcattagctttcaaattcctttagtatcttgttttttcaactgccaaacttagcttatttcaagtttctgacatagcttcccaacacattttgtctttcctgacattagcctttctagatcttcctcctgttcacatttgcccaaaaacctgcctgataagttcttctacacacataaattgccccagcccttaggacaatctcaacttttaaaaaaccttcctctacatcatatcagatgtaatgtcaccaaaaatatgagatttctatttccaaaatgcatattagccttatcaataaatcacttgttccccaagccttctccttagtctcagaaaatagatctttcactagaagaaatgtgtataaaatgcaccacgatttgtcctgcctattggtttgcttactcatgtgaattactttcttggtgttcagccaagtttataagaattggcttatagtcagctgggagtggtagatttatcattaagtggttggctgacttccagctactccttcatagtcaattttggtctgagaggcaaagtaggtggcatgtaataaaatatcttttctcattctattccttttggtaaattgtctcatattacaatgtatggatttacttcctatgtgatccccattttctcaaaagatctatttcagttagaaattgtcaattttttattctgagtatgtaggtcagttgttcagaaataaacatcaaaaaagttgttaaaattgtgacttataaattcaattaaactcagaaagtgtttttccttcccgctctccttcctctctttcttcctttctttctgcatactcccctcctgcatcttccaacctgccttttatccagcaaatactccctatgtgaatgcctacccttttcctaggccctgtagtcagtgctagaatactatggtggatatagatacatagggttctcatagtccctactttcttagatttacctgtatgagggcaaagtgacttttgtacatgtttctatcccaatctccagcactatgacacaaagtagatgttcagaaatatttgttaagttcaattattagatcaagaagctctctagtttctactaagtaaggattcacagatttaaaaggcaatatatgtcaatgacctacatattaattatttaccaaggactttggatttctgtcatatttatctgaagtttcttacatgaaagtaatgcccctatttgcaagaccccttatcacaggaacacaaaactaaaagtcaatctctattctacctccttctaccctgcttgctttattttctcattggtaaaatggagaacacgtccagcattcagcacttttaagatagcaatggtactgtaattttacattaaagcaataagcaacaaaatactacataaatgtaaaatattatttttaacaacaaattattttaaaaggttttaaatgcttcacatcattaattaactaaagtatcaatcaagactttggtctttgtatattttatttttaagagctttgtaatacataattttcattctatattttatatatctaaaatctaagtattgatattaataataaaaaagtacaacctgtttagttgatcctgtgaaagaaattgatctagtttatatctcttcaaataccaaggcagatcttaagctgcaaaaaaagatgagaaccacttctgcatttggaatgtttctggtgagtttatatcctgaatgccagagaaggaggtggagattaatttgggggcttggcttcatgaagtccatgatgcaatagttaatgtagatgtaaatgcatacctgcagctgcagtaaccacacagagtcatgttcattcatggagatgtagaaatatcctgctgttatttttttaattatttggctcatattcaaattcccaagtctgccgtcaggggttggggaagaaggagggagaaaaggaaaagatgagaaagaagaggcctgggaagagagactgggaagggagaatcccttattcactcattgacaaataatagcatgactatggttaactttcaaaagaataaacttattggagtgaagaaagagaagccaatgaggaaagaaataagacagcaaggaccctcaatcagacctagctcagtttattaagacctgccaaagaagtcattgggttgtatcttaacatgtcaattggaaaacacctatttaaactctttgcctttaactcttaagcagacctgaaaattttaaaaagcagatgacagctaaagaaagaatgtaaacatcactcacctttcgattattattttagaaacctgacttctctctgctcccaaccacaaaatagcatactgtgaatttttcaggtaatgatagctaccaacacttggaatttacacaagagaattagaaaaataaatggccaagggtttgtggaatccacaaatgcattacctttcttttcatttttctgcacctactctgtcacttaagaaaattatcctttgctccaccccatcaacacctccaaccctgttatttcttatttctctattaattactgttagattacatttcctttgagaggctcactcttacaagactctatgtttctcttagtgacttttaaactttgaactttctcctaactagtatttattttactgtgttgtaaatcaatgtttgcttgtccagagtactttttaaattataaatagcttgaaaacagggtcttactctgtaattagcatttttttctggcatctagtaggctaggcattgaatatgtatttactgaataaaagtggctgatttattcaagaaatataagaagttaagggggctatagttgttatagaaagcaatatctagccttatgcaaaataagaggtgttaagtggtttctgaaaaatggggcttttcataatagaaaattaaggtagaaaaggagtaaccagggacccaaatttagattttcattttactttgttttatgcagtctgtcatattatttgagttaaataaaatatgtgttgaaaaacaatcattaaatgtacaaatttactcattcatatgcctactatgtacctttaaaaattaagtatatatatacaaatttaatacagaatataatttttaaccttgcagcatagcttcactttatttttttaatgacaagaatctatgaagtttcctttattgtttagcgaaaacattttttagtccaaaaaaatcagaaaatgagcacaagctaatataaacagatttaacctcaatacatctgtctgtttttcacttgtaaacaattggttgcagggatgtcacaaatgctcctaactcatgtaattctggcaaccacagatgttcaatacacatttattcttagaaaatctttctaatgttaagaattcacttactgataaaaacaaaacaacaggcaagatggccctgaaacctcattcttctccatgagtaatgggtacagactgagttacaaaatgtttgagtcaatgtcaaaaaaaaaaatggatctcagataaggaccggtttttaatgtttatcttgaccctcagaatttgggcagatatcttgaaaatatgtacatttattaagtattataataatgtcaaacaaaaagaatgtgggcagatatgcagacagacatactgctgttatactctgaaacactgaaaacaagtgta

SEQ ID NO: 317418 - DNA, 4001 bp, Homo sapiens
caagacagagcttcgtagactgcacagtccaatttctttcttacttctttaccacctaagttaaaatatttgtctctctctccctacacacacacacacacacacacagagagagagagagagagagagagagagagagagagaaaccgatgagacaggaagggtgagagattttcctaaggccaggctgcaagttagatcagagctggaattagaacccaaatctcatacctagagccagccaactgctattctagactcaggacaaatctgcttcagtgtcatgaattctacatatgctaaattgggcattcatattttatctgaggttgcctgctattgactcctaaaggaacccaacaaaaccacctttctgagcctttaatcactctgccagttccaagctgaaaacttaaggcaagttacttaacatctctgggctctttcctcatctaaaattcatgggttgaactgcagacctcggaggaactttccagtaataaaaactctgcttttcatctactgttttatggttcattcttgatgtttgcaattttcactaggtggcaggattccaccatcacattacgaaaggatttacatatgatgcctggaagcaaaaaggagtttcaaagaaacttctttcttcgcaaaggacactaaaaaaaaaaaaacgtaaaaggcagagggaaacaataactacaaaaaaaaaagagtaaaagccagagggaaacaaacaataactacaaaggcaatggcccatgtatttcataaagatctgtacccatttttaatataagcataaaataggaaattaatcccatgctcttgcatgttcttcaatacaatactataatttgcaatttgatgataaggttaggtaaaagtttgcttagttttgtgcattttaagttttattttagctgaatgccaattagagaataccagatccccttgggctaaccagtaatgcaggcaatctaatggcaataaaaacttaaagcattttaaatagttattaatgtgttacaaagttacctcttagttactcataatatatttagattatcttctaagtttatttttgagatcttgaccaaaagagtacataagaaggaatacagcatttattggatttttgcatttatttgtcaaatccttaaaagggtattcttttaaatagattttatgacacttcatcatacttttaaaattattgcccaacattggccttttcatgaatgctgcataataaatgtcactaccaacactctatatgagtccccaaaatagccaagcaaagtcgttatgctgaactgagcgtttctcctctgccagagccaagtgaagtgacatcaaacaataactcaactgaacattctaaaattgcctggaagaaacgctccccagtgtcttgcttgttgtcagaagaacatggttaactaggccttttcctcagctgataaatatggcattcttcccacccacccctcatcgattgcaagttaattacataggatgtggcccattactctccaaagtttcttagaaaataactcacttcctagaaaaatcttaatatccgcagcaaaatcaaataatacttagacttctgcatcagaacctgaaaacaccatcagcaggttgctttcattccttccttcctagcacagagccgtgacacttcgttcaggtcctacctttgcaacttgtaagggctgcttctgctccttgccaccttgcaatctgaacccccagggcgcccctccagtcatggaaatgcagataaaatcccctgtgcccatgttttccttttagttgggcagcatgaagagcttgacgagacagacgaagcttgggtgcggtagaggatgcgcactcagcttcgggcgcctgccgaggacgcaagactgggtaatgcagagcgtccgccgctgctgcagccgctgccccagccgccgccccagccgcctgctgcgaatttgtgcggctaatgggctcattctcaaggaggcagaggcgctcgcagcatccaggacacagcccactcttgcgtcactctcctttgctcggcccaccttcgaggaaaggaaagcagcttcacacacaggagaatgtcctcacgtggggcgagataagggaaaggaggacggaagggagagccaaagttatcttgcactaacagattaaatccaagcagttaatggtataagtatgattgaaaaacttacatttaataattctgtaaatagtaaaggacacatgaaggtttaatctccacgccatgaatgacgtcctaaaataggagcgttgggaattcaactactagaggattagattctctcaaataaatgttttgagacttgccacatttatgaatggaatagacaaaaaagagttaaaatgagttaaattactacttttctgtctgcattctgctgaattattcctataagaggaaacaaaagaaagcacaaactttttgttaataaacctccagctctgaaaagtacctttctgaaccatatatttagagaaaggggaagagaagagacagaaagggagagagaaagagagaaaatgaatatgaatttttctcctggaaactacattcttataattacatctattgcatagttttgggtatgttaaattttaacgtgttttgttttctttctacctgctgatcttcttaaacccaaacccaacagttagtcaactgcataaaatgtacaatgtcacctacaggtttcttatttttatagtttgtcatcccatgtcatgaatctgggtggtccaatataaaagcagattttgtatattccaaatatttaaatgttttaaatctgaatacaatctgccaaaaatgtacaaaaaggacattttaattttcctataatacttttgttttccataacattcatccacataaaaacatactaaataaggaagagcctgggaaagtttgtttgtgttacttgtggtaccaaacaaaatttccagacacgctgcctgtttcagcactaagaagcactatatacagtaagtcctcacttaaaacgtcacagataggttcatggaaactgtgactttaaaaccaattttaccatcgactaattgataaaaacaaggttaagtgactacagtctatttctggtcacaaagacatcaccaaacttttaaataagattaaaacacttctaatattaaacatggaaataaatgtcagctacacatgcatttaagaaagattaataaaaacaagataatcatggacccaatttttggtgaatcagtgagtgagggcagctgtagtggtggtggattcaatcaaggaataaatgtttgcaaaaggaaaattataaggagtacctcctgtcacaatgcagttcaaaaccaccacaaatatagcaggctcactgagaaatttcatacagcatcatctattgctgtgcatttgtgtgattaacatatattttatgaattttttttgaaaataatttgcatccatacattcattcctcctccaacccacttattcccattcaggatctccagtggcttgagcctctccctgcagcttagggcgcaaggcaggaatcagccctggacagccctgaccatcccatcagagggtgcacacacacacacacacacacacacacacacacacactcactcagatggggaccatttagacatgccagttcatctcatgagcacagctttgggatgtggcaggaaaccagaggacctggagaaaacctatacagacatggggagaactttcaaactccatacaaacagtggccccagctggaaatacatttttttttctcatcaatgttgtcatgaaacaatgttgaataaaatggcattattcaaggacctgtggtacaatgaacattttacacagcccatgctccccagaagccaaaggcatcaagtgattttatttgtgactcatcactggagtgaggacaatgaaatcagagattgtg

SEQ ID NO: 317419 - DNA, 4001 bp, Homo sapiens
tctatgtgtccatgtgttctcatcatttagctcccacttataagaacatgtggtatttggttttctgttcctgtgttagtttgctgaggataatggcctccagattcatccatgtccctgcaaaagacatgatactgttctttttttatggctgcaatagtattccatggtgtatatgtaccacattttctttatccaatctgtcactgatgggcatttaggttgattctatgtctttgctattgcgaatactgctgtaatgaacatacgtgtgcgtgtttctttatgatagaatgatttatattcctttgtatatatactcagtaatgagattgctgggtcaagtggtatttctgtctttaggtctttgaggaatcaccacactgtcttccacaatggttgaactaatttacactcccacagacaatgtataaacgttcctttttctccacaatctctccaggatctgttattttttctctttaacaacagccattctgactagtgtgagatggcagctcattgtggttttgatttgcatttccctaatggtccgtgatattgagctttttttatacggcaaatcaatattttctaagtgacaaatgtgtgatgttgcaaaatcattcaaattcaccaaattgtatgatagaccaatgaattttaatataacagttagaaaactttcttgctatggtttcagattccacattgcaattaacctctagggaaaaaaaaaactcttgctgagttttggtgtggtatcaaagaatatccacagttttctgaaaagactattaaaatatgccctttcccccaccaactacatccctgtatgagagtggattttttttccatacttccaccaaaatggtacatcacaatagattgaatatagaggtggttatgataatccagctgtgttctattaagcaagacattaaagagatttgaaaaaatgtaaaataatgccactattctcactacatttttctgttttaaaaaatacagtatttttaatcaaaatgttacttacattgacatgcaatgacattattgctattttaaataagttaataaatattgtaacaatgagttttaattgttttattccataatatcgatagctatatcttatataagcaaaagcacaaaactctttgggatcctcaatcttcgtttttgttttttgtttttttttgagatggagttttgctcttgttgcccaggctggagtgcaatggtgcaatctcggctcaccgcaacctctgcctcccaggttcaagcgattctcctgcctcagcctcccaagtagctgggattataggcatgcaccaccacgccaggctaattttgtatttttagtagagacggggtttctccgtgttggtcagactggtcaatcctcaatcatttttaagaatgtcaagggttcctgagaccaaaaagttgttgaaagactgtcttaaataatgtaattgtattcaatttcatgatgctggggttactaggacaatgtgaggaagaaagatcgtgataacagtcaggaaagttctgacgaaagacctggtattccactaagactctgaaaagtgagtaggattttaaaactccttttgaaaagatgaaaggtatgagtaaaagctgagaaacagtgaagcacctgatattcgcaggcaataatgagtaatgagttcaggtgattgaaatataaagaggacaccattcatctctgcttctcttcctacctgtgtaaccattcctcttgtctcatctcttttgtgggaggcttttcttcctttctcattcctcaaatattgatgcttcctgcagttctgtccttggatctctcttctcactctatatgacagtctccctcaccaatctgatccatcctcaagattggagcttcgcttccgagttgccgaattcagatctttacttcaccttctctcctgagctccagagcaacatgttctgaatattttgaaggcaacaaattgaaagtgaaacaaacgttttcctgcaaagcactctcttcctgtatcctctttcttggcccctccccacccagcacatcaccttagtttccattctcaccttcctccacctcatacattcaattggatggccctctattaacactgttccttgtttttttttctatattatcgtgctgttttcttagttctttttgccctagtctcacaagcttccattccatcctctacattgctgccaaaaccaatagtacaaaagcaacagatcatgctgttttcctgttttgaaaccttttgatgcctccctccaggataaatcactaacacctcaatggtacttaaactgccattcattatctggcccttgattacatcttcatactgttgcttggtggggcccctcctcagccatgacaaacatgttccttgctcctgccatatcaaaaagcttgcagttccccctagatctccaggttgctttacatttctatgctcttgtttaggtgctttctcttccaggaatgccctttcctgctctaccaacaaagaataacaatcactttccggattgttctcaagatgttttctctaagaacccatctcttcactttgggttaaacagtatatttaacttattttaatacaaacatcttgaaaatgattacaaaatgtcctcaatttaggaagattccacaaaagtgatacagttaataaaaatcatactttgaattttgaattttgattttttcccagagtgcgatacacagtgtaatgctactctcttgcaggatgttgggcagtggcagtaagttgcagctcccagttagccaaatgatcttgaggttaaacaccctgtaatatacagtgtactgtgctgctagatgattttgcccaactttaggctaatacaagtgttctgagcacatttaaggtaaattaggctaagctatgtttgatagattagttgtcttaaatgcatttttgacttatgatattttcaacttacaatggatttatcatgacatagccccatcttaagtcaaggagtgcctgtatttgcatttgaaatctatttctaatactattttaatccacttctcctctctacacccagagaagatgaattctccttccaagcacaaaatactacggtatgaggcattttatgtagactcacattatgttaaataaagagcaaagaaaacccaaatgtctcacagaaagtaccaaatttggtatttcttcttacattccaacatataacctggcaaacaaagagttagggtttataaaacacaagtccagtatacaaagcatgtattatgccctttaaaaacttgtttcacaaattatttaatattgctagaattccttgaatattatgcaaatttagttgtttttttttttttaagagatttgacatttctttaacagggatgttgttttgtgaggtttctttccccagagccaactttctagtcttttattttaacatagctggtcattcacagttcttttgaaaaaggattaaaattcttaagaccaacatcatggccctatttgccatcccctgaattcaagtgatatcagtgttagttacagataagcctgccagagacttacttcatgattggctcaaatccccataatcagtgagcccttgcagttttcagtgaaaagtatagaaacttggaagtgtgttttatgaaaagggtgttttagaaaaaatgggatattcttagtttataaagcaccttcaattaatttatctacacatgacattgcatatgaactcgtagtgatctaaacttcattaggttttctaattctagtactaaaaataatctataagaagaattttgtcaaataaaagatttataataagtgatataagcaaggaggttgttctcatacttaaatcctcattgtgctctgttttcctggtcttaaaggcagaatgctggcacaatattcttagtaaggtgcctagagatcacatca

SEQ ID NO: 317420 - DNA, 4001 bp, Homo sapiens
caggaagtcgcaattttctgtatttttttcattgctgacatttttgtcgtttaagacctgcagactcattctggaaaagcagaacatgtttgtgtcagtgtgagggcaacactaccacattgtccagacacagacgtgacagctgctgcaaggggcacgaccacttcccacacaggtgtgctcattgctctggaactcacacctcccacacgtgtctcttggcagagaaagcctcagactgagtccccatcttgcttcagagactcactctccagcctggcagggggagccatgggcagcactgctgcttcctgggaccaagagctaaagggccttcaggctgagatggtgagaaagaaaacccaagcctgcataatctctactgctgtattactatatcaagcagaagtcaagagacggaaaagcccgggccaataagaaacccggatgagccagaggaagccctggtctccccacaggcctctgcgtgtgacgtgaggcaggaccgggcagtagagggcagaaaagcaggacagcggctctggtctgctctctcccaccgggctaggcagcgggacaagaccaggctgagagggtgaaggcccagaggaggagctgggagacgatgcgcaaacaagggaagcccagagctgagcaacaggtgccaaggaacttccacatcagagcctccagtcagtcccaggttccagggctgcccaggtcctcacgccggtcacccacacacttgccaccctttctgtctacagcgttcccagtctagggaatgacgtagggaaaaaggctgccagagagaaccgagtgtcgaccagggcaggaaccccacaggcacctggtggtggagggggacctggggaggctttgatttgaagaagagcaaagttggggagggtcctggagaagagagagggggcagccccggcaggtcggtgctgcagcttgagaagcccactgtggtgctgtgtgtgggtggggaggttaagagcagaagggaagcagggaaaccacaggcttctggagcccaaggagtagatgccagaccagacccgggcctggccactggcacatatgggacttacggacgacgcttaggttttcgccctgaataactgggtacagggcaggggaaggggtgctggatcgctgggggacccgcaagcctcgaactcagggagaaagtgactcggaggaagccttctggcggcctggaggagctcgggagagcagcagacccagccttagtcaggaggggcctttactgactatggaggcccgggaggggctctgggcagagaagggaccggccccaggctggtgctttggtgctactctggtgcacaagagggatgcggtgcggggggaaggtggagcggcgcagcaggtgcggggaagcggtaggggcccaggtgtccgccgcaggcggcctagatggagttggccccaggacggaggccggaagggaccaaagaacaacaggagggtccgcgtgctgggagccaacaaagagccaaggtgggcgaccgagagacaggagagggtcgaggagagcaaagcacctcggggcgcccgctccgccgtcggtcttggcccagctctagccgcccctggccaccatccagggggcccagcccggcggtcggtctagggccgggtcccatgacagggcgcggtacaggttctggcggcggccccaggaggagccgtgggggacgcttcccggggaaagcggcggccggggcgggagggcgagggccgagggcggggcggggcgggacggcctcgcgcccccaggaccccagcctccccgcgccgtgtagccgctctcctacctgcccgcccgcccgttgccgggctctgagcccgcgccgccgccgccaggaaggaggggtccgcgtctgctccacgccgggggccaagcctagctgctaccgccgtcgcgcttctagcccttgatggccgccggcgcgccggagtttcaaacgccgacggttgccttcgcgcggccaatcagcgcgcggccgggggcaggaccgcaggagggcgggcgtccaatgggaagctgtgcctcgccggctccgccctccctccccccccaccccccgctcgggcgccgacggttccgtttccggagtggagggcacgccagggtgtctgaagctgagaccccgggctcgcagtcgccccatgaatttcgagttccgcaactgacgctactgggcggggcttcatggccagggcctcgctcaggcctaagtttccccacctgtgctcaatgcacaggtgcggtgccgcctccagggccggccgagaagagaggccgcacccgcacggggactgcatctcccagagcgccccgcgagcggccgagcggcgggactccatgccctagagtgccccgcgggcggccgggcggcgggactccatgtcctagagtgccccgcgggcggccgggcggcgggactccatgtcctagagtgccccgcgggcggccgggcggcgggactccatgtcctagagtgccccgcgggcggccgggcggcggccgccgcaaccgacaggtccgggactgggcgctgcggcctcgtccgcgcgccggggcgggggcctagctcgacagcttcccggcggctgcgcgatggacagccccgaggtgaccttcactctcgcctatctggtgttcgccgtgtgcttcgtgttcacgcccaacgagttccacgcggcggggctcacggtgcagaacctgctgtcgggctggctgggcagcgaggacgccgccttcgtgcccttccacttgcgccgcacggccgccacgctgttgtgccactcgctgctgccgctcggtgaggctgctcgggccggccggccgcatcctctcctgcgcagggcttgctgggaggtcaggaggaggcctccgccagctccccgaggccccgaaagcgcctgggcgcagctggggagaggcgccggtcctcatccagagggaccgcggcgtgggctgagcgcgcttaggggcgccgccggcactgacttgcaggtgacgggaacccaagttcagaaccttgggcaagggatgctccggcccaccaagtcctgaaccgtcacgtgcctgggggttgcaaggccaagcagcccttgcttgtcgtggttgggggcagtggccaggagaaggcaactgttgattgagtccaacggaaggggtcggaggggctgtgtggagggtggcactgcactaggccttggaaggtgggtgtggagagaacaggcggatttggaggcagttccagtttgggggcgccacaggggcagaggctggggagggcctctgtgcagtgcaggtgggacgctcagagttgtccaggggggtgctgggctgggccccaggtgctagctggggctctggaaggtccctctctcagctgattggatgacggacaggtgggaggtggggtgtgcagtggctggagggggatttcaagggggtacctctggaggacacgggggcagacgcagccctgggaggacagatggccagtggctggccaggtttgccactctggggatacaagaggggtgaccctccacatcctggtttgaggatgcagctgcctgggcccagaagaactggaggcaggtgtcgggtggaggcgcccaggcctgcctcatggagagggtgggctgggggcccacttgagagatggatggggctgagtggggctggggccctgaccaggccactttctagggctactgggtgggtttctgtagcccttccagctgcaccctccccagaggcctatgagggaccacaagtgaattgtggcagccacacctggagcagacagcacagctggcctcacagtcggatgtcaagctctttttatttttaacttagtttgaaagttttcaagctttattaggtattagttacctgttttatttttatttttactttttgagacggagcctcgctctgtcacccaggc

SEQ ID NO: 317421 - DNA, 4001 bp, Homo sapiens
tttttttttcattctttgcactcctatacatagtagtaatgaaggggtgcatatgtgtggataatcagagataaaggagaaagggaagattgacgattttagaggctttttaaaaagtgtgattttgtgtttatttattctagttagtggctactaacctctgctcctttaatttaatcctttgagcctggcacatgaaaatattttctagagatatatgttactaatacctcagtgctcagtatttcaaaatagtaaacacagaggatgaacttacagaaataacctgttttttcttatttttttattataatggcaactgaaatgtcataagaattaatatttatctccattttattttgatatgtttgttaatgtttaaaaataatctttgcatgaataagaacattgagacttcaagttaaagtgaaatcaccctcatgtatcccccatgcaactgcctttcacaaagctgagactgaaatcaactgctattgattttcaccacaaagttgaattaaagtgaagccagccttcaataacaggtagggattcaccattgtatttccacaaatacctatacttcataatgttcaatatgagaaggcaaaggcacatagagtttttaaaaatttggttacacacttgcagacacagggtttactcagttcatagcctctgcagattactggaaattaaatctaatctgagatgtggtggaaactgctagtttacagtagttttttggagagtgtgtgtggtctttgctagttcttggtgactgggagaccaaaccagtgttggccttggggcaagactagggaatagggaaggatgaggatgaggaacagacagaagagggaagggtggaggggcgactcatttaccatttctctgccagaatagtgactgacagagagaaggaaggccaaaaagtgcactttacagatgacataaattttgttcaaaagtcatttgagaaagtttgctggtacttaaacgtttctagctaagtttgccctacttggaagggcattttcacctgtccctcattcaccttcttcagtccctctagatatccttaataaggctcaatgatttagagcttgagtgttggaggccacggaagcagaaacttgttcagccactcgagggctacaaatgggttagtgtcctcctttcagcaaaaattcttagtctctttacttttatagaccccgttacgttactatttcctttgtaatcttatcccaccgcccagttcttttctttcccttctccctctttcctctctgtctgtcctctcctcacctgtccaccgcaatggccgtcatggagtagatgctggcgaacacagctgtgataggaaagaagttctggaagcggcagtagttggcgccaaagtaccactcgctatgaagcgcgtagatgaaattgaccaacgtgttgaaggcggccatggaggcgtcggagaaagccaggttcacaaggaagtagttggtgacagtcctcatgcgcttgtgggccaggatgatccagatgacgatgagatttcccaaaactgccactgccaccaccacaccatacgccagggaccagagcgcgatgcgccaggacggctgcacgaactggttggtgaggttggcccagggctgggagggcgcgggggaagccacaggcagtcccagcgcggaaggggaggaggagaggttgccagcttggtccagcagttgcagccacccagtctcaactgcccccgtggccgccccggcagctagcgaggcggtcaggttcacggcgtctgcacccacgcctccacccccgtctatccaggtttctgctgctgggagagtggccatcgccaccggtctgcagtcccggaccctcccactcacccacgggcagcccaagacgagactcctctgaagttcttctctgcctcctggtcactttggtgccggagtcttcagataagactggaagctgaaagatactgcaatccctgctggttaggggatgcagctggggctaaggggcaacagctgcactttctcagaggcgcttgcggctctggcaggcagaaagaatgagatcctcccgagattaagggttatcgagtcacatcacacgtagggagggtgccagctgcccggcacaggctggagaactgagcgtcctgcgctacaggctctctttatactcatggggtcccacgcttcggtgacgttgcaggggccgcggagctgactatccccttcgctggctgtgattgcactcgctccctccatcccgcccttcgcatttcattcattcgctgcaagcagctggagcttggcaagctgacccgcgcaagggagggctgcactccctcagctgtaattaaaatctttccaagattgtttgccttcttttaacttcaggatatcttgctgaggtccctgttctcaaacatgtattggggaccattccttcctgcacaaattaaccattcactcatgaggcaagggcaagatcctgttgatttttcggagagtgcatgagtgtagactgctgcaggctgtgggcacagtcagccgcaaacgtttttaggtgtccctgggttttgaatttcattcaacttttctgctctggtgtttatattctctcatctcagattccttttcctctcgctcccactttccatatccacccattttctctcttcctgtacctctatcactagaaatccgtccctctgaccccattcccagcaggcagctggagactctggattctcctggaggattctgctcaggttggaatgtcatagcacactaagggtaaatcgcaaatcccaaggagtacattttcttgaaacacgacaacgagacagatctctacatttccctgggttgaacgtagccagtaagcactgtgaatacacgctcttggttacagggttctggatatatggtgccttagttttcagggcttgaccatgaggacacactgatgagaataccgtaactgaacaaatacttgggttttccgggaagacaggcaggacctgatttctgagctttgcttgagaataagtgagctaaagtgctcggtggattgcaagctggaaggacatagtctgtgcttagaccaatctcaggaaatttagcaagaggttccagagccgaaactcctttgttagcatcctgggggcatgtgtataaatttagggttaaatatatatttagcaacctactggatatacgtgaactgtttgaacctctcttgtcatttaaaaatgagtttttaaagaaatctcatttacagtataattatatgatagtttctacagacttccctcaacaacagcaggccggaggaaacactcttccctctagttatcattgtgtattacatctaaacatgtttaggtgaaagggatttgatcaacaagtttaacaagagaaggtaacttgtgatttgtacatattctgctttttccttttctttttttttttttttttttcctagttctgtcacccaggctggaatgcagtggtgcaatcatagctcactgcagccttcaactcctggctcaagtgatccttccccacctcagcttcctgagtagctagtactacaggcatgtgccaccagtgccaccacacccagctaatttaaattttttgttgttgttgttgttgcgacatggtctggcgatgttgttcagcctggtctccaactcctggccttaagcaatcttcccagctcggcctcccaaaaggctggacctccagcaatgctgggattacaggcatgagccactgtgtctggcccttctgccttctttagttttccagtttaaaatatactcttcaaagaacctgctgtgatgattggacaagtggacttaaggtgtgtagtgataaatagtgttttccttcttacagttattatgactaaatggctagtgtataacaatgattttaagcaacctgatagttattatcacagccttgaca

SEQ ID NO: 317422 - DNA, 4001 bp, Homo sapiens
ccggttatggtgtgtggaataggggaatggggtggagggggaataacgaacaaggaggctcccaaagtggtcaaggcaagaagtaaacgtaaacatcagccgggactacggctgtaagaagtggtttgttctgcatgtactgtgaggagacagctgataaattggatcaggaacttagtggaacaaggaactaagagaggcaggtaggccagggaggcggctggacatggagggctggtgctagggaagagctctgggcctaggaccaagtcagtaccacactttaagctccctgaatgcagggataaagccttctctttccttcagagttctccgccactgtagaatccgcacagaacacatgctcagtgcatatccacaaacagcatggaaggacaaggtgggacggagtttctgaaaaatggagatcccagtgctggtggccattaggtaagggtttgtaaaggagcatcttctctaaggagttgggaggagaatcaacattccagggcttcagaatgagtatgtgaggcggccctgagactcactcaggaaaggaaagcaaaaggcaatcaaagcagcccaggcaggactgctggagaggtggcagcgagatggatgctgttccgagaagcaggcacctggtgtagcaggggaagactctggaaagctaagggcgctgggggtgtctcactcccctcctcctcagggtgcccggggatggccacatgtctttggtggttatgagcgggaatacggctagagattttctcctttctaatacggatgcaagcttccagagtggaaggagagctgagagaccgcccagagagaaccatgttcctctctcaaggacagaacctagcacacgatgttgctagcgtaagtggatccagtccagctctcaccgctccccacacagggctgtctctacagaaacctcaaaggtaaagagagcaaaacccaagccccaggcctcccaggccaggcctctttgttcattctttactgaccattcgcacaaggtcgtgggttgtggggacccaagcataaaccaggcacgctacccacaaaagactctgtgcactgcggaccacacagggcacatgcatacagtgacagaaagcaaacggggccgccccagagaccccgagacaagccgcagggcgcccaccgctctccttccctggtgctcccaccgctttctgtcgagtctgtgggcctgcctgtctccacgaactcaggtaaggcaccgagtcttgcccaacgtctgcactccgcaaacgcctgtgaaggcgtccctgaaggtgagggaaatggctctgctgtcagaagccagcgttcaaagccccactcggccccgtctcggctgtgtgaccttgggcgcgtcacagcctctcagagcataggttccgacaggtgcccgactataaaccggcagcgtcgccctccccacctccggggccttctggggtgcggagcgagcgagcaggtccagcgctgcctgcgcgcccgattacaggagaggcgcgggccttccagtgccctagccgggacccggcccccgtcgcgccgctcacccagtttccgaagccgaactgctcgatggcgtccagcagcagctgctcctcgcgactggtccagccgccctcggcctcgggcccccagagcgtgaagcgcccgccgtccaccagctggtagccgtggtagcggcggtggtggccgatctcggcgccggccgagaagcactcggggcacagctcgatgtcctggcactcggtgcagcggaagcgcagcgggctcacctcggccaggcagtacacgcagtacttcttccccagctccgccatcttcccccgctcgccgcccgccgcccggcccgccgcagccgccgcgcccccggccgtcagcgccccgccgcccgcgggacccgccgccgccgccgcgcacgagcaaccgccgcccgccgccgcggctgccgccaccgcggccccagcccagccgccgccagagccagccagccgggccgcgtcccccctcagtacgcaggcgccgtccggcccggcccggccgccaccgccgccgcagctgtcgccccgccgcatcgcgcaggcgccccgcgggcgccaccttgcggacgcccggcccgccgctctgcgcctgcgcgccccccgcgccggccaccgccgcctttcccagagcctcctgaacgccccgccccaggcccggcggtgggaaatgggcaggcagaaagcccggcgggggcgccacgcccctcgcggcgagagcccacggccgcttccaatcaatctcgcctatcgtcagctcgcggcctcccattggcttgctctcgccgggcagcggggagaaggcgctggacgacggcctgtcgcctggccaatcgccgggcccagcgcgcgcgccttctgttgccccgggaaacctaacagcgtcctgccggggtccgctgcgctggccgagccgggaggagatggacgtcagctctgagcacactaaggaccccggcggggaaggcggagacggggaaagcctggccgcgcggccgtccaagatcaaggccagctctggccctccgacctctcccgaacccggggagctggagtcggagccggaggaggaggaggaggagcaagcggcttcgcagggaggcaccgccgcggacgagcaggccgaggccccgaaagggctaacggcagccgaggctgcgggcgaggaggggcctggagagccggggaggccggccgagccccagcccgagcccgaagagccggccgaggttggggctgaggagcccgcccagccggagcccggagccgggcccgaggaactagaggcggaggcgggggcggaggaactggagcaggcggcagaggggaaggaagtcaggttccaggcctctctgccgctgaccaggatcgatgaggaagaggctgctgcagccccggaggccgagacagagcgggtggagggggaggaagaggacaaggaggagacgcagagagacggcgcggagagcaaggagagggatggggaaggacgcccggccaaaagccaggaagaggggaagcgcctctatggaagggacgagtttgaggacctcgagtggtccgaggaggtccagaagctgcaggagcagcagctgcgcagcgacctcctggaccagtaccgttccctgctggtggagcggaaccgctcccagcgctacaacctatacctgcagcacaagatcttcgaggcgctgcgcagaaagaagggcctggaggccgctgaggtggctgaccggggcgcagaggccgaggcccccgagaaagagcaagcgtacctgcgccatctgggcatgctggaggagctgaagaagcagcaggcagacgacctgcagtggtaccaccaggagctgggccagttgaagcggcagtgccaggagaagctcaccagggtggagaaggagtggcgacgcttccaggcactcaagaagcaggtggtgatgcaggccatgggcagctgtcggatgaggggcgggcgccaggctgctctgcgagaggtggagcagatccaggcgttggaggataaaaaggagaaggagatgagcgccgtgcggctggagaacattcagctgaagcagagcctggtgcattttgaaaccaggatgaggacccaggaggacctgacccagggtctgcttcttattgactttgaacagctgaagattgagaaccaaaccttcaatgagaaaattgaggaacgaaatgaggaacttttaaaacttcgcagcaaggtgaccaacagtgtgcaagtaataacccacgtgaaggaaaagctgcacttcatggacatggagaacgcgtgcaaaaagacacagctggcagaaatcgaggcccaggccgccctaggaagagacatcctgaccaagacgaagcaagcccgagaggggctgcggacggacaacatcagactgaatcagaagtgcggccttctaggca

SEQ ID NO: 317423 - DNA, 4001 bp, Homo sapiens
aggctagtgtgacttggtaaagcaggagtggccactgacatctcctcacacaaaatcaatggaactggggaaagaacaaggactaccccaacagctaaacctggaggcatctccctgataatgacttcctgcaactatgggttaaaaaaaatccagccttaaacatggtgaaccatgttggtgaagaatggatacgtggtataatgaagtccatggaagtccaggtatccagtcccagaaaaagccagggaagaagtgttaagtgatactgcaagctcaagatctgtgctcatcaataggcttcaaacaacttcatttcctctccacgcaaacaacaaaaaaaggcttttaaaatggtggctttcctgcaactgagaaatgttttaaagaaagtatagtgaagcctggctacatctatctctatttacaacagagtgcttttaatattcaagtctaagtaagtaaacagacagttgagagatttgctattttgtcttactgagatcctgccaatgaagaaagtaaatactcttgaaagcaaatgtttaactgagaactaaaccaaataaagtatggttgagaatttttaagtggttaattgaaaaagaccaaacaagaccgtctgtaattttccaaaaatatagactgcttcaaatagaacctacgtccagttctgggaatcagcaaatcaattagaatcgcatctgatcaactttatgccccttaagtagttttaaaatttcagtactcaagtacaatcaatgatgtaatcagcctcacaacttagttatttgcatgaacttcaggaaataacggctaacacagccccttttggacaacagaagtaattttttagttggaagaaatttaatggagttatggttcagttgctgtttacagcttgagaattaaaacgttgggttcactctatattcaagaagacatccatctcaaaaccttttttcatttaaaactaatctgtaactgcaatatgaatacaaatgcaagttttaaaaattcttttaaaatgagaataaaaacctacagcttatagaaactgtaacattgtaacaatacgtttaaaactggtcattgaatgtaggattcataagtacacattttctcatctagtaatttttttggcataagtttcagttcaggaaaagttcagatgcaacattttatggagtgttaaatatttctgtactgggcaaaactactgaacttcatggtcactaccacaccgtcagctgtctgtgaaaaatctacttgcagggcaagttaacaggtttctatggctcaagtttgcttaaaatacagaacaaaaaaagtcaccttggcatgaatataattaagaaatcagccgtgtgcttctcacgtttgggctccgagacgtgggagatgcccgctaacctaagaccttccgagggcgatgcaaggacccggacagaactttcccggccgcagaccccttctagggcacacctggcctggcgcggccgcgggggcctcggggctgcgcgcgcaacccgcccgaggaactgtcaacggccgcggagcctcggcagcctcggcggctccgcgcgcccacagcctggggagccccgggaggcaacggcagccgcgcggctcgggggccggggttccaaggcgcccccgccgccctcggtccccagtccgcccctcggagcccgccacggcctagcgccgcccgcctcacctgtgcggccccggcgcctctcccgccgccggtcgctctcgtagaagcccagcgtctctgtgagctgaggcgccggcgggggcccctgtccgccgctgccgcccggctgctccgcctcgccgcggccgtcccgctgcgggccgtccacgccgccaccgccgccttctcccggagcggccgcgtcgccgacgcccgccatgttccgagcacaacaaactgtccccgccgcctccctccagcctctgcctccggccggccccctccccgcctcgccccgcccctcgccggagcccgagccgccgccgccgccgccgccatccgcggcccgccgaccggcgcgagccattggcgtcagcgacgcgtgtgaggccgctgccgccgccgccgccgccacggtagccgccatcttcttcctgccctcgccgtggcgggcgacggtttctcgcgccgtggctggctcggccggccggggcaccgcgccgggctccatgcagccgggctgcgcggtcccgcagagcgggcgcctccggggctcgagtcggggacccggcaggagcgggccggggatggcggcggcgggcggcgggtcggccgtggagccccggagaggcggccgccaccaccgctgcccgcagtctgcgaggtgtccggcggtccgctcagggcctcttttgcagactcggtgcccggagtgcgccggcgccgcccgccaggtcttggcactgctggcgcggccgcggcggcgggggcccggctccagatcaccgacccccacgagcgccggccctgcctgcccgctattttggttccatctcttctgcatatttatgcttgcctgttacattccctggcctctgagtgtcctttggcagtttccaaagcatttgggcaagaaggagcttgggcagcttcacaacaggtggggacgcgcaggggaggggccgcggccggaccggcagagtttcaagggctggcgcgccggcggactttccacactgtctttcgggactggggttaggagacagcccttggccaccactgtgtccttactttgtcgctttacttggggctggacctcccctttccagctctggcgtgtgaccccgcaacgagcgtggtgtcgagaccaccaccagctggggcggtgggagcgaaggtgccccaggctcggggaaggtggaaaccttttccccgctccccaagtgattgttgcgcgctccggtgaggggacagtggtacctcgatttcccgtgtgccagcttcgggactcagctgtgcttttgtgtctctttgattagcaaaagcaaaacgaattcctccccgaacactaagcttcctggaaacttccctagacctaaacttgagaaccgcatataaatgggccttgagggttctgtcgtcagtagcgggttacgtgattgcaaacgagcaagtttaaaacggagtgggctttgggctgcagagccgcctggcattctgacagctgagcaggaggcagaggtgagagtccaagatggactaaaaatgtcccagcagctgggagcccaacctcggcccaacctcgttgaaaggaggaacattcggtgcagccgtcggaaccttattatttatgaaaggggacagctcacaggattacatttttctaagccaatcctgtgaccatcctccatgaaattctctattttggttgcatgtggtcaaaactgagcctcactgaaacaattgaaaacaaatactcccgacaaatcttaagaatcgttttgaaaatcaaaaggtggggaaaatgttgtggcttctgagctttcttcagcccatattctattattctctgatgttttatggtgtaaaatcatacccattccattatgtattgattgtcaagaaggaagtaggcttttattgctatttttatgtcagtttccatttactgtctcaccacatttattgggttattgcctttgcctttgactcaacaggagctggaagggtaggaatcccaaattctgttgcctaaggcagccagttgtcagaatggactttcctcattttctattatgaggcctgaggaaagacattcagttccaaaggctgtgcctatccttttaaatagaagagagagggcccggcacggtggctcacgcctgtaatcccagcagtttgggaggccgaagggggcgaatcacgaggtcaggagttccagaccagcctggccaacatagtgaaaccccgtgtctactaaagatacaaatattagccgggcgtaatggcgggcgcctgtatt

SEQ ID NO: 317424 - DNA, 4001 bp, Homo sapiens
gaacacagaagaggtaacagccatgctgcttgattcaggctccccactgcttgccagggttacatcctagaagatcctagaagatctggaccacaaaaaagccacccgcccacatctggctctgcataggggtacatctcattgtcattgcagccttcctggtcaaagctgtcttctagggaagtgggggacagggattatcaccagctggataatgaggaagaaggggcaagctctgttgcttcagagttgcacgtttcctcctaatacccactagtgttttgacaaactgtgccttatgggacaccaggtcaacactgcatgactgccacccaaccagaaatgctgtcgtggtgaaaaggggaagccccagcactctcagtggggtagataacaatagactatgacaaggagacgcatttgcaaaattttcctttgaaaacgtaatgtaataatttataactacactagtgattttttttcctattctcctggtttgcaaatggctggacaaatccacaggaaagaaattattttaattatcacctgatgattttatttcctgctttgaaccacttagtcccttccaggtctccttgcactcaatagtgttagaatgctctacttgtgttcacttcagaaaatgtcccctaaactctttttttttaagagatgggatctcactttgtcacccaggctccagtgaggtggcacagtcatagctcactatggcctcgaactcctgggctcaagtgatcctcctgcctcagcctcccaagtagctgggactacaggtgggtgccaccacccctagctcattgaaaaagtttagaagtttgaacttgtacagatagctgagtttcttgggtgtgacctatttaaaccaggtcatttttaaatgctctttcaaagtctgattttattaataaatgaaatcatcccatcataagggaaacaatgagaaatctatgaagggaaaacatatccattaatatgaggcaccctgaaaattaaactgtttggtggaaggaacaaccatcactttcaatttctttttaaagcaacttccagagaataagctatgttaagtaaaatcaaaacaggaaaagccacatctaggtggatttcaaacgaaatgatacctctctgaaaaaaaagcaaaaacaaaaccttaatgcctggtgaagtttgaggggggtctcataatcacagagccatcaggaagcggctagaaacaatgaagcagggtttcaaaatgactggtacaggatgtacccatagaaagaaatgttgcgcgcactggtggagctgccaaagttactactgcaaagtaccctgaacttttaaagcgtggcttggggtcactctgaccacactctttccaatctggtcgccttgcaaacacgctaggataattggcgggaggggggaggggagagatgcgcggaccagtgagctggcgggggttgggggagaagccggcggagctctcgggtcgctagcaacattaaggtttcgctttcgtccaagggcggcgggggtgggggggtaaggggggcaacgagatggcaatgaacttcctcccccgagagaccctggcctcgcgtccgtgggcggccagatgccttcccctccgcggccaggcggggcaggggcgtgctgcgggagggggcggccgcgacgccccgagaggagccagcagggtggccaggacgaagccccaggaagcgccttacctgtgccgcggcgcgctcagagcccggggccgggccgggacgcgcaggtgcttgggggcatcctggggacggcctgggcgggcggggagtccatcgcacccggctggctgcgctcttcccgccgcggggggacggggagggggctcccctcggctcggcgcccgcctcttctccacccagctgaggacacagcaggtcccgcggcggcggcagcaacaggcaccggcggacggtggcggcaccaggagcagcagccgaagaggaggaggaggaggaggaggaagaagaggaggagaaggaggaggtgtctgcgcgcggctctggtttcctcctcccagcctgggcgagcgcgctggaggcgaggggaagacaggagccgggatctccccactcggtccccggggagctgggagggggactcggtgtcctcctcctccccactgcgccgtgtgactgtgcctgggcagcacggcccggacgggcgagtcacacgcgagcaacagctgctgcactgcgggtccgccgcggcctccctcccctccttgccaccccccgcccccaagcccgcgggccatcctcagccagtgtctgtggggggaataggggggaagtactcgggccgccgccccatccagacccctgcgcaggatctgggcacagcgtttccctggggagccgggggcgcggggccccgcgcgtgatgcaggccctcgtggcgggatgtacagtcgcacaccctgtccttggcggcctatttatagcaggtggcactgcccgccgcttgctcggcctgagtggctctcagcaggtggcactgcctgcccgctctccgcgctcccgaaggcgcctcgcctcatctgcaccctcctcttctccctccgaaacagacgtggtggaaactgcacacaacatggggggcgggggccgggggcgaccaagccaccttgctctcccccgccttaccccttctccccgtccttggaggatggcaagaggtgaactgaggcacggatgccctatggggcgctggcatgcgaggcaggaaaatcagggactctgggaaacaacgaaggcgaagtgccctcccgggattaaacaccaggaaactccatttctaaccaattgcgggagtgacgcagagcctggattaggcgctttttcctgccccgcgagcccggcacacgcgcaggaacacacaccacacgcacacgcacaccccagtgtgcatgccccgatcaggtctggggacattcccagcggtgatgtagagtgcaaggaaagacgcggagatgtgaaaagcgggacagagctcgctccctaagactaggggatggcagtgtgcaaaaaacaggcgaagctcccagatccctatcccaccaggcacagaggcgcaacgtcactcgcagggtggggagagggatctgagaaaagtaagaagcatcacatcctctccagagaagagtccgcagggaggggagagccgggtgctcggaggaggcagttccagacccccaggtggcatctttctggatttttttacttaatgtagctgggggtggactttagggaagtggctgagcgtttgagctgtacggttggacttgaatccaaatcccagcaggtgtggtttaggcaaggtgctggacctctggtcttcattgtcttacctgctaaatgggaccaatacacaccttacaggatctttgtgaggacaaagcaggaaagtgtaagtaaagtggccagtgcagtgacacagacgtacatggtcctcaactaaaagcagcagctattatcaatattactgtggcccaggaggcaaatagagggccaggtttcctcatcgtaccaagagcagtgtcttccttgaagcccactgagcttcttgtaggcttttagattagggctgtcttatggcattccctgatttccctggatgcttacatccaggggaggtatttttaagtggacccaagagttttattcacagcttgacttaaaactctcacaatagtggtagctattctttacggaggagttagtcgatttggggtattgtgctagatactgtccttatatattgttgctaatttgctcaaaaactctgcagggcaaagattgttaaatccatttgactaaggagaaaagtaagaggttagtgcctacagggttagtgggtgctggaatctccaagatccaaagccctttataatatacttgctctctggccactgtgtagccctcagctcattctttgtcattgagtag

SEQ ID NO: 317425 - DNA, 4001 bp, Homo sapiens
caaataataataatcaccaccaccacctagattcagcaaaacacctgtacaccccacactttcaaatctcttgttattacccaaactggtcaaggcttccaggatgcagtttcagaaactgtcattgattttctttatgcagaaaatctgtcctgcatgaaactggccaagctaaaacacatcttccagtgtgttctatgagactcccaaatgcaacttcctgtcccactgcacagcaagacaggcctctgggttcactaccaggctggggaacagctgtgagtctctggccttcagctcctgattagcggttaagcaggacaactgcacccatctgactttgtaacacagtccacgttttacacgaaattctattgggggagacactgttttcctattttacattcttccaggtcaatagttctcaatgtttggtcagcctgaggacccctggaggtcgctgagatccttttaggggtccatgaggccctccccctgcttttcctactatagatctgtgcaaggtcagcttttgctttatatgcttcaaataacaagcaaaacagaatgaatgaagcaaataaaattcagcggattctattaaatcagacattaaagagattttttaaatgtagaaacaatgtcacatttctaactaattttattttggaaaacagtcattttttaataattttttatatgtatgagtttattatagctatgtaaaaataaatacgaatcaaataaatactaatctcagttttaattaattggtaatatagtaaatattgataggaattatccatggaaacagaagctctttgggctactcgataattttcaaagtgaatggcatccttccatcaaagtttgggaatggctgttctaggctaacacgacaactcacccacattcctgagtaaacaccaagtaaagagggagaggcaggtcacgtgggtagagagtggatgagggggattaaaagcatttcctggacaatccacattcgtataatccagtgttgagcactgtagccctccagctcccatttaggaggtactaagctagtgctgatggcattccacaaagaccacccatatgatgcgcacctgcagcagttggccggagccgtgggcagagcacccctgagaacacactcagcccctcacacccaactcaaggcaccttaactatgagcaaaagactgtttactgtttgttgcatttgttcagtttgtgaacagattctagattgaagctctgcctcaagaagacaggagagaaggccacacaccccataggagaagcatgctagctcgggaagacaccagctcagggaaagctaatttctgccaaactcgagggaagctgggtaaaactgtgcaatccttcctacaaatctatcaggatatgaggcctgcctctttaaactgcattttacaacttaccacaaagcagagaagtgcaggtcctttacatttttctgtaaagcagattaccttcacatataaaatgagaatgggactgttaagtggagagggtcaaacatgggcattaaaaaacccctttataaaaagacattcgatgtgtcttgtggatctaagtggagaaatatgccagaaaggcctacaagatgatccacaattcaaacatatttctaaatgacctagtaattcctcttcatgaagtgctccacaaaattttgctcatctaacggatgttcttccaggatcaatcttttccttctttatcacttggagggggaagagccttcacccagcaattttcaggcaggaatcctattaggatcatctgggggcttgttaaacctgcacatcccaggcatcagaaactcaataagcagcaggtcaagaatggtgacctcagggatgtgtttttcacaagcccctcaagagatcttgcaggtggtccctgtacggtgctgtgagaaaccccatcccatctcaagagtgtcctgccttcctctattcagagcccatctgactgcattttcagcgagactcctgatatctcggctctgtttaccatgtggcagctgctacaagaggccagaggtctcttgcagcaaacacggggccacccacaaagctattcagtctcacggtggctctgcacagttgactaacaagtttctttcttttgctcttttctccagggagtggtactggcaaaccagcaatctgacaccgaccctctatctcctctgcagaagagaaaccctacaacctaatgatctctaagattccttcctggatgaagatctgggatactaacatcttctcacattgttgcatttagctctgagcagaatctgaaatgagacactgaggatacaaacaccctttgtaaccctcagaagtttaagtcacttggttatcagttgcccagtatcagtcttcccactagaacgtgtgcttcccagagtgcagggaatcatcctgaatggcagggttaggagattaagggagagtccttctaggagcagattgtttttgggaaacacttgaatgagtccagtggctgctccagttgactcccactggctctgtgagcccaactccatgaccagtgacatcaagtgggtagtttaaaatggggtgtgggaggactagttgcacaatggaaatctgcaaacactgaacaccaagggcttcctctgaggggtgagaggagctggttattaaacatttgccagcaccaccgactgacttgaaaaaggcaggaagattccagacctctgtgaaaggaaatcataccccactttattctttccttttatcaacgacatttagttatttcactttggacttaaagggtatattcagaatgaccaaataaatatgatcccacgatgtgatcctgataagatcagagacaatggctcactcttcagaataatgtgtgtggctggtggtgcaagaattcattaggctcctcaactgtgattgttcaactgacctccatacagcaacgtccccaactggacagacaggtgcgtgagataacaagactgctgaatgttacattctaggtccctttctgtcttttgccatgaaggtttctcatttctcacacaggacttcaactcaaagatggaagagaacactgtggtccccgccagcacccctgctagtgatgagcagctccacctgcccctcaaagtgcacgatgctgctctgtgtgtcctggccgagcgaggcagcccaccgcctgggagaggagaaggggaagcgctcccctctgcctgtttgtacttggtcatcttcaatactctcagctgattccttccttttggaggttctcctacttctcatcttttatggattctaaaaaatccaaccgttctcctacttctcatcttttgtggattctaaatgttctcctacttcttaccttttatggattctaaaaaattggattatagtttcttttcttctggacaccaggcaggctttatacatttagtagaagcaaacaatcaacatgacagctctgctgctggacccgtgacccacacgtgtagtctggacacacgcttagcgtctcgcggcagcacaggcatgccaaacatgtctggtatccctgatggaggatctctagaagcccatcaaaaaatggcacttctggtcaccaaaagatcatcagactcttgcagggattataaactgtgccatccccttactgacctataatatgcagattaataaaactatagcaattgatgtgggggagattagatgcattcttgcttctgctttctgatctaatggtgctcctgggtttctgggcctgttgaagtgttctttcggctgaagccctcctatcatgggagaggctgcacgcctcactggggaatgcagctgatggctggaaagtgttctaggctgggatgctagggagggagcagatgatgtgaagcctgaagggggtccctcaggagtttcccagtgtcactggcagcccccagcgtggtcaggacga

SEQ ID NO: 317426 - DNA, 4001 bp, Homo sapiens
atactatcacttcaacataatcaatataaaaatactgagacattaggcattcttttttcatgccaagtctttgaaatccagtgtgttctttatactgacagcacgcctcaatttggagtagccacatctcaagtgcttaacagccacatgtggcttctgtactgggcaacaccagtgtactggtttcctcatagtctcaaaaatattcacaatctctttcattccattacccttgccagctcagcttccaagaagatggagcacttccccacttctgcatttctgctgatgctcctgtcccatcccaaatggacccctccgtctggtatcaaacaggtgctggtagcagaatatgcaggagtcatgtggcataaaggaacacagggaaggtttagttattctgaatttaatctgtcagtgttatcgttttagctaatcagataccctctcatgttagcaaactacctcacacagaaaccagagcccatgctaattgacaccgcttgtagagtggctatttcttatttaagcctcacaacattcctaagagggtgggcctagcagggtggggagtgacctatgctaattggccactcaagagtggtcagatggtgggggcagagctggcttcacgggtgtgtgttctgtgcggtcacactggctctgtgcttagaaggaccttgcacaaggcttcatgctctgttgtctctgtcttgaaattcctaataatctttcaagaaagggttctgcattttcatcttgcaataggccctgcaaattatgtaccaatttagggggaggcagccccctaagcagcttccagaaatagctatagccaccttcctcccagccttgctaccgagtggtatgttatgagaaggcaaaccttgggccaaattttgccaaaccaatgacctttatcagcaagctgacaggcaataggaaccacatagagcttctcacaggctctgcactcaagcctccaacaagcacttctcgagaaaggttcaaccagaggagggcaccgtggcaatctaacggcagagccaggccatccacagtcaggtcacacagatggagtgtggggacccgctcgacaggcactggcctccagttctgctccatagtccctggagccagggtctggacgcctttctaatcaaccacagcccttgaacatcatccatttcactaataaaaagttacatgtagcgccccttatgctaagaacaattctctgatgtgcatttatttcaatggcatttgaagtaagtacaaaatggcctctggcacgtgaagctcagaatggactacctagcttctctgaaccttagcttcctctttttaaaaagggacagaacacatagtttgcagagtggagagtacacgtacaatgcctaatgcaaatggttgctatgaatggtgttcaataatgggcaataatcttcggatagaccacacacattataaaaacccagtttccaaacaagaggacaaaagggcacacttatgaccgttctgtagcacaaatgcaaaataaattacatttaaagtaaaggaacaactttgcagagccattactctattaactataacactgcacataagctgggaaatctcgctttctgacagccttccagaggcaaagaaaagtttcgtccaagcaactaattttcacaaagtttggaactcacaagcaggtagaactgaaagctgaattccaaataataataatcaccaccaccacctagattcagcaaaacacctgtacaccccacactttcaaatctcttgttattacccaaactggtcaaggcttccaggatgcagtttcagaaactgtcattgattttctttatgcagaaaatctgtcctgcatgaaactggccaagctaaaacacatcttccagtgtgttctatgagactcccaaatgcaacttcctgtcccactgcacagcaagacaggcctctgggttcactaccaggctggggaacagctgtgagtctctggccttcagctcctgattagcggttaagcaggacaactgcacccatctgactttgtaacacagtccacgttttacacgaaattctattgggggagacactgttttcctattttacattcttccaggtcaatagttctcaatgtttggtcagcctgaggacccctggaggtcgctgagatccttttaggggtccatgaggccctccccctgcttttcctactatagatctgtgcaaggtcagcttttgctttatatgcttcaaataacaagcaaaacagaatgaatgaagcaaataaaattcagcggattctattaaatcagacattaaagagattttttaaatgtagaaacaatgtcacatttctaactaattttattttggaaaacagtcattttttaataattttttatatgtatgagtttattatagctatgtaaaaataaatacgaatcaaataaatactaatctcagttttaattaattggtaatatagtaaatattgataggaattatccatggaaacagaagctctttgggctactcgataattttcaaagtgaatggcatccttccatcaaagtttgggaatggctgttctaggctaacacgacaactcacccacattcctgagtaaacaccaagtaaagagggagaggcaggtcacgtgggtagagagtggatgagggggattaaaagcatttcctggacaatccacattcgtataatccagtgttgagcactgtagccctccagctcccatttaggaggtactaagctagtgctgatggcattccacaaagaccacccatatgatgcgcacctgcagcagttggccggagccgtgggcagagcacccctgagaacacactcagcccctcacacccaactcaaggcaccttaactatgagcaaaagactgtttactgtttgttgcatttgttcagtttgtgaacagattctagattgaagctctgcctcaagaagacaggagagaaggccacacaccccataggagaagcatgctagctcgggaagacaccagctcagggaaagctaatttctgccaaactcgagggaagctgggtaaaactgtgcaatccttcctacaaatctatcaggatatgaggcctgcctctttaaactgcattttacaacttaccacaaagcagagaagtgcaggtcctttacatttttctgtaaagcagattaccttcacatataaaatgagaatgggactgttaagtggagagggtcaaacatgggcattaaaaaacccctttataaaaagacattcgatgtgtcttgtggatctaagtggagaaatatgccagaaaggcctacaagatgatccacaattcaaacatatttctaaatgacctagtaattcctcttcatgaagtgctccacaaaattttgctcatctaacggatgttcttccaggatcaatcttttccttctttatcacttggagggggaagagccttcacccagcaattttcaggcaggaatcctattaggatcatctgggggcttgttaaacctgcacatcccaggcatcagaaactcaataagcagcaggtcaagaatggtgacctcagggatgtgtttttcacaagcccctcaagagatcttgcaggtggtccctgtacggtgctgtgagaaaccccatcccatctcaagagtgtcctgccttcctctattcagagcccatctgactgcattttcagcgagactcctgatatctcggctctgtttaccatgtggcagctgctacaagaggccagaggtctcttgcagcaaacacggggccacccacaaagctattcagtctcacggtggctctgcacagttgactaacaagtttctttcttttgctcttttctccagggagtggtactggcaaaccagcaatctgacaccgaccctctatctcctctgcagaagagaaaccctacaacctaatgatctctaagattccttcctggatgaaga

SEQ ID NO: 317427 - DNA, 4001 bp, Homo sapiens
ctttgcttgggaggaagggcctcctaaatttgtctgatgacacttggggacaacatcttcatcctttaaagcatttgtaccgttttttggctttggaaatttttttaaatcacatctaattttaaaacaatagtaaagaaaaatgttacctataaacccactgccccaaaccaattatttttattttgcctgtcttccggtatcttatacatttacattctggaattttttaaaacaaaacaaaacaaaacaaaacaaaaaaacaataactctccttggaaaagtgagcaaatgtcctgcatttgaaaacctccctaggagacagtgaactgttggagccgcccagcgcagtgaggcagtagcctagctcactacactgtagcccacgtcctttcagtgggacttttctcctgcctcttccttctctcctctcctttttcaagccacctagaaacaggcaagacgttttatccggcaggaaataggaatcttaaattcagctgactctattactttgcactgtattcgctgggaacaacacaaaggaactgcttttctttgaggacatttcagcaaccctcttattgcgttactgtgtattggaactctatttgaaactaaacttcatgatctcaaagtgcaatcttcctatgtgagcttgcactgcatctctttttccagccacctttgtctttgtcaaggctgagccttctcaactttcttctggaaggctgcggtcctccagtcgtggctccgctacattctatgagtaacgggtaaaggggacgctgaaggctgatgacagtgctgtgcagaacaacagcacagacagactggacacactcatcatcacgcggcatcatgtcacctgaatagctggagattttcctggccacagaaacaatcttgttttcagtctattttcatcctaaagtctctctgaagccttcactatattgcaggtggcttctgtgttttttgccaaacccttagtttttatactcctcctcctccctcatctatttggcagcatgtcctatagaaaaacatcagaggctgaacactgcagcctcctcctccatcaggagcaagccaggtcctgttttttagatttttcttcccccaaaggtagatgtgatgagaaagtgaacagagcaagcgtctctcccagggccctgctgtactcaagctagaaaaatacaggaaggggctattgacattatgtgacaccaggtagaagaactgccattcagcaaggtgtgagtatcatgtgaaggttaaggcgcacacatcactggcagccgcccctccaaggagcagatacatacttaatgccaggtaacctattaactaatatatgagctaaggtggtgcaaactgaaatattttacttagtcaacaaagttctacatgtttttagagtttatccagacttaaaggcttataatgaaatgggccctaggccaaaaaagactatagtgactgaatggcaggctttgaaatataaaactaagctatctccatcaccattctctaagtcatcagtgctaaaaatagaaatggtttgtaaaaacctatcttttctgtttttaagtactgaaagatgggatggactgtggaaaaaaaagcagttcttgcaaagtgacatcacaagccagtgcggccttgagatcccacttcccgcctctaatcccaggagcccttggccagctggacaacgacccacttagcacagcaggagtctgtgggatccaggaatgatgtagacactggcatctctatgcataatgtttatgaaactccgagtctcaccactgcctacaaagtctacagaaaaatatcttacctttacaagctgcagctttgatttatgaagtcattagagtgagcttcagagagcttcaaattactctgcaatagaagggctatcatttccaaagtggagtctgcttgtttgttaacgtctttttacccatttatgagccgaaggaaaaatttctcttccagagccccagaactttctgcaagcagcagctccagtgcctggggccccagggcagagatgactcagtgatgacccctcagccctccagtctgtggtcagcctggttgccttggtagaattttcttcactaaccaagtaatttaatgcctgagctgtttacaaaccattaacaaacagcgctccctcctccccatttccatcctcactcctcttcatgaccctgtatgaaaatcatagctaaaatgtggagaaaatgtaaggaaggtagattaataattttcttttaatttccagtgttagagaagtcaaaaacatagaagttattggcaagaaagcttaaagcctagagcttgagattttagtttctgtaactcttttgttaataaactaagcacacaattttgaggcttttagttaatctttttttttttttaaccatggtataaaccttcatgaactctcactaaagatatgctcaaccaggagatagctttttgtatctattttaatttagtgattttattttttcagggacagaaaagaaggaatatgaattcttatagtaaagcaaaatgggaaactctttaaaggttcttgtagataaaagtgaataataaaaatctagtatttggggggaaaggaaaagagagaagaagggtaaatgctcacttatattaaaaagcaaattttaggatttctagaatttggatatttaagatgtttacccaaagcatgtctgaagtagtatcaatgtctttgaacatttcccttaagatgctctctaatcataaaaacaaattttttaaagatcacatgtttttaagctgtcaagtgatgcttaaaaacatttgatatataataactatcatttttttagtagcctcctcctttacaataaaaaaaagaacctgaattgtcaaaaatatcacttttattctgcagtagggaaaacaaactgtgcccgaactgaccatgctcacaacattccactcggttcctgatgcgcacgtggacagccctatccctgcatatgaaggcaggttgaaggctttgtgtatgaacactcacctaactttgacaatgttctcaaaaagtaaatcaagaatataaaggcaggttttacatgtgaaccacccaaggttaacagcgggggcacgggagtggcagtggctgtgacatgtgggctcaggggcaagaggccttcatgaagtgtcaaggctgagcggggagagcgagccatccacacggaggtgttactcaaggtcctgacactggtctccaagacagtgacttgggagaaagtgtagagccaagggcagggcaagaagagaaaggggaggaagagatgccaagggaatctagaaagggcccagaggcccacagtcagcatcagtcaatactcacaacccagagtggctgaggaaggcaattcatgagaaacatacacctgtggctcctcagccaagtcctccaaatgtctgctctagggagaccctcatggtgagcgatcggatctacacggatcggatccacatcccacaagatgaaggcatctagggaagccccgtgattatcagaagttaaggaggactccaaagtcacaaaacccacccctgactaatcttagactatcaaacaataccctgttctggtaagagctacaggtataaaaataagaatcaccacggagagacaggaaatgtttcccctctaataagagaaggctggttctggcaaacagatttactaatgctcaccaaagactctggctacgaatcccagcgggaactgtgaggcaaacatggtgaggaaccagggggcagcgtagaggctggggccgatctcgtgctcctccaggtgattgtagaggtctctgtggtaatcatgaagcaacctcgagagctggtacatctggatctgcaggaagacagccacaagggctgagaattagggatctgccacagcaataaagttatgcctactgctcacagggtgg

SEQ ID NO: 317428 - DNA, 4001 bp, Homo sapiens
cggaggataccgaggtgagcagagcctggcccagtagcctgcctcagtttgaatcccatctctgactctccccatgtgggtggctcccagccagttactctgtctcccttagtaccagctgacacccttgatgtttcccaaaaggtgttttcgcccaatgaccctgagcaccaagttcatgccaggctctcattaggactggggatctcattaggattgcggagcccacaatctcaaggggtcaaacacacagcaaagaagcagtaagagggttggtcggaggggggaagccatacccaaactgagatatgggttggtactggccagataaactgggcaacaggaagtgttctaagactgctgtaaggactagcccggtccagacaaagcaaccaccagtttccaacaggcaacccaccgctataaaagctaggcaagacagcaactaggtgccaacatcctacaatactggggacaagacagtgagcattttgtccccaagacaccaccacgactaccctcctcatctagcctcagtgcgtgaaataaccaaggtgatgcccagggacctccagtaggggcaaaacgcaccggtgcctataaaaccttcccaagcaaagcttccaattccacgctagagaaaacggcgtcctatgcaactttaggacagaaacgacttcacgtggcctggtcaggcgcggtcaccccggggctcgcagaggctggctctggagtccacagggtcattctcctatcctcctgaccagctgttcccatcaggaccgcaacccacagcctagagagactcctggcgggagggagaccaggagtccccggacttactcctcaaggcagctaccccggccccgagacagtccccgggccagggtcttcgcggcccggtaatgggaggctccaaggcggaggcagagagattccctagcccagggacagacggttcgcgtgggtggaggtccaaggaggtcagggctccgagatgaaagggggtttcgcgggtcaggggctccaggggtagaggggtcagagatgaaagcggggtcaggggctccaaggaggagggtccgctgcctggggactgagggtccgaggtggaagggggctccggggtcggggtctggcgcaccgaggcgcctcttctcaggccgggagcctcgcgtcggagtaggaaaacttttcgtcaagttccgtaaaggagcgggacacagcgcgcgcctccgcgagggccgccgagtcccgagagtcgcccccgccccggaggccccgtaacggcaccccgggcgccacgcacgcgctgccctggcgtgcaggagccgcggccgcgcggcgagggacacccagcaggacccgcgcccggcgacctgcctcgccccggccgctccccgcctcggccggcgctgcagcaggtggcggccccgcgcgccctgccctccctcgcggcccgcggcccggccctcgcgggaggctctcagtaccggagttagcgcggctccgacgccatccccgggacccgtgggcccgcagcccaggccccgcgggaccggcaactcgcgcgacgaggacgccgggcacgcggtaggcagcgggtccgacccgcaggtgcgcgcgagcagcccgcggcgaacagcggcgcgcaccctcgcttcgccccgccccctcgcccgccccctgggcacgcccccacgcacttgcgccccgccccctgccggcccgcgcccgttcttccgcccgtgccgccgcgtctggagctcggcgctcgcccggctgtccctcttccgggggccgcccgccgcgggcctccggagcggcgtcgccggccctttttttttgccggagaaccaaccggagtggcgaggagctgccttgagcgggcctttgtgcccgcagggcccccacggacatccgacagggggccccttacctggtcggctccacccgcagccatcttggaagtgggaagcggccgggagggggaaggggctcgagcgggcagggctcaggcgtagggagccgagcggcggagcgcatcgatggggctcccctgccccggccggtgtgcgggagacggcccgggccccgccgcggaagggaagctttgcgtgacaccggagctcaggccccgccgcggtggtcttgggagcggcgccgtggcgtcctcccagccagcctcagtctcttaatctataaagggcttttccgaacgttctctcttatcgcgctgtgacacggtgcctggcgctgtagttcccaaactggtctgcactttagtattgcctgcggagcttttaatattctgaagcccaggccgattaagtcacagtctctgaagatgagatggaagcatcatcagtttgggaagctgtgtaatgtgcacgcgggtttggaagccactggcctggcgttatctgcatatttggcctcaacattgcacaaactccagagacgggatctatgatcagagccattgtacaaagcgggaaacgggctcagagatgaagccctccgcccaaggacccgggtgggtcagtagctgagaggggcagaagccaggttccctgccccagagccctccatgagctggtagagagtatgtgaggagcccctgttgacgggcagtgggtctccattccccttctaggctgtgggttccatgaggaaagccgggcttatcttgtttactgctattttccctgggcctggcaaatagttggtatttgacgttattgggttgtcgttagactctggggacttgagggcaagaggagagacccagcgctgggagccagaagtcctggatttccacttggctttggctcctgccaaccaggagccctgagggttgtcactggcagataaattaccagagaggaaacccgggagagactgactgcagcccaatctaagggaagactcagccactcagaaaggtcaggggcaggaggagtttccgcattacaggaagcatctggaagcatgaaatggaagatttgtctctactgcggtcgttagggatgggctagggaaccccgaacttgggtctcctctccagctcatggctgtaaaaaccctgagcatctatgagatatgacgcagaagcaagagagatttttaaaggcgatctcttgaaagcaaaaacattaacatccctcgcagtgctgcatcacagaaactttataaatgcttaaatttctgggggttttaagtaaaaataatacgaggcctccttcatacctcttaaaacaaggcctccccagctttttctaagtaaaccctagtggaaaagtacagactgcttcagtcgtgacttaattagcaatttaatgcgttggattaatagatctgcttggggctcccaaatcccttccagccctaattccgagtcttagggtctaaaaccctacaatgacaaggaaccattgttctgtatccagaaccgaagtctgtggtcctgcagatttgcacctggcgccctctgcctgccttttcctcactcgccatcctgctgcgcccactccgtctctcccggagcctgtcgtcacctgcatccgcagcgtgatttgacccacgccttacctgttgccctcagcgcccagacgtgttctagacaaatcttcattgcaacttgagtctgacaaaattagcacggcgagcaggatttagccgtgtggctgtgtgcggtcacttcacctttcggcacctccctcacccccatctctgatgtgcagataatcccgggatcagggcggtcagccctggatctcagctctgctggtcctgaggcgtagacccccatcataactggctagatgaagccatctcattccccatgcagactctacctgaggtttccagaaggattatctccccgcagtaaagccatcgcttagtgtggacaagatccaggcctcttagctccctctcatcagttccaggcaaaggacctacgcatgggagccgctgggctggctaactcctcaggtctc

SEQ ID NO: 317429 - DNA, 4001 bp, Homo sapiens
tcctgaattaggtttaacgtttgttggtttaaaaagcgggggaaaagcctgcttcaatgcacatttgttttaagagcgaaaagaaaggatcatgattctcaaacaatgaagaagtattcctaagcctggcacagaggtgctgtgcctgtggtcccaactactcaagaggctgagacaaggatcacttgagcccaggagttcaaggttgcagtaagccataaccgcaccagggcaacaggacaagaccctgtctcaaaaaaaaaaaaaaaaaaaaaaagaaagaaagaaagaaagaaaaaagaaagtactcctggtagaaagacaagaaaggtcatcaatgctacttatgaactggaggaacactacaaaacagccaatgatgtcaataacctgctactggaagccccctgacttccaggaaggagcctctggctccctggaaatctattttacctagaagaggaaagggtcatcagtcaaatcctgtgcttaaatctccgaccccgctgtctgcagtatcaagattcaccagtgaaaataacctgaggatttgggagcgcgcctggaataaagctgccaaggcaggctggccatccgagtggtacctatcaaaagactgacttgaactaatgctgtgacagcacggccaccacatctgcacaggctgaggacccagggaagcgctgggggacagcggcaggcctggtctgagccagcaccaccagcagaatgaccttgagctcctcctccatccacaagcctgtttcctcatctgttacacttgaagattaaatgagaaccagcataagctgcagagccaaagcaggtgcccagaaatgataggagtatgactgtcactatatactatgaaattactcttcacaacattccactctaagagggttgcttgtggaaaagggcacgaaactgaaagtgtccgcaacaccgcggctggtctcacacttggccatttgtaaaagcaattgtcttggaggggggagcccagtttagcatctgggaggggctgttttgccattttgagggggaagaatggcctgcacaggtcttagaaaggtcccaccttccaaaaggcagccccggctaacccctgaagcctgacctcacagtaagtaaagccactgagaacatctgagtggttcctctggcctgggttctttaacaagctgcagtcccctcctggaaagcgttctctaagttactgggaatgttggcattctgggaagcactctcaggagtccttttctaatagtcatattcctcccagagcatcaaaagttaatatgcgggctggtgaatgaaacatattcaaaggaactaggttttaacacgcccggttgctgttgcaacctgaccacctcattgggctctagagctcggagcgcagtctcatctccatacaaaggctcatcggatcgcaggcgaggcccttctgacctctaagggggctgctgggcctggcccggctctgaaaacagggtaaggaggactcaaaggacgtgctcgctcacgctgtctctcgtcgtcctagtaaacgtgaaccagaagaaaatacgtggaaacacagacacaaagagtaccagggaggagagcgcatcagcagcatgcacagcaagcttcggctgttgaggacagatacacgtgatgctcgcacacccgcacaaccgcacacatgcacactcgcaccctccacctgcgcggggccgcagggctggcaggcccaggacaggacaggcccacgggaccgggcaggcctggggcgcagggagaggcaccggcccgcaccccgactcaccatgaacgccggggccttagaggcgcgcggccggaggctccatgcccagcgagcggagggccggcctccctccctccctcccggaccgcgggcgggcgggcggacgcggcggctcctcagactcgcggggcggggcggggcggcaggccgctcaatcgcgcgcagacacagcgaggcgatccgcgctgccggctcggcgcgtcaggcctggctggagactcccaagggggcggggctgatgagcggcgaggggcgggcacaaggggcggggctggggcgtccccgtggtacggccccaccggccgtaaacaccggggacgcgcgccgacaggcggagagccagcttctgccttaaagatcacccgagagctgagaaacgtgttgccaaaagaaattgcacaaaaatagtcgcactagtgagctctgggtggcggggtgattgtgagcagtttttacgggctaccgtggctcctgtttttcacaaagtattaacaggtgggtttaaaacgtcagggagcacacaaaacactcagagaagccgaacaggcgccccggggctgccgggagggagacggaagctggcgggacagcgcccttcagatggcgcggtacgctgtcgatgagacctcaggtttttaaaaacagtctttaaacttcgaccctacaccataaggactacgtcgggtcaaaattacttctggtcagccgcgggccccaggtcccagggctgagcaagtccggtctgcgacaacacgaggctctcccgtgacggggcctagcccaaggctccccccgcagatctcctgggattcagaactaccaaatcgccggcagacaggtctccatcagaggaagcctgtgacggccgccaggataaaataaaaaggacaatggcaagtgatagcaaagacttagagaagctggaattctcctaaatccttggtaggagtgtaaaatggtgcagcttcttctataattcagcatcccctaccatactccctggaacccacccaagagaaatacgaccagagagacttgcatgcaaacattcctaacagcattgtccacgccaaccagaacgtccaccaaccgcggatgcatgagcagcagggaaatggccatgaaaagaaactgctgagacatgggcctacatggatgaacctcaaaaacgctaggccaggtgaaagatgccagacaagaaaattccattattccatttatgtgacacttcttaaaaaggtaaatctctagagaggaagcaaattcatgtttgcctgggggtgagagtgggatcaactgcaaacaggcacgaaggaacttttttgggtgatgaaaaataaaactttggatgtcgaacatattttgaaactagattgcaatgatagttgcataactgtatacatttattaaaatcgtggaacacttacaatgagtggatctcatggtatattatttatacctcaagccatttttaaaaataggataaaagggaaagaggctgattctggctgaaaggattagcgaacgccttgttaagacaattatccaaaatttgaaaataaggcaaaagcaggagtaggggttattctttcaattaattcctgggcacttttagcatggctgcctaaagattaattatctaggacactgtccctgtgctatttgttactccattcaagccccgatactgtaaagttacatattaacttgtagataatgtccaaaagaaaagataaccccaaagattatgttttattgtcaccagtttgtttgttcattgaaatctaacctagccatcttactctagttctttttgggttttacgcatatatgtgtgtacaaacacacacacacccctaattcctcaaatgctcttggcataagttttatctcttactggtctcctcaaggcgtaaaataaatctttgaccttgatcattttaattttaaaaaaggtaaaagtcgtgagaaaaaggagtgttttatatgaaaagaataaagggacatataattaaggcaatacacaaacctgactggatcctggttcaaaaagaacagcttgatacaactgaggaaattagaacatgctctgggtatcagatgctactatggaattccccatcattctcctgggtgtggtaacagtcatggttatgtaggagaatgtctttactcttaagagctgtgt

SEQ ID NO: 317430 - DNA, 4001 bp, Homo sapiens
catgggaagctttcacaaaggggccagctgagtggacagacaggtaagacgtgggctagaggccaagaggaagaggcactctgacagcagaagcagtggccaagagacacccacaagcaggctagcaccaggatttgaaccgggaatggtgcagagtcaaagttgttttgctctagatttgaaggtctcaacacgttacccagaggtgctgggacaagccccaggagagagaggagagccagaggagagactatgaggtatggggagcccctcagacgcatccaggggcagggtctacattccacgtgtgatctgcacagtgctaaagacaagaagggcacgaggctcctgaattaggtttaacgtttgttggtttaaaaagcgggggaaaagcctgcttcaatgcacatttgttttaagagcgaaaagaaaggatcatgattctcaaacaatgaagaagtattcctaagcctggcacagaggtgctgtgcctgtggtcccaactactcaagaggctgagacaaggatcacttgagcccaggagttcaaggttgcagtaagccataaccgcaccagggcaacaggacaagaccctgtctcaaaaaaaaaaaaaaaaaaaaaaagaaagaaagaaagaaagaaaaaagaaagtactcctggtagaaagacaagaaaggtcatcaatgctacttatgaactggaggaacactacaaaacagccaatgatgtcaataacctgctactggaagccccctgacttccaggaaggagcctctggctccctggaaatctattttacctagaagaggaaagggtcatcagtcaaatcctgtgcttaaatctccgaccccgctgtctgcagtatcaagattcaccagtgaaaataacctgaggatttgggagcgcgcctggaataaagctgccaaggcaggctggccatccgagtggtacctatcaaaagactgacttgaactaatgctgtgacagcacggccaccacatctgcacaggctgaggacccagggaagcgctgggggacagcggcaggcctggtctgagccagcaccaccagcagaatgaccttgagctcctcctccatccacaagcctgtttcctcatctgttacacttgaagattaaatgagaaccagcataagctgcagagccaaagcaggtgcccagaaatgataggagtatgactgtcactatatactatgaaattactcttcacaacattccactctaagagggttgcttgtggaaaagggcacgaaactgaaagtgtccgcaacaccgcggctggtctcacacttggccatttgtaaaagcaattgtcttggaggggggagcccagtttagcatctgggaggggctgttttgccattttgagggggaagaatggcctgcacaggtcttagaaaggtcccaccttccaaaaggcagccccggctaacccctgaagcctgacctcacagtaagtaaagccactgagaacatctgagtggttcctctggcctgggttctttaacaagctgcagtcccctcctggaaagcgttctctaagttactgggaatgttggcattctgggaagcactctcaggagtccttttctaatagtcatattcctcccagagcatcaaaagttaatatgcgggctggtgaatgaaacatattcaaaggaactaggttttaacacgcccggttgctgttgcaacctgaccacctcattgggctctagagctcggagcgcagtctcatctccatacaaaggctcatcggatcgcaggcgaggcccttctgacctctaagggggctgctgggcctggcccggctctgaaaacagggtaaggaggactcaaaggacgtgctcgctcacgctgtctctcgtcgtcctagtaaacgtgaaccagaagaaaatacgtggaaacacagacacaaagagtaccagggaggagagcgcatcagcagcatgcacagcaagcttcggctgttgaggacagatacacgtgatgctcgcacacccgcacaaccgcacacatgcacactcgcaccctccacctgcgcggggccgcagggctggcaggcccaggacaggacaggcccacgggaccgggcaggcctggggcgcagggagaggcaccggcccgcaccccgactcaccatgaacgccggggccttagaggcgcgcggccggaggctccatgcccagcgagcggagggccggcctccctccctccctcccggaccgcgggcgggcgggcggacgcggcggctcctcagactcgcggggcggggcggggcggcaggccgctcaatcgcgcgcagacacagcgaggcgatccgcgctgccggctcggcgcgtcaggcctggctggagactcccaagggggcggggctgatgagcggcgaggggcgggcacaaggggcggggctggggcgtccccgtggtacggccccaccggccgtaaacaccggggacgcgcgccgacaggcggagagccagcttctgccttaaagatcacccgagagctgagaaacgtgttgccaaaagaaattgcacaaaaatagtcgcactagtgagctctgggtggcggggtgattgtgagcagtttttacgggctaccgtggctcctgtttttcacaaagtattaacaggtgggtttaaaacgtcagggagcacacaaaacactcagagaagccgaacaggcgccccggggctgccgggagggagacggaagctggcgggacagcgcccttcagatggcgcggtacgctgtcgatgagacctcaggtttttaaaaacagtctttaaacttcgaccctacaccataaggactacgtcgggtcaaaattacttctggtcagccgcgggccccaggtcccagggctgagcaagtccggtctgcgacaacacgaggctctcccgtgacggggcctagcccaaggctccccccgcagatctcctgggattcagaactaccaaatcgccggcagacaggtctccatcagaggaagcctgtgacggccgccaggataaaataaaaaggacaatggcaagtgatagcaaagacttagagaagctggaattctcctaaatccttggtaggagtgtaaaatggtgcagcttcttctataattcagcatcccctaccatactccctggaacccacccaagagaaatacgaccagagagacttgcatgcaaacattcctaacagcattgtccacgccaaccagaacgtccaccaaccgcggatgcatgagcagcagggaaatggccatgaaaagaaactgctgagacatgggcctacatggatgaacctcaaaaacgctaggccaggtgaaagatgccagacaagaaaattccattattccatttatgtgacacttcttaaaaaggtaaatctctagagaggaagcaaattcatgtttgcctgggggtgagagtgggatcaactgcaaacaggcacgaaggaacttttttgggtgatgaaaaataaaactttggatgtcgaacatattttgaaactagattgcaatgatagttgcataactgtatacatttattaaaatcgtggaacacttacaatgagtggatctcatggtatattatttatacctcaagccatttttaaaaataggataaaagggaaagaggctgattctggctgaaaggattagcgaacgccttgttaagacaattatccaaaatttgaaaataaggcaaaagcaggagtaggggttattctttcaattaattcctgggcacttttagcatggctgcctaaagattaattatctaggacactgtccctgtgctatttgttactccattcaagccccgatactgtaaagttacatattaacttgtagataatgtccaaaagaaaagataaccccaaagattatgttttattgtcaccagtttgtttgttcattgaaatctaacctagccatcttactctagttctttttgggttttacgcatatatgtgtgtacaa

SEQ ID NO: 317431 - DNA, 4001 bp, Homo sapiens
agattcaaacaagctgctctgactagctgtgtccccactttgagagaggccttctatagcgcaccagctaagcaatcaacccagagtagaggagggaaggtggaggcatgaaagacaggaattcacccactaaacggggagtggggtggagacagcggacccaatgcagaggaactgcaggggctaaaggaacacaggggaacagcagaagccaggagaggcaaagcccaagctgaatgtgagagggtaggctgggggcagacggtgaaaactcagttgcacaaacaggaatcaggcccagctcggtgcaaagtgctggaacagcggaggataccgaggtgagcagagcctggcccagtagcctgcctcagtttgaatcccatctctgactctccccatgtgggtggctcccagccagttactctgtctcccttagtaccagctgacacccttgatgtttcccaaaaggtgttttcgcccaatgaccctgagcaccaagttcatgccaggctctcattaggactggggatctcattaggattgcggagcccacaatctcaaggggtcaaacacacagcaaagaagcagtaagagggttggtcggaggggggaagccatacccaaactgagatatgggttggtactggccagataaactgggcaacaggaagtgttctaagactgctgtaaggactagcccggtccagacaaagcaaccaccagtttccaacaggcaacccaccgctataaaagctaggcaagacagcaactaggtgccaacatcctacaatactggggacaagacagtgagcattttgtccccaagacaccaccacgactaccctcctcatctagcctcagtgcgtgaaataaccaaggtgatgcccagggacctccagtaggggcaaaacgcaccggtgcctataaaaccttcccaagcaaagcttccaattccacgctagagaaaacggcgtcctatgcaactttaggacagaaacgacttcacgtggcctggtcaggcgcggtcaccccggggctcgcagaggctggctctggagtccacagggtcattctcctatcctcctgaccagctgttcccatcaggaccgcaacccacagcctagagagactcctggcgggagggagaccaggagtccccggacttactcctcaaggcagctaccccggccccgagacagtccccgggccagggtcttcgcggcccggtaatgggaggctccaaggcggaggcagagagattccctagcccagggacagacggttcgcgtgggtggaggtccaaggaggtcagggctccgagatgaaagggggtttcgcgggtcaggggctccaggggtagaggggtcagagatgaaagcggggtcaggggctccaaggaggagggtccgctgcctggggactgagggtccgaggtggaagggggctccggggtcggggtctggcgcaccgaggcgcctcttctcaggccgggagcctcgcgtcggagtaggaaaacttttcgtcaagttccgtaaaggagcgggacacagcgcgcgcctccgcgagggccgccgagtcccgagagtcgcccccgccccggaggccccgtaacggcaccccgggcgccacgcacgcgctgccctggcgtgcaggagccgcggccgcgcggcgagggacacccagcaggacccgcgcccggcgacctgcctcgccccggccgctccccgcctcggccggcgctgcagcaggtggcggccccgcgcgccctgccctccctcgcggcccgcggcccggccctcgcgggaggctctcagtaccggagttagcgcggctccgacgccatccccgggacccgtgggcccgcagcccaggccccgcgggaccggcaactcgcgcgacgaggacgccgggcacgcggtaggcagcgggtccgacccgcaggtgcgcgcgagcagcccgcggcgaacagcggcgcgcaccctcgcttcgccccgccccctcgcccgccccctgggcacgcccccacgcacttgcgccccgccccctgccggcccgcgcccgttcttccgcccgtgccgccgcgtctggagctcggcgctcgcccggctgtccctcttccgggggccgcccgccgcgggcctccggagcggcgtcgccggccctttttttttgccggagaaccaaccggagtggcgaggagctgccttgagcgggcctttgtgcccgcagggcccccacggacatccgacagggggccccttacctggtcggctccacccgcagccatcttggaagtgggaagcggccgggagggggaaggggctcgagcgggcagggctcaggcgtagggagccgagcggcggagcgcatcgatggggctcccctgccccggccggtgtgcgggagacggcccgggccccgccgcggaagggaagctttgcgtgacaccggagctcaggccccgccgcggtggtcttgggagcggcgccgtggcgtcctcccagccagcctcagtctcttaatctataaagggcttttccgaacgttctctcttatcgcgctgtgacacggtgcctggcgctgtagttcccaaactggtctgcactttagtattgcctgcggagcttttaatattctgaagcccaggccgattaagtcacagtctctgaagatgagatggaagcatcatcagtttgggaagctgtgtaatgtgcacgcgggtttggaagccactggcctggcgttatctgcatatttggcctcaacattgcacaaactccagagacgggatctatgatcagagccattgtacaaagcgggaaacgggctcagagatgaagccctccgcccaaggacccgggtgggtcagtagctgagaggggcagaagccaggttccctgccccagagccctccatgagctggtagagagtatgtgaggagcccctgttgacgggcagtgggtctccattccccttctaggctgtgggttccatgaggaaagccgggcttatcttgtttactgctattttccctgggcctggcaaatagttggtatttgacgttattgggttgtcgttagactctggggacttgagggcaagaggagagacccagcgctgggagccagaagtcctggatttccacttggctttggctcctgccaaccaggagccctgagggttgtcactggcagataaattaccagagaggaaacccgggagagactgactgcagcccaatctaagggaagactcagccactcagaaaggtcaggggcaggaggagtttccgcattacaggaagcatctggaagcatgaaatggaagatttgtctctactgcggtcgttagggatgggctagggaaccccgaacttgggtctcctctccagctcatggctgtaaaaaccctgagcatctatgagatatgacgcagaagcaagagagatttttaaaggcgatctcttgaaagcaaaaacattaacatccctcgcagtgctgcatcacagaaactttataaatgcttaaatttctgggggttttaagtaaaaataatacgaggcctccttcatacctcttaaaacaaggcctccccagctttttctaagtaaaccctagtggaaaagtacagactgcttcagtcgtgacttaattagcaatttaatgcgttggattaatagatctgcttggggctcccaaatcccttccagccctaattccgagtcttagggtctaaaaccctacaatgacaaggaaccattgttctgtatccagaaccgaagtctgtggtcctgcagatttgcacctggcgccctctgcctgccttttcctcactcgccatcctgctgcgcccactccgtctctcccggagcctgtcgtcacctgcatccgcagcgtgatttgacccacgccttacctgttgccctcagcgcccagacgtgttctagacaaatcttcattgcaacttgagtctgacaaaattagcacggcgagcaggattta

SEQ ID NO: 317432 - DNA, 4001 bp, Homo sapiens
aagacccagttgagaaaatgaaaagataatccacagactgggcagggtgtggtggctcacgtctgtaatcccagcactttgggagcctgaggcaggcagatcacttgagatcaggagttcaagaccagcctggccaacatggtgaaaccccatctctactggaaacataaaaaattagctgggcatggtggtggatgcctgtaatcccagctattcaggaggcgaaggcgggaggatcacttgaacctgggaggcagaggttgtagtgagccgagatcacaccactgcactccagccagggtgacagaggaagactccgtctcaaaaaaaaaagataatccacagactgggagaaaatatttgcaagacgcacatctgataaagacttacatcatatagaaagaatccttacaactcaacaataagaagacaacactattttttttttaatgggcagaagatttgaagactacctcaccaaaaaagatataagcacataagaaaatgcttaatatcattagtcattagggaaatgcaataaaagctacaataagatactattacacttctactagagaagtataattaattaataaaaataaataaaagactggcagcatcaagcgctatcaaggacgcaaaacaattggaactctcagaattgcttgtgggaatggaaaatgatacagccactttggaaaagtgtgacagtttctcatagaatgaaacattacacttaccatacaagtcagcaattccaatcctaggtatttatccaagaaaaaaagaaacaaatatccaagcaaaatcgtatactagaatgtatatatcagctttacttataatctctaaaaccagaaagcaacccaatgcccttcacacaatgatgaataaacaagccattgtacattcaaacactgaaatattactcagcaataaaaaggaacagaactactgaaatatcaacaaaatggatgaatctcaaaagcactgtgttaatgccagaaagcaggcacaaaatgtacaaactgtatgatttcatttatatgagtcacaaaaaggcaaggatctcaatcaatctgtgcatcctcagtgcctagcatgttataaaatatccaataaatgctaggtggtggacggatagacgaggaataattgcagggagggtaaactgcaagaaagtgatacattgacgagaaagcagaaaggtacttgggggcccaagtccacccacaggacggaaaaagtgagggaaggcatggtccaagctaccttcagtgagtccagcagcttaaaaaattagaccctgtaaatgactacaggaatagataaatgagtaagcgtttctctggtctgaaaaaaaggtgtgatgcgccccacccttctttaaaaatctattaaccacgcctggggctgaggcagcacagcttgcaccggacagggaggtggggtttttttgttttgttttgtttttgtttttgtttttgtttttgtttttgtctgtttgttttttgagcaccagagcggagctggagaggtcagaggcgagctctggcttgggtgaggagggtgaagaagagacatcgccgcggccccgcccgtctgcatcccttcccactcggcctcacttacccaggcctgccgttccagctgagagtacaaattggagcccttgagcttttggactatctgggcaataatgagagagaggtccgactcctcctgcaacatttcccctgccctagcccgccaagccgcggggacaggccgccggcgcggagcgaacgggctaccgggtcccactcagggccagtgacacttctccgggaccttattacactgggactcctccagcgggcgttaccaggcaactgccgagccttgtgtccgtccctctctggtcccctcagcgcctgaaggccacagcatctgcgttccgccggcggaaaaagaccggggcggggaggacgcttttcacaccgttgttcctgccttgtctatggttgaaaggcaagaaagctcattctttcagagccacagcgcctctgatgcacaagggggacacggagaattgtgcgttttactatataaaggatcattctcttccacctctcaatttctgcagaaacaggactgtggcacgcaatgatactgcgaattacaaccacgaattgttaggctctgacactacctgcgtaaacgtgttacagtttccgcctctgtaaaataacacccagtttgcaggatgttgtgatgattagctgaggtaaaaatcgtgaaggtgcctagcactgtaccatagcactccattttacttcattttctctcgtttctattctctagagtcttataccaggaataagtagacaatctcgtctcatctaacaactacaaattaaccaacaggcattatttgtaggttttctgcaaagcattagcaattcaaggatgaataagacattgtccaagtcttccaggaatttaccgtctagattcatcctcttccgtatattcattcattcaagcatttattcataattcattcagctttcaacttattgaacatttacataaaaggaactgtgtgggcacaaaggtttaataaaatatggttcttgccttcaaggaaatgcacaaaagatttttagcagaactaaaagtaactgacttaaattattgaatgacatccccaaaggccaacggcacctcccttccccccccaaaaaaggcctagtgaaaaatacattagaataacctcacaaaaataatcaaaattgagttcaaatgtgtatatgcatattttaagcaaagcagaagtaggattttaagaaaacaaaccaagattgctgcaaaagctactctagactaactagaaacaaagagatctcattcaatcaaatgtagattctaattcaataggactctggtgagaactggtaaaccgcatttctgacaagtccaagaaattatgatgccgatggtccaaagactacattctgaatagcaaaggactaaagcaggaaataatatgaattcaaagggactggacccgggcctctatgcacagcactctgacatttataacaccaccatccagaatactgggatgataagtacaaattctaaataatttggtaaagttggtttatcaaaccaagtttagaaagaggcagccaggaaagaaacaaagcacttaaaggcaattaatgacagactctctaaagtgcagtttctctacaaaacattctctcacaactcagaatttctcaaagctgcagataagtagatattgtcaactctttatagtccttccatctcaactgtccacccatccatgaattcccaccacaaacctcactttgaacagagagaaagaagaggcagagagaggagagagagcactaccataacagtccctttgagattgaaagaagtggagtgattagctgccaaagagataaagatgcttcagctgaaaagattagtagagcgttgaagggaaggatgaagctgtagagcagaagaaaaggcatagatagtgcctggagtcagaaaacattctggcttccttcctagtatgtaccctgggaattgcatgagtctctttccctatcagtttcattttcttctctgtatcaagagtgtaaaatatccaactaaggagacagtatgaggaacaaatgtaccaagtattagactattaatatatattaataaattaaatattgaaactgtgataattaaataaaaataatgcccagtactattgacaagggaatggaaagtaactaaataaacatagcaacatatgtgaaagtgcccagaactattccttgcacagatggagacttaaataattttgttaaagaagagaacaattataagcttaaagcaacaattacgaagtttggctctaattcggaaagcatgtccaagcaaaaaaaaaaaaagtcccttaatcctaatatctttaaattgttttttacatacatagaagcaga

SEQ ID NO: 317433 - DNA, 4001 bp, Homo sapiens
taaaggactacatgggccgggtgaggtggctcacgcctttaatcccagcacttcgggaggccaaagtgggcggattatttgagatcaggagttcaagaccagcctggccaacatggtgaaaccccatctattaaaaatacaaaaaaaattagccgggcgggttggtgcatgcctgtagtcccagctactcaggaggctgaggcaggagaatcacttgaacccaggagaaggaggttgcagtgagccgagatcacgccactgcactccagcctgggcgacaaagcaggactctgtctcaaaaaaaaaaaaaaaaaaaaaaaaaaaaaggacaatgtgggctgattccaatattagatatgtaaattacatattaacatttagagttagataacttctacaaaatgacctggaaaatcctggtatcagatcactagtaagtatttccagaatggggtctggagctctgcagatttatcttttctggtagaatcaagatccttcaaacataccagtatacattgtaccacatgacacctgaattttaatcttaagaaaattagtttataaatataatcataagtaaatacatatatcaagaatctttatttcatagcacagcatttgaaagcaacaatttacctattgtgcaaactccaggtgatatatgaggttgatataagctcaactctgaggagggtcaaagttcatctcttttttgcagtctcctttctagtgaaacctctactatttcttctgctaactttttcactgtaaaaagtattccagttctgttcattctaaataacacagagatggagaaggtccaatttctctagtatggtatgagttcgagattatttctaatatggcactactttggatatgggtctgactgatcttattatcctgaatgatatgacatggcttcagcaacaattacaataataccttgaagggagggggtttagggaagaagtgattgagcaaaaatagttaaaatgcagttatacagccaattatttttacaactagaaccagacaatttgctttgctttatgtctaattaggtgaaacaaaaaaattcctgtttccgtattcattctcttcggtcataactcatataggaaatgaccacatcagttccttacttatcgcttccctggaaacaaaagagcattttatacctgatcctgctgttgccagtaaagaaagtggagcaaaaattaaccttcttccatccctcttttccatttggaaaacaatatttttaagggggggaggggaagggaatgatgcattcaatatataggggataatacattccctccgccccagactcactctttcccattctcctcaacatatccacttaaagagcgctcagtacgctgagggccccaagcctgacagagtcaaaaaaagaagcatctctgcccaacctgaacatcacgactctcgatgcctcgcatacaacgaggcagggcgggtcgcccagccccaggggaccgggcggcgtctcccgagcctgcagcccaggccgcgggcggcgccgcagcgctcccggctcccctcctgcagggatcggccacggtccttacccgccagtccgccgccgccgcctccatcgccggcgtggcccttcctccgctgcaggatgaagtatgggttggccctctcggtgatccacagcgcgttggccagcaacacctcctccgggttcacccacatggtcctggctgccgcgggcgggcgcacaatgggcccgtgggtccagtcctgcacccaccaccgcgacaggcgcgcactcctgggcacacgcgcgcccgcccgcccgtccgctaggtgcggcggcggcggcggcaggcgacttcagggggtggcccgcggcgtccgggccacaacaaagccccagcaggcggcccgggaggacggtgaggacgcgggcgcggcaagcagcatcctccccgcggcgtcgccgccccgcgagagcccgcggccgcagacgcccggcctggcactctgcagcccggctcccggcccacggcggcgggaggagcgggaggaggaggaagaggaggaggaagggagcgggaggaggaggaagtggtatagctcagtcccgggatccggctcagcgccaggcagggctaagggccacccgagcggattcggccccgcggtcagggccaagctgggctccggcgctgctgctcccgcggcgccgactggagctccagagcccctcccgtctctacctgctcgagctcccgaagtcgccgcgccttaacgcgccgtgtcggggccgcaggcgccactagggaagcccagctccccgctggaaggacgctccggacactgcgaatgaatgacgacaacgcggctcacttggagcgggtccgggtttgtgcggactcggtaccaccgcgggctccgcgcgccgagctgagcagctgtggctggcttcgggggaaccttcgggggaagctcctggggaccgtgtgccaagcactgggcccgacgcccatcccagcagggaggacgccgccagcctgcgtgggtgcgtgtgtgctgtttgtgtttaaggttgacgctctatgggatagcgccaccccttttcccaggaaaagtgtttcaaggttccagacctggagctcggttagagacccggggtcggaagccaacgcagccaatggtcgtcgatgtttttgtttcctgcatccccagggcaagtcatgcgctaaacttgtcaccgcttgtgacccctcccccctctccattccattgtaattaaagtggcctagctaagtgcattacatcacttctttccttgacctgtagggcgtgagcaatagagaagttggaagcggcccaaaagcttagaccaactaattcacaccacagctgttcctatatcgcatttggggcttcgaaaactgggcatggcagaattttaaaatttatccactcttggtagatggattttttttttaatcagtgaaaccagaaacacacaaaccagggcagctttatccctagacagtttcagtttccccaaatacttcgagcttccagtggtgatcacagcccatctgcctacatatctgatgaccatttttttttcctcccgcccaggagatctggaggatagttcagccaaaaaaaaaaaaaaaaaaaaaaaaaaaaaagttcctcttcccaaatgatgggaatttagcagactctgctttgttgtggatgctgggcaatcctagggacttttccctttccaaatgagcagagattcaaatgaaaccttcttgtgtgggcttcaaaattgtgacttttgtagctccgacttgaattgttgaattccttcaattagtcgaatgagcaaatcaccagccattctaatgagactgccatttcatctgttcgcttcctaccgcttgggctctcaaggaatggaagtttcccttgatgttaccacacagactgatctgcttcttccaggcatcagtggaaacctcatgtatttaacacagactcaaaaaactcatttggcacttttggtcacagtgcagtgccttcagtcacaaaatctgcaaataaaaagcaaacaataagattataagtcatacatatgcaaaaattatattaatatatcatgtaacttttatatttttgaagtgtttccataggtattcttttacttgatataattggtatttttaaaaactctaagtgccttaataccatgttggggtttggaaaatgataccacaaagcatggtgctttggcatgctgagtactttgaactaaaggagattgaaaggcctcagaagcagtttctctctgacctccttctgccctcctgtctcccacctctctttctcccccaaagtgagtcatggaaactaaaggcaggtcatagaaactaaaacccctcttcccaaaggaagctacaaaacctagaaatattaccattcctcactcttctgtgtaagagcagacataaagaata

SEQ ID NO: 317434 - DNA, 4001 bp, Homo sapiens
aatatattttcaaaagttgatgtgaaaaaagtagtttacgtatattattttgaattataaagtaaccaatacaaaaactaaaaattatgattatgactcttccaaaattcagaggagattgtgaatggtgtgggctatttctagaagtcaacggaaaaagaattagcagttcaacttagggctatctcaagaagtcaacaaaaagaattaacagtttaacttattatttaacctacagacctaaaattagaaaaggttaaaagtggttatctttgaagaacagtactgagagtaggacaggtgagacagttgcactttattattcaatcctactacgctatactacttgattttttttttttttttttttttttttgagacagagtctcactctgtcatcaaggctggagtgcagtggcatgatctcggctcactgcatccttccacctcccgggttcaagcgattctgtgcctcagcctccagagtggctgggattacaggcgcccgccaccacgcccggctaatttttgtatttttagtagagacggggtttcaccatcctggccaggctggtcttgaactcctgacctcaggtgatccacccgcctcgacctcccaaagtgctaggactacaggcgtgagccaccgcgcccgaccattttattttcaatcagatgtctttatcatcacatagctgaaaataaaataaccaaataaaacacaatgatcgaaaaagataaaacactaattagcataatcagtgttctttttccactacctcttaaatggttgtacataaaaaggctcacacacaaaaatacacacacatacattcacttacacctcgtgagtggaagaaaactaccgggggaaaaaaaacgtagagatgagagattagatgagggaaacagcagtgcaagcagttgggcttgaaaattcattcattcaacaaatattttgaagcccctattttaagtcagttgtttttccagctggtgggcaaaggataatgaacaagtcagactctgtgccctcaaagaacttagagttttaaacgactcgaatggggaaagaaagtaaaaaatagggcaaaagacgccgattttatcatgaataaaatttcacatttcttcaacaggaaaatgatactaattcatttattttatatatacattctctcaagaggttatttttgtctcaaatagatagaaaccaggacagggatccttgaaaagcagccactgacaatcctcaagtaacttccttcctctgcttcactttctcctactgctcaagggggtgttacactttgacgactgactaaacctcgagggccagaaacaaaccaaagcaaaattctgcctccaaggtgagtaatggaggggcggattctagattctctaacctcctttagccttcctttgaggcagtgacagagcgattactaagcctacggttcccaaacgactcaggtgaacctgatttacaggaaaggcgggctgtagctagggatggagacagtacctatcagcaagcggctccacagctcggttctctatctattctgaagacatgcggggccactcactgctcctgatagtcctctacctcccacagaccccacccactacgacacggaaaactggattacccaaatacctgcctctgagtctggggacgcaggcaagcacaaagacaagggggatggagcttctacacagggccccagcgctgtcgctgtggctgctgctgccgctacggcttagtgcaccagacgctgcatttcaggtgctcctacaaaagaggccactcctggaacgccgggagctcagacgctgccctttgctcgcgagccaagtcagccaaggttaaccttcgcggaacccggcgaggagcgcaagcctggccttccccaaacacagatccgagcttttcaccctctaccctcccctcagcctggccttttcttccgccctcacagccaccgcgacccaacgctgaggaaagaccccgacttgtggtgtccttccccttgcccaaactggccacgaaaggacatatagcgagagagaaagaggtgcggggggacggggggggtcgattgaaaatactgggtgagggaatggaagacgaggagcgtggtatggcaggttaatgggactgagcacaggaagaggaagaaagaattgagggttgaatctgtagaacactcaggctttcagcaaggacacctcattgggtcctttctcactgctatagtacgcgggtggctggacctacatgcttcctgctgtggctgtctcggaacccgtggtcctccgcttcatgtgagtgacgtcgtggcgggtcactcactcggggatcgccgattgcgatcgtaggggtcttccttctctaacttgcctccaggagagaggacctggcctgcgctgctaatgggtagtccgttcgcagcaggaccagccctggcctaaggaaacaggaaagagtttgagacttccttctaaaggagccacgtttgagaaatgggatgcaggcctaagttaagaatgctacagaaaaatatcgatccctaagcgtatttactgttatgtgaatgtgtgtgtcaaaggacttaggtgctttgggggagaggagggtgaagacaggaatttattcattgagcgaatagttattaagcgcccactctattccagacaccgttctaggcattaggtgaacagcagtgaacaaaacagacggaaatctgtgtctacttgtagctcacattttagagaggaaggcacatactaagcaaagtaattagaaacatactgtattttaggtcgtgatagtcctgaagagaaacgtaaagcagggaagaagggtataaagtgacacaggaaggtcttgctgaaaagatgacttttaagtaaagggctgacagaagtgggagatttaaccacgcgaatatcttgggaaagtgcagtcagacagagggaccagccattgcagaggtcatgaagcagaaacgtgctagaatagcaaggaggcctgtagggcagagttgagtgaagggtttagtccttcactggagattaaatcaaggcgagcaggtcatgaagatcttgaggacatctaacttttattctaaatgaaataggactttggagcgttttgagcagtagagtgatgggctctgacttccttttaagagggtcactctttaaggaaaatacacagaggaggacgtggtaggagaaaggagaccaataagaagagttttgcaataatccagaggaagcataatggtggtttgactatgggtggtaagaaatggccagttatattcttgatgcacttaatttggatatgtaagagtattatagatgacagggttaattttatttaattaggctttggaggacacttgaaaaatgaattccagtgtgagtttcagagtggcaaacacaagttaaaatcatggctttgctatgtggtacttgaagggattcagataagtcatgtaattttcctggatctgtctataaaatggaaatcacatctgtcaagattgcaaaggttagggtatattataggtatttaatgacaaggtatgtaatgggtctagtctgcaaatcttaaccaggtaaaagatggccttattgtgaggtaagagggtcatgggaggccaaggcatactcctttttaaattttatggactctgtactggggaggaaagtttttgtgttaatgacgatggtatttagaaatgcatggactggcctctcatagctgtccaccctatagtcattccttatagccatcctttaaaccctccaggaccccctatgtcctcatcagtaaagggaaagcaggctgtctggtaagggaaataggaacttccataaaaaagcaattttagatattctttttataggttttggcaaaggttgataaaagacctagggaattactgctggttgctgcgcttacatattttgagtgtcttcagatgcat

SEQ ID NO: 317435 - DNA, 4001 bp, Homo sapiens
tccttccacctcccgggttcaagcgattctgtgcctcagcctccagagtggctgggattacaggcgcccgccaccacgcccggctaatttttgtatttttagtagagacggggtttcaccatcctggccaggctggtcttgaactcctgacctcaggtgatccacccgcctcgacctcccaaagtgctaggactacaggcgtgagccaccgcgcccgaccattttattttcaatcagatgtctttatcatcacatagctgaaaataaaataaccaaataaaacacaatgatcgaaaaagataaaacactaattagcataatcagtgttctttttccactacctcttaaatggttgtacataaaaaggctcacacacaaaaatacacacacatacattcacttacacctcgtgagtggaagaaaactaccgggggaaaaaaaacgtagagatgagagattagatgagggaaacagcagtgcaagcagttgggcttgaaaattcattcattcaacaaatattttgaagcccctattttaagtcagttgtttttccagctggtgggcaaaggataatgaacaagtcagactctgtgccctcaaagaacttagagttttaaacgactcgaatggggaaagaaagtaaaaaatagggcaaaagacgccgattttatcatgaataaaatttcacatttcttcaacaggaaaatgatactaattcatttattttatatatacattctctcaagaggttatttttgtctcaaatagatagaaaccaggacagggatccttgaaaagcagccactgacaatcctcaagtaacttccttcctctgcttcactttctcctactgctcaagggggtgttacactttgacgactgactaaacctcgagggccagaaacaaaccaaagcaaaattctgcctccaaggtgagtaatggaggggcggattctagattctctaacctcctttagccttcctttgaggcagtgacagagcgattactaagcctacggttcccaaacgactcaggtgaacctgatttacaggaaaggcgggctgtagctagggatggagacagtacctatcagcaagcggctccacagctcggttctctatctattctgaagacatgcggggccactcactgctcctgatagtcctctacctcccacagaccccacccactacgacacggaaaactggattacccaaatacctgcctctgagtctggggacgcaggcaagcacaaagacaagggggatggagcttctacacagggccccagcgctgtcgctgtggctgctgctgccgctacggcttagtgcaccagacgctgcatttcaggtgctcctacaaaagaggccactcctggaacgccgggagctcagacgctgccctttgctcgcgagccaagtcagccaaggttaaccttcgcggaacccggcgaggagcgcaagcctggccttccccaaacacagatccgagcttttcaccctctaccctcccctcagcctggccttttcttccgccctcacagccaccgcgacccaacgctgaggaaagaccccgacttgtggtgtccttccccttgcccaaactggccacgaaaggacatatagcgagagagaaagaggtgcggggggacggggggggtcgattgaaaatactgggtgagggaatggaagacgaggagcgtggtatggcaggttaatgggactgagcacaggaagaggaagaaagaattgagggttgaatctgtagaacactcaggctttcagcaaggacacctcattgggtcctttctcactgctatagtacgcgggtggctggacctacatgcttcctgctgtggctgtctcggaacccgtggtcctccgcttcatgtgagtgacgtcgtggcgggtcactcactcggggatcgccgattgcgatcgtaggggtcttccttctctaacttgcctccaggagagaggacctggcctgcgctgctaatgggtagtccgttcgcagcaggaccagccctggcctaaggaaacaggaaagagtttgagacttccttctaaaggagccacgtttgagaaatgggatgcaggcctaagttaagaatgctacagaaaaatatcgatccctaagcgtatttactgttatgtgaatgtgtgtgtcaaaggacttaggtgctttgggggagaggagggtgaagacaggaatttattcattgagcgaatagttattaagcgcccactctattccagacaccgttctaggcattaggtgaacagcagtgaacaaaacagacggaaatctgtgtctacttgtagctcacattttagagaggaaggcacatactaagcaaagtaattagaaacatactgtattttaggtcgtgatagtcctgaagagaaacgtaaagcagggaagaagggtataaagtgacacaggaaggtcttgctgaaaagatgacttttaagtaaagggctgacagaagtgggagatttaaccacgcgaatatcttgggaaagtgcagtcagacagagggaccagccattgcagaggtcatgaagcagaaacgtgctagaatagcaaggaggcctgtagggcagagttgagtgaagggtttagtccttcactggagattaaatcaaggcgagcaggtcatgaagatcttgaggacatctaacttttattctaaatgaaataggactttggagcgttttgagcagtagagtgatgggctctgacttccttttaagagggtcactctttaaggaaaatacacagaggaggacgtggtaggagaaaggagaccaataagaagagttttgcaataatccagaggaagcataatggtggtttgactatgggtggtaagaaatggccagttatattcttgatgcacttaatttggatatgtaagagtattatagatgacagggttaattttatttaattaggctttggaggacacttgaaaaatgaattccagtgtgagtttcagagtggcaaacacaagttaaaatcatggctttgctatgtggtacttgaagggattcagataagtcatgtaattttcctggatctgtctataaaatggaaatcacatctgtcaagattgcaaaggttagggtatattataggtatttaatgacaaggtatgtaatgggtctagtctgcaaatcttaaccaggtaaaagatggccttattgtgaggtaagagggtcatgggaggccaaggcatactcctttttaaattttatggactctgtactggggaggaaagtttttgtgttaatgacgatggtatttagaaatgcatggactggcctctcatagctgtccaccctatagtcattccttatagccatcctttaaaccctccaggaccccctatgtcctcatcagtaaagggaaagcaggctgtctggtaagggaaataggaacttccataaaaaagcaattttagatattctttttataggttttggcaaaggttgataaaagacctagggaattactgctggttgctgcgcttacatattttgagtgtcttcagatgcattgttctcagtgtatttaattttcttctttaaattctgacttttgacacatatgatttaaatcctagcaggaattttcacctagtgctaaaaggtaccacattgctttacactataataaggacggtctttcagtgtggggtattttatgtatactataatatttttacatatccagtaattagattgtgtagcaaatcagggaaagaagttggaaggcaagaataggaatgaagggaggagaagaaaggaagaaaatgattaaaattactatattccatcaattctgagatacacatttttctcttacttaacatctctgaaatagggatgtatttttaagttgttgacatctttaaatcactgtagatgaattggcagttgtgagatatttgtcattgcccacacttacacccacttagtcataacttaatcttgtc

SEQ ID NO: 317436 - DNA, 4001 bp, Homo sapiens
gaaaatttgtgcataattttggagttcagggaccttctaaacttctgaagtcatgaacacataggctaaaaaaaaacccactgcccagaaatcattatagaaatctggaaaggataaacatacatttttggacacaatttacatttgtctttattactagatttgtataggattatgtcaatccagcataaatttcaatgatcttgaaaatagttttttagtgttccgaagtgagaaacgtaacatcttcacttgtgaattcctagtgaaattccaagaggcagaaagtccccttggagttaagaacaaagctaaagtcctacttcacctattagcagaggagtaacataaagaagactattgaaatccttatatcagtcctatgagaattcatctggcagcaaaatattctcaaacatttctaacagaggtgattccatgatctttcatcattttgtagtttaaaaattgtagctttcctcgttatcaatgagaaatgcctgtggaatattgtccaaaacctttgtgcaacttaccttgatgagttatgataaaaagatgttcatcatggattttatttccttttgtttcactttgcagttcttgtgcattcaaaactttttccaacttgaaatgaaaaataaaaagcctgtctgaaattgcagaacttggtttttatgaactttagtaagaagtagaatatgataatgacaaatgctcctccaaactcaaaattctcagaaaccaatctagtttcttttaaacaatggacgaatctcatcataaagagtgaattgaatttgtgatttttattcttctcagaaaatttctatttggtaggattttatcataataaatcctattaagctctttgagacatcatatcccttttcatgaaatgaatatgatgaaaacttgaaaacttgctgagctgactatgcatttggcattcttttattcccctaaagagcctattctaagaatattttaacattctttatcagttaatccttagaaactcaccgatgaagacatcaaggactaatcattttgcctcttaaaaaaaatagaagacaaacaggctgaaacttggcccagaataatctcccaatacctcattcattaacatccctctttatatgttaatgattttaagaaaattctctgtgtgccttttacatttcgacttcatgataagagatttaaaggagaactttttcaagatacatttgcagttatctaggctgacatttattaaccatgtcttatctatacaagttgcacaatgcctgtgaattatccacagtgtatcttatcatgtatacgcctcccagattctggattctctgctcttacttccactggagatatgaattttatcctataagtctcttgaattattctaacaaaagttgaaaacgtaaaagtgtttatgaataaaaatatccttaggtccagaaaacgattggtgactttccctaattccaagaaataaaatcataaaaagtcacttggcagaattgagtgcctaacaatggacaccaaaccctgtaaggaccctgccacttacatgcaggtagttcccatagataagacctcctttgctggctctattcacaccagtttgtgatttgtcttcttcgctgccttctacggggagttttttaaaagtatatctgcaaatttaataaatcaagagggaaaaatagtgctttagaaaacacagttaactaatgatatgggtgattaaaattctcattgcaaattttctttagagtagattgttagacaaaggaataaaggtgacagttttcaatgctccttaaattcagaaattaaaatgctcacacctgatacttctaaaagccaaaacccacttagaataaaggtaaatactcacccaaagttgtttcctaaaaatgggcacccactcatggtgaaaaggcactgtctgagaagcacggaggtttgactctaggcagatgctatcattgaccttcccagatgttctacagctgccttttatgtagcctgcttaccctgcatcagccaatcagcatgcttcttgtactcttagctaacttctcatttccattggtacagaactgaacctctgtaaactttagagtggatttatgttgggcacagttcatttgctaagagtgagtgatctgccaaattgagttgtatgacttgccaagttctgcttttatattcaaagtaacaaacatccaatgaatcaacagaggccaagttaaaaaaattacatttattcaatcccaagaaaacatttggcatagtattaggatacataagatgatgagcttgtaaaaaacaaatatgtattctctcaaatttgaatattcttacagcttctagaccaaaaactgaaatttaacacctctagggaaattaactgtataataaagtctgggtacatgctcaaagcccacttccattcaatcatcagagttcttctgacctaaatatcatgtaataatcagcagcagttaagctctcaacacattgtattggaatttaaatgaacattatcagtttactattcatctgtggcataccaatgacagggtagctagcagtcatccacattagcatacattgcctatatagaattttaaaacagtagttcaagaccagcctggccaacgtagcgaaactctatctctactaaaactacaaaaaaattagccaggcaaggtggtgcgtgcctgtagtcccagctactagggaggctgaggcaggagactcgcttgaacccaggaggtggaggttgcagtgagccaagattgtgccatggcactccagcttgggcaacagagtgagactttgtctcaaaacaaaaacaaaacaacaacaacaacaacaacaagaaccaataatagccatgtgcccataattctatacagtgtcagtgataaaaatattcttccttgaaacatcatttattaatctaagctctaaacaattgccccaagaacaattaagccaggatagaagcttcatggccttatccttagcatgccactgctactcactaagaactataggcagaaacagcacttagcctttatttaatcatctaccatgatggaattttgtctaattagccaaagtcattggaagtcagaaacctgatttctagtcttggctctacgactaccttgtaatatgagaaaaactgactgaatttctgtacatatcaatttcctcaccaaaatagaaagtgtttaagctgattataatcttcaagatcctgacccaggttaaaatcttgattttattactgaataataaattatatatctagtacagaaagataaacaacatgcaaatgccatgttataattgaacttgaaaatcatcaaaactatatgctatacctgtcacatttcccttgagtttttatgaatgatcctggaaattgcctacacactggatagggaccttacctgagagagcggtggagtcactgttgcttttcctggtgtcctggcttagagtgtttggaagcagagaacagttaacagcccctctttctctacatagttgttcaactgggtacgtgtttacagagaataatgctaaataatttattccactctctttaagccttttgagctgagaagtttccttcacttattggtcaacatactagtaaaacaaataaggaaacaaattttcctatgaattggaaaaaatagatattttagaaacaaaaaattttttaaagaaatgacatttcactcttaagtagtagtatcaattcaatatttgcttttacatcacaagaactgatcattgaaagacttgactttggggcatcagagaaactgcaagctaatctaaaaataacttattttcttcatccaggagagtaactacagtggaaggcccccatacacacacatcctcattattttttgcaatagcattatcaaatgtattactagttatattctggtcatcatttgccaatactt

SEQ ID NO: 317437 - DNA, 4001 bp, Homo sapiens
acatggtgatttgtctaggggtaagaatctgggaggggtggggtggaagctaaggagctggaacagctggggcagggaggagaggcaccaacctggtcaacctggaggaacctgtaggcagaggtgtggctggaggcccaaggccctgtctcccagcactctggatacccggagaaaggcagagaggccagtaattcttccccaagcgtaaaagtaggccagacactgctcacaacccttccaacctccctatcaagggtcaacttaaggaagcaaaggttaccattatctcagctttattttccacggtttggtaaaacatagctgctgcccttgagtaactagctgctgagaaaacatgattatcttgataaagaataaagtaggttgaaaatgctagagcatacattaatattctatatcctttcctagttgggaagatgtgaaaattctagttggacctatgtggggcaaaggtattgccaactagagtaaagcactgactgcatgagtttacacttggcctatacagttccacagaccagaatgtacacacccttgtgagaagagtcaagatcattaacataaacacaccacagtaagcatctgcgttggcaagagtgtaatatatggatcagattaactggagtatggggaaagtgtaagtcttccgtaaacattgaaaatgtaactaaactaaaaaatactttcaaatacataatgtgaaagttacccatacttctattttccccttagaaataaatcttaatatcccttactccaggtgattattgcagagtaagcagctaccagtgtcacgacctaaactgttaaatcccaaactttatttgggagatccgctggtttgtttcttcccagctctttagcagagaataatctagaagtgagtaaattctcagaatttcccaagaggaaaatgagcattcactggaaaaatacaaggaatacgcgcaaaacttataactattttggataatcttcaaacccacttagccaccagccatcctgttgttccaagttaacattaagatcaatctttcgaatcaaatattccagtttccaaagaatagcaatggatgagattgtttccaaacctggtacacaccaccatgttacacgtccacgggaaaaataaaataaaataaaatccacaagaaatttaggattaaagaaaattaggaaagtgtacactcccaggtcaaggccctagtttttccaagaagtacatacattggccgggcacctgttttcaatattcaaacacaacttcccggggcgaggtgggcggggtattgggggggtggggaagagaacgtgaacttcactgggtgagtcacgtgcaactgcggaacatcttggccgatactgccaaattttttttttaatactttaagttctaggatacatgtgcacaacgtgcaggtttgttacatatgtatacatgtgccatgttggtgtgctgcacccattaacttgtcatttacattaggtatatctatctcgacactgccaaatttcaatcaagatcgcgccgccgcccaacccgaaaggaggcatcagccctgctcgccgctgggacgtgaccccaacgctgaacttgccgcagggcggcctcaggcctggaacttcaagaaaaaggggcgggtgttccttaggagaggtcagtgcgggagttggagaagtggagaatctactgccggcaggaaggcgaggctgcgccactgcgcgcacctgtccctccttcccggaccgaagaggggacccagagacggcgcacccgcgctcactgcggcacggaggggagaaaatccttccccgttcctcgaggggcgtgtggaagccgcctcttgccgcgctcatccccctccccacccgtcctcgcccggagtatcgcactcccggggccgccccagcccgcccgcggcgcccttacctggctgaagcgcggctgctgggcggacctggggagactgcgaggtgcagtctgcgccgcggagtccggagcctagcgccccagagtccagagcaaagcgccccgccccgccctctgatctccccgtcccgcccccaatcaccccgccccgccccgattgctggccccgtggacgccctaccccgcctctgatcctgcaggcccgcccagtcctcgatcgccccgccccggtcgcttgggccctgggtggcaggtttgcgcagccctgcggcgatttcaaggcaagtgaccggaatgggtcggaagcgcgtcccggtgagtttcagggagcgtcccttaggtttccgggggcggcgttgaacctccctagccccagtcttcccatcccaggagacccgcccctagtggctcgaacgcccctagccaggagagccccgagtagtgccacttgtggaagactacgtgcctgtcggaattaggaaccgcacctccccttccgctaagcggtgggaggccaggcgggtgacgcggagcagtggagccatgcagcctgttttaccaaaagagtaagtggttttcctgtgaaacccgagggagcagtgcatatctgatacacttagagggtcacgtgcactattaatgtgttaacattaaactcactgaagagtagaaaacacatgtaagacttaactgtgtgccaggcactgttctaggtacttcacatgtactaaaagttctctgaagcgtatattatcagaatcccccttttcacatacggtgcaagtgaggcagagagaagctaaataacttgcctaatgtcacccaactagtaaattgagaagctgggttgagaagctgggcttcaaatccaggtcttcctcctctggagtctccactgttattcacggctatcctgaatcagcaaaatctgtgtgcatcctataccaggaactgttcccatgcctggggaagatgaggcaaggactctgccattaggaaacttttattctactgtaggagaaagacaataagtgattgtcgactaaaatttaaaaatcaagctgttaaagaatgaaagttagttttattcagaagtcttactgaggactagagatggaggcctacagccctggaggagtcttttagagagattcaagcagatccctccaacacagaacttcccttctcaatttagaaacagttggtgaagattcagtatgtgtaaaagcacatcacagtttgggcttaagagtacatctgtttatagattacagaagcataatcactaacctcatcagactttatcttaggtgcagtaaaaggcaagggctcaggcaagagacgtgggggatcctgtgttctatctcgttttgtcttcaaagcatctttccgccagctgcaggtggtcacagagtcaggggctgtgtgaaattatgctgacaagcagaaatgagcaagcatggcttcttaacgtttgttacttgtctcacatgatcaacaggcaagcaaaaaattaaaccacttcgtaagtgaggtgtcttgactaaaataaagcagggtgatggaattgagagtgaaagggagagggaggctactttagatatgatgttactggaggcttctctggggtaacagtggagctgagacctgaatgataggacagacggccaacccaaggctgaagctaagggaatggcaagtgctttgatacttatcacacctcatgcttgcttgggacttaaaagtagtgccttcctatatcatttctcctttgatcactgtaataaccctgagaagtctaacaagattccatttaatacagtggtccccaacctttttggcaccagggactggttttatggaagataatttttccatggacaggtgtcaggaagagatggtttgaggatgaaactgttccacctcagatcatcaggcattagattctcgtaacgcgtacaccacctagatccctcgaatgcacagttcacactagggtttgcactcctgagagaatctaaggccaaggctgatctgacaggaggcg

SEQ ID NO: 317438 - DNA, 4001 bp, Homo sapiens
gcaaataattaggaactaattggcatgtgtgtgtgtgtgtgtgtgtgtgtaattaagtaaaagaacatttaaacatcatgagtttttcattactttaaggtggattgcctgtcagggtctatacacctgtcagaaaggacacaataaccagtgtcattttagaattgtagtctttggaaatccttgacttatttgattttcattccatttgttgcactgtgtccttgaatttaactgtgttttttcttgtaagatttgtgtttttcatagtggaatattataaacattagcaacttctgaagagtaattttatttttttatttttcttatgatatttaaatataaaatatttgtgtaatatatttaaatattaaatattttgtatgatatttaaaaatctcaaaacttcaccttgatactaaaataaaagtaaattatagaagtcctgaaataaatatatcaaaattctattttgtatgatatatactcatcgcttatatatggcctcagtagaactatagaaaaagcatatgatttaaaactgtacagaaatggttttagatcttttagttcaattcatgacctgtgtgcactaataaaaggtcttaatctttcttttccatctatgaattaaagttaatataactcaatttataaactgctcatagtgttataattactgaataagaaattatatattatgtgcttggcaattattaaagaaaggactaaacagcttcttttttccttttttctaaagacctagctagaacatggaaaaacggaatgattgattgcattttatttttagaacacagcaacaaaaacgtattcaatatttttgtaaaacaagatcaagctctattttattacctgtacaaatatgcctttctcatattaagttaatagtacttttcaaatttattaaaaactgaaaatgcttggaatattatttatgcatatatttatctaaaatataaacatatatttataatttagttttctaacctaagaagagtatattttctcattccttagtgcaacacctgtgaatatggatttggacgagtaacatttcaaaacattattttcatgaacttaaatagtgtttttgaagcaagtaaactttcataaaaagtgaggtagtcactttttaagaaaaataataaaatcaattcaaaataatgcttaaatgattaaattttttcagacatattacatgttacttctaacaactactgtggcttttgcttactattttctatagaaactaatcaaactctatgataatttgtatatacaatgaagtacacgaagacaaaaacctggagacattttacatgtaggaaaataggttgagcatttgtaattttacctgtggacaatggtcaatgacagcataaaattcacagaccaatgacagaacctcattattatctaccatttaattaatttaaattgagtatgagagatgcattgaacatcttctattaaaacaatgcataaagtatgcatcctgttcaccacaaaattaaggtaaaagtcagaaatgtatttcagaacagtcgtgttagaatttaatcaagcaatcaataatatttggggcagagaagaaacacttaaacaaacaaacaaataaataaataaataaactcaccttatccagaatacatatctgtttccttgtttgagcatcaaatatttcaatctcaaagtgagtcgtttttgaatgtttgactgctggagttggtcttagagggcccgctgagagtacaagttttgacaaaaagtgaaaatttctcatatcatccttcagtatgaaccgtgtagctctttgggaaagtaatgctctcttgcgttccgaagcgagggacttgtgccttttgaacattgtgtgaactaagaggagggtctgtcatgtcaaaagtagaaaattgcaagtgtgttccttttgcatcagttaaatactgctggagaacctttgaaaggtcaaatggtatgccattccaagagttcagttttatttagcaggcttgaaaacagtgactgatcttatttctatatataacacgctattgtgatttgctgtgtagagtattactttaccagcaattgaatgatttcttgctttctccttttatctctgctttgtaatatgactactcttatctgaaattccaaagcaagaatagacagaacattttcatcatctctgagttctggatgcactgatcttcaaacacacacacacatttgcattgagatgtatttaacattagcaaagtgctatcttaaagttaaatttttaaaagtcctagtacattactatgtaacatttaaaaaatcctgtctaaggtaaagagaagtggcatatatatgtttatatatgttttatatataaatatatgtgcatgtgcatgtaaagcattctaaagtgaaaaatttatttttgtcagtactaattacaaatcccaacgaacttaaaataactgttacacaatataaaatgatgaattcttcacttcatataaacattgaaaagatagcaaactatgagattagaatttgatagagaacaattttgtaacctggggaaaaagaagtaaacattattttaacattgtatatctttggaaatctgttgaactgatatacaaaatctgtagtcagcatcacattttccacaacactatgttatagaaaatacagatagcctcagaatgaaaaatgaaatctgaaaaacatcctggcaaaagagcttttagaaaaactcctagtcctctgagatatgtaaatctgatgaagaaacaactgaaaaaaaaatccaaaacatattatcactgattcaaaatgatattaaaggaaaatattctggaatgtgattttcaatgaaaacatacaaataaaatgacacaaaatatataggggaggaaacctgttatctacctgaggctaatctttacttttataaacaactaaaataatgtattcatttttaattttattatacattatgccctagagattcactttacactcttcagttattatgttgacacttaatattttatattacattacattcaatattttatattttcaaaaatataaatgatagggatatgtgtctttttacacgtatgtgtgggcacacattatgcaactttatcatctggttgttcagcacttcaaacttggaatcatctttaacttctccatttctcccacacctcacatctaatccatcagagatccactacacaatctgttcacagttacaatccaagcatgaatctcacctgtattgcatatccaaactgctcttcctaccccaacactagtcaatcaatagtctatttttaaaacagtaggtggagtgacctggttctatattaagtgggtaacttaatctgctcaacacactgcaggggctttctattttatgttaaaaaaaaaaaaaaagccaaagatatttgcaaaggtttgcaaagttctgcatcacccagcaccctatgacatctctctgaccatatcccctaacctatttacagcatttagaacagtttctaatatggactggtgatccataaacagtattaaataaattaattaatgaccaaaaagtataatttgaatgtgtaacagaatgatattgtgctaagttattgcattatattgaaatgacctaaacactattcatataatgtttctccagattttttttttttttatttaaaaaaaggaatagttggctgggtgcagtgggtcacgcctgtaatcccagccctttgggaggccgaggtgggcacatcacaagtcaggagttcgagaccaacctggccaacatagtgaaaccccgtctctactaaaaatacaaaaattcgctgggtgtggtggcgagcgcctgcagtcccagctactcggaaggctgaggcagaagaatcacttgaactcaggaggtggaggttgctgagagccaagatcgcaccactccattccag

SEQ ID NO: 317439 - DNA, 4001 bp, Homo sapiens
ccgccgggttgtcaacaacagtctgcgctggatcaaggctgcctaggaggagaacagttcagtgcgctatttttaacctgtgtaggcatcgtctgtgctgccaaaaagaaatgcttgcctggtgtggagataaccggggtggagatgacccccagtgcatctcgccacatgtgctgctgtttccttcgaataatattccacaatgtggagtttgggtttttttaatttttttatttttttttcgttttccaacagggcactaaagagttatttttgatacaaaaagcaagacttcacatttggtgcagattgcatgcatttctacactacttactattttttaaattgttgaaaaaatgtacactgataatctatttcagctgtgcagacaatatgaaaaaaatgggtttaaaattacaatacattgtacagtcaactaagagtacatacctcaaatatgttttgtatctcccctgaaaaacggattaaaaatgttaagctattttgtcccttttcataaaatttgataccagtaattagtaaggcatgctttagggtataaaaatctctccttagcgaatcaaatgagttttctttgatgtaaaccggcttgggtgagtgaacactatttcaatctagttacaatggctctttgcacaatgcagggaagaaaagaaccatggaaaattttccaacttttgaacgatttattgcattattactttttcttaaatgtgttcctgcccaatatcagactgttagtcacactgtctgtacggtgattggaaaagaatgaatatattctttattattaaagtttaatttattttttctcatttccagattaaattagctaaagaatgctaagttatatgtaaattatactgcacattacaaatgtaagaggattttatttttattagtaatcttgcccacatctcaagactgtattagaagaaacaaaatataactatgtatgtctaataaaaaataacctactgtcttaagagtagaaatgggtaggtttaggagagtgaagtaaagttacaggagtcatgattccactgggagcatcctcaggccaaaaacagtgtaaaaatgttcaacagatagacgcgaatgaccaagccctagtggattacattgtgggaaactaggaagtgttaaggtataaacttaatttactaggttgcctgggagaaagacaatggaacctttccgtggcaggcttttgtgtgaatcagacagaggcaaacagcaggactgcttgggtcctgagatgatctggggtaataagccacactttcttgtgagggaaagatgggtttcttcaccaacagctcctgttctccttgtaccggttctagccacagacacaatgtctgtgagcaccttcattcaactaaaagggagccccagagactggagtttcaagtttacacaagtttgtacaaacgcttgggccacgtgcagaatcataaacctcacgtatagcaggtgaggcttcggaattctccacgtgtcagtgcctgtgcctggggcaccaatgtgcccaccggtggctttctatctctcatctggaatactgcatgatgatctaatatctcaaaatcagaatcagcagatggaacgccaaagtcagaaaacagacatgtcaccttgaggggaaaatcacgacacctacaagttagtaacgtgagcattgccttattttactaggacagttacccaccttgtctagtgaactcgtctgcttctctgtgaaccaaatccttcactctgttgccgtaaagcagccgcgaggaatcatgatcaaaagctttcaatgtctcgctggaactgtaggacttctgtgtgggtacccggcactcctcattgtctgcggaggaatttgtgtagcgccgttccttctctcgtctgctcttggtcagggagcagtaaggcctgcgttctttcacatccatacttcattccttctgtgtgcacatcagtcctgctggtgacaacttaggctcagggttcaagtctcattggcctctctgtgaagatacaaggtttgcatgaggtcagcatgacgttcacctaaaaactggctactctctacccttctcaatctgggatggtaggaaacaatagtattgcttatctaggaaacttgctttcaacaagaaattagtatttctgaaatcagtgtaaaatacattgtatcaccaagaggtgaagcacgctttctgctggtgagtgctatgagtgtttattgaagctactgtatctgattttccccattaatacaaaaaaaaaattgtaagctcacgctgaaatttcactacagaagccagctaaaaattggcttcaatagtttgttaaattttccacaatggaaaagttagaatggctttttctctttatagcatttctccattcaaaataaattccctttcattttcttataaacgtacactatttttttctttttcaatgtattctaaagagcaggaacaaattgggaaattcttgccactgaaactttgtcaaatgcattgaacttttttttttttttttttaatatatcttacaaagactctttcttcagagggcacaattttcatgttttaagaactcaaatgtcttgaactgtggaaaaagctggtcctcctccccataccattctgcttaaaatggattttcctctctagcaaatgaatttaatcagcgcaaatcgtgatatttaaggtaattcaaggggctaatttgatggggggagtttcctgcaactgcacgaataagcgaggcaaatggtgttgctctgcttaaaaactctctatttcctgaatttgctgaactgacagtggaaagggtgggaggaaagggtctgccggcaaaagactggggccttcaagagggagagtggcccggggcgaatccgcatttcaaatggttctcctttatctttattccttctcatgttgtctctccttttaatctgaaggaccccgaaggctttatcttcagcccttcgtgttttcctcccaccccactaaaatcactttttggtaaattcactttttctttgagtgattccatagtcaacttgaaatcaatggttcccaactggcctcaggccttctccttggttcctgtagtatcctttggccgtgaccgctgttgagatagtagtttcttcacctccaaaaaaagtgagtccctctctcaaagaatcagtgtctctggtctcagtcttggtctgtctctgtctctgtctgtctctgtctctgactgtctctctctttctcccccactctctcgagcatgcactgtcagtatacacatcatacagctcattaatgtgcttccaacttggagccttgtggctgactctctcccatgtcaactcagcttatcctggagttgtcaagaattcttgatcctttctgttgtaacgttacaaatgtacccctcactttccaagttttgccttccatcagctacaagaagagtggcaagactccctgcgctggaataatcacagagttccacagcccagacctgggaaggtttggagtgttcctccctgctatgtcttcaaccaaattataccctcctctctccatgttgccaatgaagggttcccttgtggggttccatatttctctgcttccaaataccgatatggctaccaaatactgagctgttcaaagtagttgctaatattttagtttagtcttggaatatatcttgatttctctacctttgtcttcttttccatgaatttggtttttattttaaaaaacgatttttcactgacccctctgattcattactccattattacatttacaaattcttccaatagctcttaagagaaactgaatttctcatattgtacctttcctttcaaacttaaattgaaataataaacaatttcaaggtatggtgacagactatttttataccaaaggattaaaacaacaacacaccaattcactctttttattccaaca

SEQ ID NO: 317440 - DNA, 4001 bp, Homo sapiens
cacacatacaaacatgtaaaagaacataactccccttagtatttcaactttccattaaaatgcaaatgtaatgatttcattagccaggcaacaatacccacagtatcacaccaaaccaaaccaatgtcttttctctgtgaatcccaacttcccttaagatacaatcttattcctatgatggatcatttgttgatgaatatctttgaatttgggtttcccattataatccctgactgaaggggaaaaagcacaatgtgtgatttgagatattaaattcatgaatgtattccactccctagacacgtaaatatataaatatttcactaaattttatgcactaaattttaccgctggaaaataagccttttctcaattcttaaacattagatgaagaagggagaactccctcaatgtaattaaaagtatatcatgaggggaataaccagcaaataacacttatatttcattttcggcctttccaggagtctatccaggccacacttcattatgtcataggtagaaaactctccatacaaaccctattagcttaataaaactagacaagcagtcccagtgaaaagattcagcaagatgcgagtgaggtgtgtgtgtgtgtgtgtgtgtgtatgtgtatgagagagagagaagaaagagtagagaggagacacagagagaaaggcagagagatgaaagaccaaagagagaagccaaagagaaatttggatgggactgttataaatctgctcttcacttctttgctgggattgggtttcatttctttaggcgcccctgaccttgcagtcttgcaactccaacgctgcgctccccaccccctcccgccccctccccgggcctgcgcctgcctttgtgtctgcctgtcacttaccaaggaaccaaacgaagctgattcgggagaagcacaaagccgggacacagatttgtccataaattctcttacatacattccccaggctggaaggctcagcccagcgctgacttatgtaccttgagaaaagtgagttctggtcttgtttggggaaccagagaaactattctttcctctttcactcagcgccgctaacaaaacgcgcggacttaaggaaaaaaaaaacccactcagtgtactccaattccactccctgtgacattcacttcgtacagccccctaaagggggataagaaggtaggaggaggcagacacaaacccagacccagaccctacagctgataaaagggtcgaaaaacaccctatcagtgttctctctgaggttgttcaggataaacgggagactcgtttcacttacacgaaagaaacaggggaagaggattaaagggaaaagtagtgcccccaaagctgaactattttagaaaggaaagcaaatttaaaaatcacttttctgaggattaaaaaaggccgggaaaccggctcgtcggaggcacaaaggtaagttttctgggagatgaggggacgagcattaggaggagagaagagaacacagaactacaggtttaaaaggggtagagggaattaaaactatatttgtcagccatgttgaagaggctccagtaatttgtgaagcttccctcttccctcttggtatttgtgggtgacactacagggtttgctccccagtccctggaagcccgagaaaaagcgaaggggagaagaaagggagagtttcgcggcataagagaagcgctctgacctcgttctcgtccctcagccttgcagcaatccagcagttgcagtcgggtctcctttctaacaaatcctaaagggcagccatcttgcttccttctgcttctctacgaaagcagcctagcctccgcatcaatattcataaggcagtttgacgtctgttctcatcactcagcggggccggcgtctcggggcggccgcgccgagggggcggacgtgacttgcatgcgagcgggacccgggcgcgcggcgctcgcgaggaggcggcggcggccgcccaagctctcgccgctgccactgccgctaccgccggctctcctcctccgcccgggcctcctcctgctccgccccggcctcctcccgctccgccccggcctgcgccgccgccctggggccctcagccccggctcccagggaattagccccccgcaccgggcgtccagcacaaaggccggcggcacctggggccgtacagcggggcgcgcagtggagacctgggctgccctcacgccgtgcagtggcgcggggggagtggtgcgcccggaccagcgcggagtaggggccagggctggcgagcgcggggaagggtgcagccctcgggaaccccggggacctcggcgggtctccacccctgggagaagaagcagagcaagcgcgaaggttgggggcgaggtgggaggttgggatggcacgggtgcctggacaaagacgtgacatctaagatttccctttgaaactttttgctggtctgcactccaccaccacttcgaggtcccgcgcacacgcccccgcgcgcacccacctcctccggagtgtacccgcacgtgccctcgctctggcccccgcctccacccactggcacctctccccgcaccacacctccgcttgcgcccaccttaccctcagaggcccgcgtctctatctccctttagatcccgttgcccgcgctctcctttcccttttctgtcgctttaatctcattcagcagaagcgctcccctgtttcaccgagggcatgcccttagtgctttaggggcctgtatttttaaagacccgacaaactgggaaattgaccgagttctgtttctccccgccccggcccaccttctgtttactttagccacgtgggctgagtagaagggggcgtctcacagattgaaataggtttctcactagtgaccccctacttctcgctaggaggaaataaacctgcactttcaaatgcttaagttgcctctcgtaagagcccttactttgaagtagtttccccccgtacaattaagtaatgaagaaaccgaccgatacagagctaattccgaatgacggatgcttgattttccctgacattcggagctctgtaactatgctcttcctttgaccggagtttttctctattgccgagtagtgttacttcccccttctaatgctcctttttctaatcatcaactttttatttgaagatgagatgaagaacaaagcccatatgagtcatagtaagtatcatattacgtcagatagtcgtttttgaaatattcccttcatcttttacatgttcttacatgactgacgttcaaattttaagtgggtattttggtcacatcttttatgggatcactgcatggtgatcacagtacccttaagtcaatactagttatattgtgtaaccacactttttttggtctgtaattttttttaaaagcgaagccctaattttacgaaatcggaatatttcctctttgaagagtgtgaaaaagggaactccttgcaagtgtcgcattgttgctaagaagaatgtttagtgggtccaatcaaactttgtttattccattttgaaacaaagttgactcagatttcagattttgcacaaactaaggaaatagtacattttcccttaaacatttcaggtgggaatgacattccatgttttctagctgtacactaaagcgtcacttaggtcttggaaattgttaatgcactttaaaatctaagctgtttgaaagttctttgtgatctttatttctttctttcttttctttccttttctttctttcttgagacagcctctctctgtcacccaggctggagtgcagtggcgcgatctcggctcactgcaacctcggccttccgggttcaagcgattcttctgcctcagcctccggagtagctgggactacaggcgtgcgccaccacgcccagctattttttgtatttttaatagagacggggtttcaccatattggccaggctggtctggaactcctgacctcccagagtgctgggattacaggcgtgagccaccgcgc

SEQ ID NO: 317441 - DNA, 4001 bp, Homo sapiens
tccaacgctgcgctccccaccccctcccgccccctccccgggcctgcgcctgcctttgtgtctgcctgtcacttaccaaggaaccaaacgaagctgattcgggagaagcacaaagccgggacacagatttgtccataaattctcttacatacattccccaggctggaaggctcagcccagcgctgacttatgtaccttgagaaaagtgagttctggtcttgtttggggaaccagagaaactattctttcctctttcactcagcgccgctaacaaaacgcgcggacttaaggaaaaaaaaaacccactcagtgtactccaattccactccctgtgacattcacttcgtacagccccctaaagggggataagaaggtaggaggaggcagacacaaacccagacccagaccctacagctgataaaagggtcgaaaaacaccctatcagtgttctctctgaggttgttcaggataaacgggagactcgtttcacttacacgaaagaaacaggggaagaggattaaagggaaaagtagtgcccccaaagctgaactattttagaaaggaaagcaaatttaaaaatcacttttctgaggattaaaaaaggccgggaaaccggctcgtcggaggcacaaaggtaagttttctgggagatgaggggacgagcattaggaggagagaagagaacacagaactacaggtttaaaaggggtagagggaattaaaactatatttgtcagccatgttgaagaggctccagtaatttgtgaagcttccctcttccctcttggtatttgtgggtgacactacagggtttgctccccagtccctggaagcccgagaaaaagcgaaggggagaagaaagggagagtttcgcggcataagagaagcgctctgacctcgttctcgtccctcagccttgcagcaatccagcagttgcagtcgggtctcctttctaacaaatcctaaagggcagccatcttgcttccttctgcttctctacgaaagcagcctagcctccgcatcaatattcataaggcagtttgacgtctgttctcatcactcagcggggccggcgtctcggggcggccgcgccgagggggcggacgtgacttgcatgcgagcgggacccgggcgcgcggcgctcgcgaggaggcggcggcggccgcccaagctctcgccgctgccactgccgctaccgccggctctcctcctccgcccgggcctcctcctgctccgccccggcctcctcccgctccgccccggcctgcgccgccgccctggggccctcagccccggctcccagggaattagccccccgcaccgggcgtccagcacaaaggccggcggcacctggggccgtacagcggggcgcgcagtggagacctgggctgccctcacgccgtgcagtggcgcggggggagtggtgcgcccggaccagcgcggagtaggggccagggctggcgagcgcggggaagggtgcagccctcgggaaccccggggacctcggcgggtctccacccctgggagaagaagcagagcaagcgcgaaggttgggggcgaggtgggaggttgggatggcacgggtgcctggacaaagacgtgacatctaagatttccctttgaaactttttgctggtctgcactccaccaccacttcgaggtcccgcgcacacgcccccgcgcgcacccacctcctccggagtgtacccgcacgtgccctcgctctggcccccgcctccacccactggcacctctccccgcaccacacctccgcttgcgcccaccttaccctcagaggcccgcgtctctatctccctttagatcccgttgcccgcgctctcctttcccttttctgtcgctttaatctcattcagcagaagcgctcccctgtttcaccgagggcatgcccttagtgctttaggggcctgtatttttaaagacccgacaaactgggaaattgaccgagttctgtttctccccgccccggcccaccttctgtttactttagccacgtgggctgagtagaagggggcgtctcacagattgaaataggtttctcactagtgaccccctacttctcgctaggaggaaataaacctgcactttcaaatgcttaagttgcctctcgtaagagcccttactttgaagtagtttccccccgtacaattaagtaatgaagaaaccgaccgatacagagctaattccgaatgacggatgcttgattttccctgacattcggagctctgtaactatgctcttcctttgaccggagtttttctctattgccgagtagtgttacttcccccttctaatgctcctttttctaatcatcaactttttatttgaagatgagatgaagaacaaagcccatatgagtcatagtaagtatcatattacgtcagatagtcgtttttgaaatattcccttcatcttttacatgttcttacatgactgacgttcaaattttaagtgggtattttggtcacatcttttatgggatcactgcatggtgatcacagtacccttaagtcaatactagttatattgtgtaaccacactttttttggtctgtaattttttttaaaagcgaagccctaattttacgaaatcggaatatttcctctttgaagagtgtgaaaaagggaactccttgcaagtgtcgcattgttgctaagaagaatgtttagtgggtccaatcaaactttgtttattccattttgaaacaaagttgactcagatttcagattttgcacaaactaaggaaatagtacattttcccttaaacatttcaggtgggaatgacattccatgttttctagctgtacactaaagcgtcacttaggtcttggaaattgttaatgcactttaaaatctaagctgtttgaaagttctttgtgatctttatttctttctttcttttctttccttttctttctttcttgagacagcctctctctgtcacccaggctggagtgcagtggcgcgatctcggctcactgcaacctcggccttccgggttcaagcgattcttctgcctcagcctccggagtagctgggactacaggcgtgcgccaccacgcccagctattttttgtatttttaatagagacggggtttcaccatattggccaggctggtctggaactcctgacctcccagagtgctgggattacaggcgtgagccaccgcgcccggcttgtgatgtatttttcaagtccaggaaataaagttctctcaagaccacaacatacatttatacagtgcacagtattgcagagttgttgaaacatgggctttggagttttacagagctgagtgactcttaactctatcttttccagtgtgaccttgtgcattttacttaactctctcggtatcggtttctttcaatctgttcaacaacctgtaagacagcagagttgtggtgagtttttaataagagcactaggtaagtgcccaggtagttactactactacagtaacaaaccatttacttctaggagttattttgtttctgactatagaagtatataattatatatcttcttacatttaataatatgtggaaaatattatattagcatgtgtttaatataaaagtatccgtaggttcctttagttataactgggaaatgatctttcaggtcacctccctctcatttcttctttgaaaactgctctctgttgtaacagggtgttcttacctatttggaatcatgtttgggttgcagttggttttacaacaggccctgaacattttcttgccaacttctttctctgcacctccactctacccttaaccatcatgactttttaaaagttaaaataaaatacattactcctcttggctattgtgatttttcaacagcaaaaggaagtaaaattctgcaggccttcacgtataaaatattttagttagattttttttttgatttgaaaaacttcctcctgctatttctgggaaagaaaggatatagtttgcaaatcagttgtttactgaa

SEQ ID NO: 317442 - DNA, 4001 bp, Homo sapiens
cacttgggccttttcctatctgaaatgatatccagaatttatcctcgataaaaagggccccttgtaattccattcttctgtcagcaccagaaaattgcttagtacagcatttaatacatagcaggtctacagatgcttagtgaatgaatgcagagaatagctgcagtgtggagttctggagatcagagctattttgagagatatgaaggcctaatagccatatcttactcaattttcaagctggttcaaatttttctaaaataaggtaggatatatatgctcagttttgatttattatatctaacaaaatagctaggagatctttctctaacacataggacagtgcctggcacaaaagcagcaaaataaacctttaacaagtgaacaactattaaatcttattactccttcacttactccttcatggctgtcaagagaatggctaaaatatgaaactaaaatcattttgatttatttgcaacacagctaaagatcccttggtcttaacttgtaatttgtattttttctctataacctatgcttgatctacttctaaatagagagggcaatatattcgagcaaagctccttcattcagattgtaaactacatgtaaacaacattgaatttctttggcggtgtgataaaatacaaagtaataatattagcaaaagttagccttatggtattttttgtaaaccagtctctgatatcttaaagtctctgatatcttaaaacttttaaactaaattataaacatgtaaaggtatcacattgtcacttcaaatttaacaaaaaggttatttaaaaaggactcgggaactaaagttcaaaattgaagacttaagtagaactgtcttttgctttttataacatggccaaagtatttggcttaactacagcaaaatcttacacgtgaaatgtcagtccttttaacttcgaatttggcaagcagcgagaagcacatccaatggcggagcagcatttcaccattttagcaactcataacaaaactgaaagaaaattagaatgttaagagttagtaaccggaaagctgaaggggaatattttccctttcccggtgttttaggaaacacaaaatcaggatagaaagctaaagacaaatatcttcttctaacacctgcagctttgcttacatcattttccagggccttgactctttaataaggagaaacatatttagctgtgtaccccgagtatgatttcaattttgttggcttgtacattttccttccaccttctaacaggtaccatgttctttgtgccacaaagccttttgcacactaactcctacccatctttcagccctcggcttgcatcgcttccccagggaagccttccctcactgacactcagattgtcagagctgctctaatattagctctcacaggacacacacttcttcctagcacttctccaggttgtaatcttacatttattgcagtgattgctcttattaatgtcttcctcctccaccagtcttgttagttccatgaggtcatggtggagtgtgtctatttttccttactttttgtcctcacggtttagctggtgactggcaatagtgaatgtcagtacatattttgaaagaacagcaagtaaacgggaaagggaggaagcaagaagcacttcgaggtgccagcgagcaccctggcgtccaagagcagcgcgcgggacccgctgagcccagggcccgggccgagctccgcccctttctccaggctccccgccaccggagggagagagggaggacccgtcacaggtaacgatgcgcccagtgagcgtcctttcctctggggccaaccagcgtctccgcgccgctgccgccaacctcgcgccgaactacgccctgagatttgggcgggtagcgattgggggaaaacaggcaacctaagagttattaccgttagcagcgaagactgcgactaacgtcaacgacggagactgcgtctgccttcgcttccgcctcgtagccccgggaaccggaaatccgtctgccccgggtcacgtgcttaggagccatattgtcgctagtggccgctggggctgggaggggtgtgctagagaggcgcagcttctctgggcgtggtttttatcctgggggaaggatcggtggaatgtgaggggaggtggaggagatggcggcgacggcccgggaagatggcgccagcggtcaagagcgaggtcagcggggctgcgagcactatgacagaggatgtctcctaaaggtgacgccttctatggactcttccctgacaagcttccgtcaggttgggctggggcgggctgggcaggtggttaggcttggatttaagtttgaggttaacctgattttcaggataccttttccacctggaactgggttcttcttgaggagaacgtttttggcaaggcgataagccccacctttcctacctgcttcgtacctttaaagcaaaacccttcttgggaagtgattaggcttgcacagtggtctctgccagtgggcttattcgtcttttgctgccgaagtagactgaggcagccccgggcctgtactggggttttccgttcaggtgtgtgatgaaataatggaagtggagataatggaaataagcaagtggagaacccgaatacgatttcagctcctgtggtaaagttttatagcctgccagcttcatgttaaaggcagtgcacatgttcagacgtaggagaaaacgtgtgtcccaaaaaagaagacaatcatgtaattgccattaaataggaaattatgcataggaaagtgcctaataagcatgtattgttactctgagaaaacttcttaatctgtatttttttttaaattggcacgtattcaattgaagtttcctgattttccttgcaagaaacagtacaaaaattttgcttagaaaacttgagctttggaacctcaaccgccctatccccaaatcttagctctcctctttaataactgattttagctagctcctctctaccccgtatgtaaaatggagatgatcgcgcctgtttcataaaagtgtatgaggattatatactaaagggcgtgtatagtgtttaacagggcgcattccctgaagtaaatgagtagtaaatatataccaccatgactgttactatcatcgtcaatctgagtattattattttttgttctttcacttcacaagtcagccttgctggtcactgcctcattattagaagcaagttcaagtctcaggcctgtacgtgcatcctaaactcttttctataggtcatggcttgacgaacattgctccactgaactggatgaagctccttaaaaatgttggtcatccaccaagtgttgtgtaaggaaattgaatgctatccttatgattcaatttctactgagatgtattattattctttcaaacttgaggtctaaaacggaatttaacatcttggtgccccccataaaccacacaattagatctgtgtatcatagcactaagatacttcgccctaggtgtcaaacagtttttgccttcccccgccccccccccccccttaaataccagaggccaagtgaagtatttcaaggaggatgtggtcagctgggtcaaatgcagctgtttgagtaagataactgagaattgccctttggatttggcaaggaagaggtcactggtgatcttgacaagaggagttttagtggagagatcaggattagagtgaatttaggaaagaatgggaggagtggaattgaaaatagcacttatagggtattcttggggtttagctgtaaaggggagcaaaaaaaagatgtggttgctgggagatctggcaccatattttttcctctttaagagaggaagtattacagcatgtttgtatattctaggaaatgatacaatagagtgagaacgttttataatgcaggagagagtgagaaaactgtaagggcattgtccctgagtagccaaaggggatgaaatccagtgcacaagtgaaggagttggccttaga

SEQ ID NO: 317443 - DNA, 4001 bp, Homo sapiens
tatcttttttcactgagttcttttctaactcatggaacatattttgcaagggagcttttccacagattgggtatagtctctaaacgtgcaaggaaccctcaaaagttggctggtccaacaacttctattactagcgtggtcctctgatgcaaagcttcccaacaggtatgcctagtgagtacagctgttgatattcttagtccatggggtgggctgggacacctgagtagttacttgaaggcagccccaaacagtgctgtaggtttgccccaaagtattgaacaattatttcctatgcgtaaaatgctatgaaaaaggctggggctgggcagggtggctcatgcctgtaatcccagccaagaagttggagaccaacctgggcaacacactgagacctcatctctaccaaaaaaaaaaaaaagccgggatggtggtctgtgcctgtagtcccatgaggctgaggtgggaggatcacttgagcctgggagatagaggctgcgctgagctgtgatagtgccactgctctccagcctgggcgacaaagtgagaccccgtctccaaaaaaaaaaaaaaaaaaaagaaggaaaatgttgggaaatattgtaatctaactagcataactagttttgagttctggaaaaaattaatttggtaataataccatttttaaagcatttaccttgtgcgttacatatgctataaagtcttacgttttagttttacaaaattctacaaggcaggtttttattcctcttacagaagaagaaaccaagacccagagccaagtacagacatcagtaaatactcaattaaaattggaattcatgtctccctagtttaaaactacctctatcacaagaaaaatcccaaatcaattatggtctcacatacacaatgagttggttcacactgctaacaatttaggtggaggaatcagccctatttaaaaaatagaaaacaaaaaaaaaaaaaaatcaatgaattttatacatagcctaccatacatactctaaactccttaacctggcatttacatttttaaaatggtttctcaggtacttttccactcctctatatttgcactttctatcctttacattttcccatgccattcctaactaccctcttcctaccccccctttccaaccataaagttctttttgatctttccataaatctgctccttttgtctgtgaggatctattttacccacttttctacttgctagtgtaccctgaatactgaatgacctataccagtctgaaccatggatatgagttcagataagactgatctgaaattcttccccactgtcgagccaaatgaaacttccctgccatgatcaaatccagccagaatcggaccggccttgcacagctcggctaacagcacttaagaacttgcaatgtcaggcagtacaggagaaaactgatctgtactcgtgctcaggaagacgccacacacacacttcaaccgttgtcctaaactgccttccctttcggcctcctcacttcaaataataagaccatccaattaatggaggactcctttcgcgtaactctccttaaagcggtaggcggtgcgagaaccggctattcagaggtaaacactgggcgggaagagagagaatctcaattctcacagtgccccaattccgctcccacgccccgacgctgcgcacgtcacgtcgcgtcacacacgcggcgcgacccacagtgcggcccggccccgccccacgccacgccacggcccgccgggccccgcagggagttcgaaggcttcgaggctgctcccatacgcactggtggaaggagaggccgcgctcccggctgagcacggtgtcacgggtgctgcagcccactgcggagcaacttcgggtcatcttcttgttacgtggggccccaccttcggggttcccgcgacagcatgaatcacgaccactttagctccgcccgttgactctgcggctacgacctttatttgtcacgaaaggcgggctttagaggcgcgggacttccacacttcctctccgaaggccctgcgccggtgccgtagccaatgacaggccacgttgtgtcccagcagccaatcggaagggcctgagcctgaagacgtgcatttgaccgctcctccctccgcgttggaggcggaatagtgggttttgctgcaaccggtttattttccttctgttttcacccattctggcacaatctggcgccatcgtccttcttgtgaggccaagcctgaaaatgcgaagcagagaggcaggaccaaaattgaggcgaatccaggaacctgccaatgggtctccgggtgcggtctctgaaactggaggatatcgggaggaaagggtatggaagagggataaaacacggtgccttaggtgtgttgaagacagagtcgggccaaaaatatatgatttactgagatgcgtgtcgtgttcttgcgctttatcttgtagctctccgatgcggagataatggggaagctcttggcatggttggctgtaggtatgtgataccggaggagcaggagtcaaataggatacgccgacttttaattcaaggaacccttttctgaaacactttgccacaatgaaggaaataaggtaaggttcttggggctcctcagtagtaataggggcaggggacaaggggcaattaagtggttttggttgggaatgaggcattatgaatagctttcaggagatagagcttagaacaatgtcttagttataagctcttatgtttgaggaagagatttcaatttgcttagagaaggaaacgggccagtgggtttttgtctctgagaaggagatccttagcatacagaaaacagagaagggtttgcaacttttccgtttctttgtatagcacacaaaaataattccaaatatccaggcctaacaagattgcttctttttcccctttgtgtttactttgtccagattacagccgaagatacatattaaggtattacttattcacaccagttttccattataatatgcttgtatcttctctgaatggaattaatagcttttggttatggttccttaaaagtcacatggcctaaggatagatggtcaaggaactttggaaaaattggtccctgggggatgtgcagggcaaatactttttggctgtaaggtgtgtgcagagagtaagaactggatttaaatactgtaagttggttgggctgttagagccttttcctgctcaaccaattaagacccgagtgaggctgaataaaaataacattgtttttagctatctttaaggaaaaaattagttgccttatatttttgtaacagttttactcagatataattctcataccacacaactaattggtttaaagtgtacaattcagtgggttttagtatatgcacagaattgtggaacagtcacaatcaatattagaacattttcatcactccagaaagaaacctcattcttactagcagcacctccaaatattcccccaccccgctcagcaaacactaatttagtttccgtgtgcctctgcctgctctgtacacttcatgtaagtggaattatgaactaatatatggtctttgtgactggcttctttcacttggaatgttttcagagttcatccatcttatagcacgtatcagtactttattttttattgctgaatcgtactccattttatggatgtagcagattttgtttatccgttcaacagttggtggacatttgggttttccaatttttttttttactattatgaacatttgtgtacaagtttttgtgtggacaaatgttttcattttcctgattacacacctaagagtggaattggtgagtcataagataactgtgtttagcttcttgaggaagtgccagattattttccctagtggctgcaccattttacattcccaccagcagtggatgaggctgccagtttctccacatttttgtgcatgtgaagtggctgtctcatcgtggtgtttgccttttcttaaggactca

SEQ ID NO: 317444 - DNA, 4001 bp, Homo sapiens
atgaagaacaacagagaaatgggggtgatgctggtggaaggggagagtctgaaaatgacatggggtcaagagttatttcaagatggaagattctagaatatgtgtatgatggtactgattaattagggagaaattgatgctgtagaagagagaggataactgcaggaagaaagttcttcaggaaatgagagtggtatctaaagcataagtgaaggattttgcttttcattaaaaaaaaaggcacaattcttccctgaaatatgagaaaaggcagaattcatgggtacagatgcgggtaaagcaatagatccattgtaagaaaataagggatttcatgattgatcacttctattttctcgataaagaatggggcaaagtcttcagctgggtgggggggtcaaaggtgtgaagtttagaggagagtaaggcagttagtcatcttcagagactgggaaaaccaacttactaagggaataaagtgagcttgccaggcagtgccaagtgaccagttgaaatgaaattgaaataaaccagacagtatgactgtgcaattttgcacagcaagagtcaactgctgaggtgtaggaagcgagtagatggacggctgggtttaatcagggttgaggttttgtcagaagtatgatggataaccagagagccaatggaatggtggaagacataagggagcaactgcaatggcagaccatggaatcgaggctggataaggagcagtcagtgagaacataagataaaaattggtttcccaaaagattggcggtccaatgaggacaaataattgctttgggttgggtcattagtgaggggtcataaatgagcgagtggggtcagagcaaggatgtttataaccaagtcccatctgctctgttaccttgtgaaggtggtgaggactgagcatatcgtgagcactttgtagatgcatactctttgaatacttgctcaatgaatgctttgtttccacatgtgaccatatgccaaacactgacgaaaatatcctcccttcaaggatcactctctttagttaaagagaaagatgaatggtgaaatacaagatcttaagtgctctaataagggtaacattcaaagtgcaacccagagggatgcaatgactaactgtagaggcgaatgaagaagggcttcaaaaggaggtaacaatagctcattagatagcagtggaagacaagagattcagcttctctcattatcagggtgtcagtttcccatctgagtcccttgaaacgcaagggctgatgactgcgaagcaacaggtaaatgacacgagttcttttcaatatggcaagctcttgcatgcaaacctccaccttaggacccccggttctagatggggcgtgggtgctcagcgcgtggggaatgaggggaagggagaagcaggagaggggacgagggaaggggaacacctaccacccaggaaagacagctgaggccgtggcggggctctggtgatcagagagggggagatcattactgcggcgctgggaagcaactcggtttccttggcctcgcgggacttgcggggctcacgggtgtggcggagctggcggggttcacgggccttgaggagtttgggggctgcatggggcccatggagttcgtaaggtgcataggagtcccggggcttgtggggcgcatagggagcgtggggctcataggactcatgaggctcatcacattcctcggactcgtctctctggtcttgctccctgacctcctcgggttcctcgggattctcgtgtttctcgggatcctcggactcctcaagctctctgtgagtgtcgagaatcctgagcacaatgggcttctggaagacttcggagcaagtggatatttctgttgagacctgcccatcggtcacctcggacggcgcagatgaacttagaaactcttggttctccattcgcgccagaagcttctgtcgcgcgcgggactcaccctcccgactggttgcccaggcgcagtttgctctctgcgcgatacgataagggctgccggggccccccgcgcccagccccgccccgagccccgccccgagccccgccccagccctacacagccccgccccggtctagcccccgagccccgccctagtcccacacagccccgccccggccggactcagcctcatctcactccgccttcctgcgcgttgtacggttgccaaggggacgcaccactctccaggaccttctgggcgcatctggggactaagaaaagccagagacaggtcggtggagataggagacgagatgctgaccctgttccccgtgtccagagcaaggattctcgcctgctgtcgttcgcggaggccctggggtagaacatgtcagtttctaatctagttagggcgcccctcagaccccagaggcaatctgtaaagagcttgtgcccagaggttcctggacacaatctctatacgggcttttgtcccctaatcatgctgggagaggatgccgagactgataatattctaaggccctcagttactaacactgatttccatcaatttctagttaaatgcacgaccatcagaatggagcgggggcggggggcggggggtgtgggggaggtggatccaccagtgcgacatttgacataagcttacattcaagaagagtctcaaacttgaatgttttactttatctccacatgaagttctatacacagtcacaaagaaacactgactggattaaaagaaaaatatattcatctacaacttgtgtctcattacagggctcactatctactgaagcatgctatcagctactttttataaagggctgtaattatcttgtgaacagtacaactgtgtgctgtgttctgtgggtgcgtccattaatttgttaactgtggtatcttttaaatataccacacttcttgtaaccctgtttttggcatcctctcttttttatcacttattataccaagagactttaaaaacataggtggcctggccgtctctcaatccttgaggagtgctttcagctaattttcatggtggtgacagtgtgatagaggggaatagaagtggtggagttttactgatgtgtttattttcaagggaagggactagaggtgttgaggaataagttgtctgttaaaatatttagtaaacccaagtaccccttttgctcgttactgggtattccttgtatgtacttagtctcatagatgctaagaaaagttagaagagaaatattttggattgtgaatgttatctggaatggaactagaagattcattctagcatgtgcgtatatgaatcggaatctccttcaaccttactttgatagagatgtgtgtaatattgtatggaagttcaggaaatatcccccaaaacttggaaggagaaataaagctactctcagagagttttaactcaacctttaaaccaatcagggaggagttatgtaaatccaccttaaagaggcaggatggcccttaaatcagtaaaagtagtccctggttacatgaaatgtcttcgaaagtccaaagaacatgtcaattgaaagagggggattcaggccactgtgaatgtacagaatgagcatcatagaggctgtgccttctcaaaaactgcagaaaggaggggatctaagccaatagactgcaattgttacagcctatcttttaggcccacttgctatgaatgtggtgccactgtatatcaaaatattcatgtttagctttctttccttcttttttatttgggacagggtctggctctgtcgtccaggctggagtgcagtggagcaatcttgactcactgcaacttctgcctcttgaactcacaccattctcccacctcagcctcttgagtggctgggactacaggcgcatgccaccacgcctggctaatttttggtatttttttgtagagacagggttttgccatgttgcccaggatggtctcaaactcctgagctcaagcgatccacccactttggcctcccaaagtgctggggtta

SEQ ID NO: 317445 - DNA, 4001 bp, Homo sapiens
agattagcaaagtattattaaaggggtaaactgtgatatctgacatggaaaagttgtaaaacactgattaatatctgacaaacaataatatctgtgttaacaaaggaaatacaataaatatagaaataaaaataagcactgcagttgggaactctgtctctgaaagctgaatacagaaggcatagatgctgcatcttgagtgtccagctcttctgtgctggacatcaggatgtatacacttaacctgggaggcttagagttgggaagagaagagttagatcgagggcaaggcttctgactcctctctggggaaagaagaatggatacgtgtagaggtgctatgtgcaaaaacagcacctccacctctgctaccctccctgcaacacaacacacacacacacacacacacacgtacacacacactcactaaggtcctgcaaagcccgtgaagagacataccacctctccttgccaaagggtgttcggccttaaaatgccataaacaaaaacatatacagaaatattttcgctacaaggacccagatgtctaagcagtttaacagaaagcttggcacccctgggtggtcatgcatgccaaccagatttctcatgctttaagaagtctattttttaaaacaggattgaccaaactaatggggtctgctctggatggtgaaaatgtttactttcatttccccccaaccccctcgcctccccagttccccctgaatatattctcaagaaagagtatgtctttgggtggttgcaagtaggaagtttcaaggcttttctccctaacgaataccgaacactgagcacacaggaggggaacagaaacttggaagcagagcaaaggaccaagttatcctcctgtctaaccctgctcaacaggatcaccctgaagtgtggctctgaagatatttgtgaactctggcacagctgtttggcagaattaatactaaaaccacaggtcttgcaaaaacaaagaatcaaaaaaaaaaaaaaaaagtgaaaaccaaacagcaggaggaaacccttaggaaagctcggtgtctttcagacatgagattttctttctcccactctacttgactggcctgacctggggtccagtcccacttcctggtggctgcggaaatccgcagtgaggctcagtgtggattttggcttcagaggatttgggaaattccacctttcaatctgaaatctggggaaagtcccagaaaacaacggattactatatttctctcatgaaccagactgaagcaaggagtcaggtctaggaccaaggacctcggcactccagggagcccagggcccctcagaaaggtctcgcttggccaccgagagcgtggggccgtagcagttggcaagcgggggaggggggtcacgcacaactgctctggagccacactgcataaatggcattcgtttttgttttctgattagaaaaacgttgaaaagaataccaaagtacagagaaaacacacccccatctccaatgtttcctcatttatgtaaatattctcatattttataaaacagggaggtgctgtctataatttttgcaggctttccttagcatatggtgagcgtgtgccaggtgagcaggagcagcgggggatgacttccgatccgacacccccaaaatctcctggacaaagctgctgtctttgcgggataaacagaaaagggccagtccccacctcacccccagcccgccgccccgcaagtacctggggctggggagtcagtgaactctcttcagctgttcggctctcccggctcagagcgaggggaatcgaggagactgggcgcaggatgggggtggacacccggccgctgctcctccgcgcgggtaagtgtgagccccggggtgcggggaaccgagccagggaccagtgaccgcgagccgccgatcctcccgcgctcccgcgcgcgcggcctgccttcccactggctggcagagcacgtcctctcgcgcccggggcctttgtaaagagcgcagcggtggcgcggaggttttcaggctccgcccgctccactcgcgctcccgccccttccttcctctcgaggtgacccggcagctggcgcctttctcaccaggtacccagccccctggccgcctctctcagttctctggcagggtttggtgcgcggtacaccgacccggaccgcgccttcccaaacgagtggcctctcctccagcccgattggcgagctagagaaaagaagggaactggatcacttcagcattaaggaggacttttccccaaaatgagtgttgccccagggcgtgggcaggcggggagctgaactaatctttcggtgactccaaggataccaagcaagccagtgcgtggcatgcacgagctcctctaatcatcgcagtcccccttacacatgagtaaaccgaggctcagagaatggtggagtgtggcgagcagaagtggaattttttttttctttttttctttttttgagacgagtctcaccgtgtcgcccatgctggagtgcagtggcgccatctcggctcactgcaacctctgcctcccgcagaggcgggatttgaacttgctccaggttgccctcgccttacacccagcagagcagtccagtcgctttctctcctgccgcttgcatcgtaatggacatccagagtccacaagtaaaagctggtacatgatgaaatgggaaacacctctcaggagtcctttatagcttagaagaaggtaatgctacctttctgcctcagtgaaaagatttggaatcacctaagtgtgaagaacctaaggagagtaggtgtcaagagaggatagacccgggtgccgtggctcaaacctgtaatcccagcactttgggaggccgaggtgggcggatcacgaggccaggagtttgagaccagcctggccaacatgacgaaattccatctctactaaaaatacaaaagttagttgggcttggtggtgggtgcctgtaatcccaactactcgggaggctgaggcaggagaatcacttgaatccgggaggcagaggttgcagtgaggccgggatggcgccattgcacgccagtctgggcaacagagtgagactctgtttaaagaaaaagagagagagaggatagacactgtagagaccagcaatccctgttgggaaccagtgtcatggaagactttttccacagactggggttggggccacgggagatggtttcaggatgattcaagcccatttcatttattgtgcactttatttctattattattgcattgtaatatataatgagataattatacaactcaccataatgtcgaatcagtggaagtcctgagcttgttttcatgcaactagacggacacatttgggggtgatgggagacagtgacagatcatcaggcattagattctcataagaagcgggcaacctagatccctcccatgtgcagggttcctgctcctataagaatctaatgccccagtgatctgacaggaaacagagctcaggcagtaacacaggtgacggttagcagctgtaaatacagatgaagcttcgcttgctggccctgagcacacctcctgctttgccgctgggttcctaacagtccatggaccactgccagtccatggcccagaggttggggacccttgccatagaaggagaaagaagactgaggatagatagaggaaggaggacaaaacttggcttggctgagatcacagcggcctacttcttcgcatgggaaaccaaattctgatgatggaaatgagtggaagccccttgtctgtcttctgtccttgagttcaggagagttgcttgtttgtggatcagtttcactggcaataaaatgacactgatgtccacctgataaagaggtgctatgggtgcggttaagttttgaactgtgtcagagctaggtataatcaagtacagtgactgtggggaaagaagggtacatttacaagtgaggcagattcccgtaagggctgcaattttgttaatca

SEQ ID NO: 317446 - DNA, 4001 bp, Homo sapiens
caacagacacaagatccctggcctcaggtaccttatgatctaattaatagatattagaaacagtagaaagacaagttacacgtcaatgcccaatgactagagtcaacattaaagagttgtaatttaagtaatccaaactgacatctaattccaaaatcatttataaaatgtatttggctttggaatccacaggacttcaaacaagcaaagtttcactgcagatagtcacaaagatgcagatacactgaaatacttaagagccttattaatgatttttgttattttggatcttctgtttttttcttattatggtccgaagcctccttaataccaatttatcagacagaagcatgtcatcttgttgttcaagataatccagtaaattttcagtccattcaagtgccgctttatggctaatatgcttctctggattcagttctgtttttctactcttactggaaggcttttgctcagcagccttggtctggtcctcagcactttcactgtcagtcagcacctgacagcttgagtcactgctccgagagtcgaaccactgatcaatattctcaatgtcaacatgttcacattcttctgtgttctgtaaaactgttgctaaattagctgctaaaatggctccttcatcaatgttcatacctgaattctcttcattgccagggaaaagttttttccatgctttggttatggtacttgattttaccatgttccaagctcttgacacttcataaattgcatccaacactgtcaagttcttccaaaatatttttgggtcatttccttcatccatgtatttctggagaagtcctgctcgatagtatctttttacagtggctagaactccctggctcattggttgaatcagacttgtgacatttggtggcaaatacttcacaattattctgccatcatctgaactcaacatttcttcatttggacgtgctggggggaaatctaaaagaagcactgctttttctaaaagtcccttggatttcaaatgcttctgtacctgtggcacaaagtacttttcaaaccactgtctgaaaacagactgttctatccatgcacctttttgactgtaatatgtcacaggaaggtttgaaaggtcagtgcctttgaatgctcggggctttttggccttccccacaacacaaagattaagtttgtgtaaacctgtggcatttgcgcaacacataatgatgattctctctctgcttgacctacacccagaagtactttggtcagtttcaagagttaatgtccttgatggtagacatttccaaaacaatccagtttgatcagcaccataaatttgctctggttgtagattctctttttcaacaaattcctgaaagctaccacaaaattctctggcagcagtttcatctccttttaattttgttcctttaccagcagcctttggaataccatggcgctgcttaaatcgagttagccagcctgacgatgcattaaaatcaccttccattcccaaagcatcaaaaaagaacttggcttgttttgcacaaatcgttccggacactggaatcccatctgttttctgttggttaaaccactctatcataactctatcaagctcctcgtatgttgatgacttcatagatttacgtttggatactccactggtaggatctgaactgtttgcatagtttataatcctttctttgttctttttaatatcacgaactgtggattcaccaattccgtacaccacggaaagttttttgaaagagatgccttcctcaagtttcttaataatgtcaagcttgtccttaattgtcaacaccacacgcttacgtttccccaacattttaagtgtctaatattttaggtgattactagaacaagataattaacaactaagatttgaatacaaagcaactagaaaatgagttcgtaagattcctcctctcacttctagggcctagatggatagtgaccaatttcctgacaaggtctacgtgaatctacttgctattttaaaacttacaaacttcctacaacaaagcctagcgccaattaactcttatcttctatctttcttcctcctcagggttcagggtctttcatgaagtgcaatcacactagaggctagaaactgtactggtaaggcttctaaaacagtactattgcatactcaattcttgccatccttgcaggtaatgttctttgccagaatagccactaaatctcaggtggaagtattttaggaaatgtgctagggagtaaacagtttaagtcaagagaggacttgcaaacttgacatacaggaaaatacaatgggaaaactcaccctctgactatgtggtctttgtcaagcagtggattgtatggaatgctgtctctctaggcacggactctgctataggttgcgcaagtgagtgcttgtggaaatcatacgcaagagaagatgacccggacagaagtgaacagtgcaaataaggtgaaagtggaacaggcagaaaactctactttaaaagcgacttaaacctactagatttggcagctggaaaggaggatagtggacatgtgatgtcacattactaaagaaagcatcaaaaaaactgcatcggtggaaatgaggacccaaggtagaggctatggggtggcaggctcggtgaagatgatgttacaataatcctggtgaaagacgatcctcgatggaccaacagaagcagttcctgtgggggctgtagagatactcggaggctccgaaacctaaaggaaaataccaaaaacattttctttcaattcaacatcaggatctgtggcattatccacatttatcctgcaactatgttgagaaaattaacgcctcctatcaatgtgatagctaaatacgacaaataatgctttcaggcataatctggggtgacagagagagggacctgaagagcctacctcctgaaattaagaggtcagggagaagccgtgttagcgagggcctctccccgctgggcgagcttcagagcgcgggacgtctttcctcccgcggagggagcccggattccgcctggacgccggcgaccaggatgtcactgctgcagccagccagccagcgggcggccgcttggcacagggaacgccagtccgccggccccgggcatcgccctgggaccgcctgcgcggcgcccagaccacactaagcgcaaatggagtctcctgaggcaggctggcactggtggcccggcagcggcgagggacgagcggagagggacgagcgtcgccgccggagccggaaggcgggggattagagagcacgcgcgcgcccccgcagaacgttgtgccggcgagggggcggggcctgcgcgggtgagcgcacgcggcccgggggaggggactccggcgagcgggcgggaggggcgggggcccggcaggggtgcgtctctaggcgctgcgtgggttccactcaccgcctggccgtttcggggccgcagtgcctccctggccggcagggggaggcacacgctcgccttgtcctggcgcttttcccagtggcccggctctgccgacgaggctcttttctccctagggggaaattttaaaatctcacccccccagtgctggggggaaagcggaggatcctcgcgtgccgggagcgggctgcgaatggggcagggcgagcgcacgtggggcgtgtttacaaacagcagccgcgccgccttgcggaggcggtccaggtgtcggagcccagagtcagcgcgcgtggaaagtgctagcccgagcgaggatcatgaggcacggtaggagccggcggacgtgggttccgggcaggagctggggcgttcgctcggcaacacccagccggacaagcccagggtgccgaggcgcggcgggctgcggtagagccgagtgtcgggtcagcgctccccggtgctgatgctccgaaactcgtcacagtcgctgtagagacggaccctttgcaaaatcgacagcacctgggagacccttgagccagtgggaggcgt

SEQ ID NO: 317447 - DNA, 4001 bp, Homo sapiens
cagttagtaccaaaaatattccccaatccaaagaacgctggtttgctgcttccattgtctcaaaggatgtatagaattccactattttccatcaccagctgaagtagtttctagtgttttcttggagccagactacattctaatttccttcagggcagtggaaatcatggaaagattaatcctgtgtatatatagccttgcacagcgtaatactgtggatgaggattaatcgtacacagtaccagaattcactgaagagtatctaacttggttagcatcttcaccaagcagaagttagcattagttccaaatccatctgaatctccatcaaaaccatcagcagctgccaaggaaactatgaacaaactaaagcaagtcttcacctttccaaaataagaaacacttcagagtctgacagtctaatagttagactaactttagtcaagctaagcatctccaaactcaagagacagctagcaggaatctttaagataacagccagcaaaaacaatttagtattcattgtccacatcattcaagcaccgctgagtcctaccgtacacttcctccaagtcacccttctgaaaccctaggaacaacacttgtacttagctgcaagttctgtagttgctcagttcctacacaattacagcagtaattaatttagattgggattattttcttataattgagaagactaatggtctccaaaccaacaagatggctttgtacagaaaaatccacagtaagctataacaattgaagttacagtttgagtgggttggcatatatatttgctcctttcttttgtttaagacagaaccacttaagataagagatttatgttttggaatttcagtactatttttttaagaggtggtatcctagagagctcaatcaatattgttatacattggaaacatttatggtgccataggtgtttactattcacagatctggggaagatacctgccagggatatttcactacactgaaactccctggaaatctgtagaggtagagctctgcctttgggcattagtcattaaaaatatcttgtcagctactgtgacaagtaaaggcagctgagaagtacggtctaaagaagggtaaatctcgccgtgtgcacagttacccttcgcatttctacaagtgaaatgggagtaaaaatgagcattcaaagctgtcaaaggaaaagcagtccagcagttcgaagggatattctgtgatggaccaactgtatggtacagtgtgtaaatgaacttcaggtctatctagcgccacgggggagccacgctttcgcaccactgagctctggggatggggagagtagtgcaggttggggccccgtttaggaaactacgaagggctctgagagagcgaattgttcagcagtttccgtgacagaacaatgatctatttaagaagtaatggggcaagcaaagaaagcagagctcggtcatccggaaaaagaaagaggagccggaaagaaaagtatcaaggaatctactgtgagagagcgagcaaaaagcaaaaagcgatcacaaatccagagcaagtaagagctcagggatgccgggcccgggggtctagcctttctgaagggagagggctccccaggcacgggggcagcgcgaggcagcgcccgcattccgtctgctgccttatcttcgcattctccctaccacccccaccttccccccgggactggaataaccttcttcgtgctctccggtggctgagaaagcagctttcgctcttctgtggtagcgtggaggtgaggtacatctacctccaccctcccggcaccagctcacggtctgttgggggggtcctcctaacgtgtgaggctagggtgtgtgaatgaaaaagagggaggcggaggcctcctggagaccttcgacctctcaagaccaggcaggggcgcccttccgcaagctcccagctctagccggtgcctctggccccgcgcgcattaggtcgctgccagaaaattacccgggcaacgacaccgccggagtcccggatgtggttgctagggcagcagagggaggggcgtagcccgcctcccggagaagggcggagggatcctcgtgggaggtgcgctgacaccaccgagacgtggccgggcaaggccggattgagggagagagaggccgtccagggccagggacaacgctacttccggtctcctcacttccggcttcgctgctcttggttctggttctggaggctgggttgagaggtcgccggtccgactgtcctcggcggttggtcagtgtgaatttgtgacagctgcagttgctccccgcccccgagcagccgaggtgcgtgggggaaggggaagaaggaaaaggtccgggtcgcgtttccgctcagtttttgccagggttgaggcgattccagagagcggcggaaaggataagcctcgacttagaagctaccgagttaccctaagaaaggtgagggcggagctggctcgcctgggaaaaggcgggggaaagatggtttgaggtggctggtggggcgggcacgttgcctacgggttcaccgttccgaactttcacagggcacgcctctccttagtctgtgccgtatctgcccaagtgttatgcctttggtttcttctgtccttcattccttctgtccctctgagtgtgcccccgaaacagtcgagtgaaggtgtaggaccggcccttgcagggaggcactctcttggctttgcatacattgggtgggaaaaggagttgcaggatccagaatccggacctttcttgacaaagtgtcggagtgggccaccttcaggcttgctgtccaaccctcatttctcccctcttctccctgcatccccagcttcctctctcccgcagtgggaggaagggagatagtgacagtccctctgagagattcatctggcagtggtgcagagaggagtcttgcctgtgaaatgtcccaagcctgactaaggaatgctggagttttggaaagggagttgttcgattgtcttctgctccgttcctgtttgccaagttactactgtttacgtgtctaggaaaaggaaataattttttaaaaacagtttttagatgctagacgtttttcccttttactttattttgttattacttcctttgttttgttcttaccttcctcttgagccctttgatttcaaaaagtttacactttatacttcctgcagatcctttggccactcttaggatttctgtcccccgcccctaccctgttttctcctaaagtataaaattcatctaactacattattatttgataaggaaaagccggaagagatccagaacttcgcataaacttttgctttcatactttcacctgtaagggtgtgttcatgtttgccatttaattaacttaattggcatagaaatgtgcaccagaaatggttaccttaagtcagccgtctgttaaggcttcaggaattggccttttcttttttctttttttttttttttttttgagacagagtctcactctgtcgcccaggctggagtgcattggcacgatctcggctcaccgcaacgtccacctcccaggctcaagcttttctcctgtctcagccttctgagtagctgggtttacaggtaggcgccactaccgcctagctaatttttgtatttttagtagagacggggtttcaccgtgttggccaggctggtctcaaactcctgacctcaaatgatcctccctcctcggcctcccaaagtgttgggattacaggcgtgagccaccgcgcccggccgaattggccatttcattgctgttctctcagagcggctacagattactatattttactgctgccttaattctgcttttctttcgtttgtcctgtggtgttttttgttttgttttccttgcttagcatgacccacgtcttctcccaactaccaagtctaacacacttttatctgagaaaagagaaaagatttctaatgtattttgtggattaaatccctgcctcagttact

SEQ ID NO: 317448 - DNA, 4001 bp, Homo sapiens
ggtactgattccaaacatatccagcaattcactagttttcccacgttgaggcactcctgacactgccagttgatgaacaaggatatcaggctccctggagacagctgcacaaacagcttctccaatgccaccttccctgtagtgatcctccactgtgataactcggccgcctgtggcttttgcactggagatgatggtggcggcatccaggggtttaatggtaaatgggtcgatgacacggacagaaataccttgttgagaaagatggtcagcagcttctaaggcttcatggagagtaactccagctccaattactgtgactttatcattgacaccgtggcggaccaccttggcctggccaatctcaaaattttcttgtggggtataaataactgcagtttctggttggctggttcgaatgaagcacattcccttggtattggcggctagataaatagcatgctctgtcgagatggcatcacttggatagaaaacagtacaattgggaatgcttcggaacatggctagatcctccagggccatctgggagactccatcttctccagtggataccccacagtgggaaccaataaggttgatattggcttgagaaatggctcccattcggagctgatcgaatgctctagtaaaaaaggcagcaaaagcaccagcaaaagcaatggttcgaccacgtgtagcacagcctagtgccacacttaccatgttttgttcagcaataatacactctatgaaacgctcagggtgttctttcctgaatatctcagaaaaggtggagttcatcgtgtcaccactcagaacaataactctttcatttgcacggcccagtttagccagagccaaaccatatgttttctgagtagctatcttgtcaccaactttgtaagcaggtggggaggtcatttttatatctgtgatgcttatttgaggtgagtcttccacaggcgattttggtatgagattctcattggtctgtatctgactctcaattaatttgacaattgcatctgctctttcttttggcactggctttccatgccaattttctgcatcctcaatatttggaataccccgacctttgaaggtcttggcaactatagcagtaggcttgttcttcacttgacttgcttgccaaaatgcttggcacaaggcctccacatcatggccatccactaagtaagtattccatccaaaggcttcacagcaattctggtagatgtctgcgccatgctcaaggggtgcagggccactttgtcccaagcggttcacgtcgaagaccgccacgagattgtccaagttgtagtgggaggcaaaagcaaaagcctcccacacagagccttctgaggattcgccatctcccataaggcagaacacccggtagctggccttgtcaaggtacttgccagtataagccattccacatgcagtacctaatccctgacctagggaccctgttgccacgtcaacaaacggcaatcggggggtagggtgtctctccaagtcgctgtgaagtttcctcaggttcagcaagtcagattcactgatgtcacccacctccacccaagcagcatagaggataggagcagcatgtcccctggagaggatgaaccggtcgttgtccgggtgttctgggtctgtctgtttatacttcatcgtgtggaagaagaggacagacacgacctccgctgcactgcagcacgacgtgagctggccagaaccagaggcacacgtggccctgatggaatggatccgcaggcggttggctgtgtcccgcagcacctgcacggtcttcacgtcgggcttggcgtcgttggccatcatctctcttttgtcggtttggcaaagcaaacggcgccgcagcacccccacaacccaccgcggcagtgctctcacgtgaccgccccgccctcgcctcccctctgcctgaaggcctgagctcagccaccagccggggcgcccacaacggagcttcccgcgagactgaggaaacggaaacgttggagtagcctgcaccctctgatgtgcaccgttccctctccctgtccacgcccagctgaatggatttttagtatttactttgtcacgtgcatgttcaacattaggaagcataattaaattttttacctttccctgtgttataaattcaagactagacatttttctgtgtattataggaagcgatttgtcaggctgtgcttttttaatgcattaacactatatccgagtcatcactctttcatatcagaacattaatagaaaggatacaaagtcactttcaatctgaccagtatggcaatgctatctcaacagagactttctcagagcaaccaaatatctgaatctcagacttatagaaagaaatgcaatgactaatttgaccaaaatttataggaagaacaaatctgaaaccacccaattgcagaatagaattgcaactccagtgtgccgtaaagtactatttctgtgttgaaataattagaaggccagtaggctgaggtagcttcagctccatgagttcctacctaaggaaaggaaacccaaatcagtgtaaatgataaaaaggaaatttaagcttaatcaatcagaaactgccagctaacttctaactggggactttccactgggatgacccaaataagtctagtactccactttaaccaatcaaatatctttcctttgcttccaaattcaccctataaaagccttctccttggctcctttatcaggagctaccagattcatgaatcactgaatggtcaaataaatgctttaatattttaatgtgcctcagtttatcttttaatgactattactacaaatcatttttaagacaaagttacttactttaaaaaactaaatttgtgggccgggtgctgtggctcacacctgtaatcccagcactttgggaggccgaggcaggcggatcacaaggtcaggagttcgagaccatcctggctaacacggtgaaaccccgtgtctactaaaaatacaaaaaaattagctgggcgtggtgatgggcacctgtagtcccagctactcgggaggctgaggcaggagaatggcgtgaacctgggaggtggagcttgcagtgagcccagattgtgccactgcactccagcctgggagacagagcgagactccgtctaaaacaaaaaaaactaaatttgtgccattgaactcttctagcaggccaaggttatggtttgtcatcaataaaacaacaattaaaaaaaacacaatgataatatatcataccttcccatattgcgatgttaaacctcttggtttcttgagcaataattcttaccttaacttcacgttaaaattagggcacataagaaacacaatgcctggttccatcccagaaaaatagaatttgaatttctggacctggagtctgggaagctatgtttctaaaatacatccattgattataatgggtagtcaaggttaataacataatctggagatagtctgagaccagtggttctcaacattagttgtagtttagaattatctgggaagttttaaaaacatctcatgtccatgctgcactccagaccaattatatcagaatttctaggcaatagatctaggcgtcagtaattttaaaatcttccccaggcaatttcaatgttcagtcagggttgtaaacaactaactcagggggtgttgttactctttatacttattatctcttgcattatatctcagaaaaatatttcaaatgttatttgctatttcaactagttctatcattttaacttttaaggacacatattagaataaatagtaataatatgacactactgattttaagacttgttgcaggaatgttggcattggagaagttcttaagaggtcatcatgtatccataactctccatgtcctttgcaaattaaagcttgtttatctttttagacaaataaaggaggaggaaatacaagcagactaggctagaactggtagtacagaagatggg

SEQ ID NO: 317449 - DNA, 4001 bp, Homo sapiens
atctagttatggaagggaagaaaagctagtcacagagcaaccccgcacggaatctgcagaaccctagatatatttgactttgtccactcccttcctctgcgcttcgctaaagcccacacctcttgggatggaacctaacgtgccttccgcttacaaaccgctctgctaggttagccccaaccaccatgcaacctttacgaagttacttgtgcgtccacactgagcgcggatcacctcagccacagcccaatagagcaaggaaccaggagctcccgaagcccggacacgagccgcggccagtgctgggcgccctcaggcgctgcgctcacgtggtagcggccccgggcacgtgcgcctccgaccttaggcggcgagagggaagcgccgccccgcgcgcgcgagaggctggcagcggcgccagaggcgtagaagggaggggaaggacctgggacattcagggaccctgcgaggcaagaagctgagcttcaggcagtgccggtccgactgcatttccctggggtgttagctggaaggaagacacaaatttgaatggggtagcaacttaaaaacatttttcttttcagtttattttaaatgggcaaatgcatcagaatcccatctagaagtgagttcttccgagattgtcacaatccctttctagcctggaacccacacttgaaattcctggtaaaagagggagccaaggtgtctccaggtagcaatgccatcctcctgtatcttttggggaaccctgccaactcgctctcgaacaagcgctgggaaaccgcgccctgggggagaggggaaagaagacggtgtcccttccatatgcataaagcccgctgagtgttggaatttaaaacctacagcagcaagctatatttacgacttgtttcgttttgctgggggaggggagagggatcagaaactctaggaccttattcccaaactgggagatgggagcttggcagtggatcccactggcacagaactctagtcaactggggccgcagcggctgccacttgcgggtggggaagggaaggaaaaggagggggagagaaggaggggcggcggaggggctgacgcgggagggaaggaaacaggtgagctcccaccgccacccatgggaaacccagcgcagcggcccccggcgcgccaccgtcccaacctggagagccacttaccggctttacacgggtccttgtaatctatagtctctgttttatcctcttcgttcccatcaaaagtgtaatcataatcgaggccagcgcagacccatagctccccgtagaaaacaatccccgaggccaccagccacacgagcatcctcggggaaagcgttcccaaccccatcctcctcccccggaggaaaaggaggggacgggacccagaggttaggcagccgcggtccgcgctgatgtgcggggctaggggcaccggtgctcttctccccacccggaggctcctcggcgggaccggggtgctcaggtgtccggaaacatgtggatgccgccgggacagtagagagggcaagcactgcctgttacccccagtcgcagggagaagttggctaggggcccacgggtgggcggagggcaggtaaggaactctgcactcggaggcggggagggcgcaggcaaactcggctctggcggcgctggcgctcgcagcctgccaggtcgtccttctggctgccgaacttcccgcggccgcggctcggcgagcggcgccccgcgggctcagctgccaccagagctcggactcccgcgccgcgtccccgctgctgccaggactccgcggccgagcgcgagccgccgccgcctgagcccaaagccgccgccgcagctccgagaagatgaatccggtctgcacatcagcacatctgaattgaaaggggagaccgaggaagggggtgggggccaggcatttctacgccgcgagaccttaaaagcctgcagaagccagcaaagcaactgactgcaagagagcaaaagtgtgaggatttggggatgcactgtttgccttccccccgccagcctgtctttttaccctcttcctaacttgaaaaaaaaaaatattcgcaccatctaacccaatcacttgcatcctgcttacttattcatacaatcagggtcaggatccggaccacagcctcctctcttgacttcttttgatagccttagacaaacaaacagacaggagcgcgctgacaattccatttatattttaccaaagataaaaatgaatatattatgtatctgtgtacgcaaacagcaattaatagatgatgtacgtgtcagttgagagtgccagaccgggggtggagcgaaggatcgtgataacttagctgcaaatccatatttcccctccccccaaataaacagcgagtgtgtatttctttcctttgctgctgtttaaccttagagcagcgcaggaatggaggaaaagtgtgcgagtcttcacgattttggtaagaaaataaacagactactgttggtctcctaaccaacaaagttttgctaagaactaagatcctcagaactgcaattaaaaaaaaaatccaaaatcgagttacagattgcagcagcaggaaacgctgagaccttgccgatgggctggcgctatggctcacgtgggcgcaggaagggaagctggatggaatactcgggaagcaaattttctgtgacagttctggcgcccatgagcagagttgctcagtatccttcggcttcagtaatgttttacttcttcagaggagagggtgtaaaacctggcaggagggtcagcgaggtaaaccacatgtcagccgagcagactcaagacaaacacaggttgtgggaaattggggaggaaaaaaatcagaggaaatctctgtaaaacccctgttgtgagcaattccgaggtttccccacatctgcaagtagtttccaaaataggtgagatgacttctcccccaacaagcttccaagggactggtgattgggagctttccttttccaactaaatctttaaaactgtcactttagcaaggacttgtaaaaaaaaaaaaagccttacatattatttgactagtgttccccctatccaagttatcatctagaggaatgtatgaaggtaaacacacacacacacacacacacacacacacacacacacacacaactttgacagataaagtcatctttggtttggagattttactaggttttattcatgtttgttagagaaaagtaagaagccaatcttgaaaaagtaccaagtattttcaacttaaactaaaagtataggaaggctaggtggaactgaactgaccaagtgttctttgcaaaactgggtctttctcagaggccactgcaatgatggagcttcccttccatagatcttaagcttttaatgcccaggatacagagcagaagtagatttttaaaaagaacatgttcaataagcaggtagaggcgtttgattttgaaatctcttgctgagtcattctcaaattctcttacccatccaaaaaaaaaaaagtttgcataattaataatagtgttgccctagtgcagagctcaacaagaatatgtcctgcttagcccatctgaaagcctagagaatgcatatgtcatctagaggattcctgctcttgagctgctgacagtgttcccattccctatcccaaaccttaaaaatgtcccttgttaatctaaatgcctgcaaacatctccttagactattttatcatgtgtaaatttgcaagaagttttacctgtggtttgcctaaacatcacttactttgcaggaataaatatgttttattcatttgttctgggaaaaaaagtactgtatagggataatagcttcattatgtataatgacacctattacttttaacatgtgtttcattatttggttttataattttatgaatttgtagtccagagagttagaatgattttcatagtagaacttcaagtcaaaatacaggaatgtttctttacagctaatatac

SEQ ID NO: 317450 - DNA, 4001 bp, Homo sapiens
tataactcactttttatcatagccatgtagacataacatagagaagcttaccatagccataacatagggaaggttcatcccttggctctaagccactattgtccgtaaatggtataattgccctgctgacgctgtacaggtgcattggcagccagagaaagagagagagagagagccaaagctgtccatctttgcagatggactgaggggagccaggacacagctcggcttgcttgtacccagagagagaaagagttaagctgctgaccctgagggcaagggagagccggacgcacagttgtgtgtggaagctgccgaactaagcagccaggacaaggcggacagtctgagagaactactgtaagtaagctgctaatgagagctgttgctgaataaaatcacctttcacctgcctacggccccctgagtgttctttcagctatctgctcatccaccccctcccctcagacctcagtatgggctggaacctggccctgggcgtgacactctctctcttactctaaaacttgcctcggtctctcactctgccttatgcccctcacacaaattctttccactgaggaggcaagaattaagtttctacgacccatatggattcaccactgctaacgcaagcatttaatgaaagcatagcttcagttttatgtcgagctaaattaattgactcaaatatcttctatttgcctaacctccatcttgccctttcatttaaagtcattaattttaagtactcagtttatgaaaccattcttatttctataattaagaaatcaaaatgttatacacaggaataactgatttttaatacttccaggatctttgaattttatataccaaacttgctaaatccatgaaaatcaatgtctcagtttcctagaccaaagaattttttgatcaacgtcttaatgaccatgactgagcctcatctattttagaacctttaaactcttttactatccaaaaaataagctgagcagaaaaggatgctttaatttgaaagtgtaaaatgcctctaggtgagcttctgtgaattttcattattatgataggtttagcctcacattatatgatacaatgaatcaatacatttaatttgtcttcttttggagactttggaggcatcaaatcaaggctttgactggtcttaatggacaatacccatacaatctatctggcccattaagtttagtcctgtaaatatttactaagggccttctctgcacaagaccaaatagctattaaccaaaggttaaaagaatctgagacagttcaagaactgttctgctttgctttctatgcggttttgtgaactcttgctttgttataaaacaaattcactttcaagtcttttgaccaaattggatgtagcctgggaaacattttcaaaacctgcaattctacctcacgtctagctccccagaacagtgttagtggcctgagaaacagaaggactagctagtgggaaggccccagagagaaaaactgaaacaaacctggccacaaaaacagaagagctgaacagcagcattgcctccgggagtaactgacttatatctcattttctttaacactgagaagagaatacaaatggcgggattaggtgaagagaaatgctgtcaaaatcaacaactagcagctgctctggaagaaaaccagaagacgtgtgtgacccaaatattcatttcccaactcaaaaatatttcctataagcaaatcacacacgaggtgttattcccagaggagtgtggggactttctctgatttaggactcagaactgatacacaaatgccagtacaaactacacagtaactatatacatatcagaaatataacccacttagaaaaacacccaggacttacacagatttttgagacttctgtacttaataactagctatacaattattttcttttacaaaagaaaagaatgtgttgcttaccaagacaacctgcttgtctgttccatttggcagtctgtaagaaattcaagcacttccttgaatttatttcactgttaaccacatttggtgttgaaaacaaaacaaaacaaaaaggctgttttatgccacctaccgaattccactggaattacattacatagttaagaataaacttattttctcttattcatatgtagcatagtctgtgggttacctgataggcctgtattaaaatagaatcacgtttctatggttccaaatttcactacagtcagtttactattgtctacactgatgaagtaaatgaggtaatgttaataatccacagatcataattggctgaattcaaaatgcttaccgtggtggctatgcttggcagaagtgtgcgtctgggtgtgtttcggctgctttgtttttcctcttgccttttcatccatccactattaaaagtggaaagagggaggggtcgagattaaagttttgctgaagcacactcgtaaagagggaagatcattcatgtgctggttacaggatggatgttaatcacgtcttttttgacaagttgattttcagagaaaatttggtgctgaatttttttccactgatcttttcaagctttcttcaaaacatatttttgtaaaccctaagtgaaaaatatgctaagaagaaaagagattcttagcgtgtttttcacatagggtttataaaaatcctggggtttgttgacagcatgttcaaggaagacattctgatagctctactcttgccttttccagtaatgacaacaacaaaataacaacacaataaatgggcaaataaagctatgggattccagctgactgcctctgaagttgatctcagcctgcatggtgtccagtcaaaaccggatgtggggatgacaaaactgcctcccttccttccctccacggttctctcccgtaatcagcttttctaccacacagcgagcaaggccaacttccctaaactaagaatgctgagattcttttcgacttataatgttctgactgtctctctctgtttccccttacctcagaatttgtttaatagaggaaatatgttatgtctacagatattttctgaaactgaaagaatgaaaccacccacctgccatttcctccctgagacccataactggacaggagggaggtgtctttgactaagaatttagttcctggctcccaaaggcattgactttgtgaatccaggctgagggagcaatgcccaggggagggaagtgggcagggcagtaagggaagcttctcagcactctgaattcctgtttttccccacagactcatccccactactcccagttgtgtacatgattacaagtgtgtgtgtctctgcccacccctagcccatacctgggcatttctttttggattcagggcagtaaaaatatgctgtcaattagatgtaatctgtagttagttgtgtttttttttaacaaaaccttattgatatataattcacaaaccataaaaaatttcaccttccataaaaaatttcacaaacgataaaaaatacacccgtttaaagtgtataattcaggccgggcatggtagctcatgcctacaatcccaacactttgggaggctgaggcaggcagatcacctgaggtcaggagtttgagaccagcctagtagagaaggcgaaaccccgtctctactaaaaataaaaaaaattagccggacgtggtggcacatgcctgtgatctcagctacttaggaggctgaggcaggagaatcgcctgaacccaagaggcggaggttgcagtgagccaagatcacaccactgcactctagcctgggtgacagagcaagactctatctcaaaaaataaataaataaataaataaataaataaataaataaataaataaaataaagtgtctaattcggaggcacctacctgcctctttttccccctgctgtccagtgggtcaccacagaacaaacacacacttgtaatcatgtacacccatcaatcaacaaacacacacttcccctctacctcta

SEQ ID NO: 317451 - DNA, 4001 bp, Homo sapiens
tagctggaactctgcgctgagaagtcagagtttctatctcttacccacttcttccccctgcccaataccacagtcttatctgggactacaatgggagaggaactctttttgaacttctcttaatataacaatagtaaaggtcctatctctcaggcaatacttatgcattatgacattttataaaaacaacttttacatagagacagggtctcactatgttgccaaggctgctcttaaactcctggcctccagcaatcttcccacctcagcctcccaaatgggtgtgattagaggtgtgagccactgtgcttggcctcattaaagcaattttaaaagtaggacatacacttttttttttttttgagatggagtctcgctctgttgcccaggctggagtaaagtggtatgatctcagctcactgcaagctccacctcccaggttcaagcgattctcctgccgcagcctcctgagtagctgggattacaggcacctgccatcacacccggctaatttttgtatttttagtagagatggggtttcaccatgttggtgatgtagtctataaatagtatatatatgttaatatcatatccctactactacgttaaaagcaggtaaaaaacagagaatgaccttccttaatacatctttaatatcttataatttaaaagtccaagtcaaaagacatcatcaaatgacaactagtgttttaccaaagaatatttaatcatctaatttatcttttcccaatgatataaagaaatagaaaagagattaagaacctattgaatgttgaatgatctttgcaacataagagtaagaatgacttcttttcagtatttcctacgtgtctgacatggagctaagtgttttatgtccattaccttgtttaatccctcaatgactcaacaaaatggcggccattattattcatattttacagatggaggagctaaagcccagaggtaaagtaacttgcccaagatgaccaactgaagaagcagagatttgaacccagacctgtctggttccttctggatggtaactaaacccaaatgcaaggcacctcaaaccttgaaatgaggtggcttaagatgtaacgacatcctaaggaccgaatcactgaggttgaatccattgatctgaccagctgccatggcggccacttcctcctttctcaccccatgcccctgtctatgaagcttcatgcagctgctgtgggacactctgctaggtgccacaaagttcaagagactttgcctacatgtataaatatattcttaggaaagttataagttcacaagaattgaaataaaactcgaagtgcatcctattcctaattaatagctcagtgtaggtggtctgggagaaagcttatcaagaaaccaaatgctcacaggttgttaaccatcctcttctttacagcaaccacatatggccctctttgtccacttctgaaggaaacggaataagaactgcattgtacaagatccatcagatctgcccctacttttaaacaggtaacacaaatgcagaacttttcaacggggtaaaggagcaacaaatatgccttaaatagccaaaggtttcatccagcagaggttaacatacgctgtggggaaataagagctagaaaaaacttgccacagtgcataggaccgttcaatctgaatagaagagctgaccaggtttgatccgcaatcagtgaaaagaaacccacgctctcaagcatctgcaagaaattcctcagatcaatagccccaaggtcactaatcattaatctagacaaaatagtaaatactaaaaatctaaataaccctacttccctcccctcaatattagctcaaattatctcctttttagaaaatacccatgcagcccttatatctttttaatgagagttacaacaaacaaagctaaggttcttaccccacggcttgcactctctcagcagagctgcaggtgcgtggatgattcgttgacacggtcagaattggctgcaggagggaattgaatcgaggttttctgtaaagcttaaaccccatccgccctcttctgcatgctactggtattgcatgttatatatattcattataatcttagcacttttttaaattgtggtcaaatacacataacataggagttatcatgctcaccatctttctatttttatttttatttttattttttttgaggtagggtctcactttgtcacccaggctggagtgcagtggtgtgatcactgctcactgcagccttgacctcttgcgctaaagcccgcaagaggctgggcttctcagtcccgcaaatgtctgggactacaggcgctcaccaactggcctggctaagttttttgtattttttgtagagacggggtttcgccagttgcccaggctggtcttgaactcctgagctcaagtgatctgcctgtctcggcctcccaaagtgctaggattacggtgtgagccaccgcgcctgaccttaagcatttttaaatgtacaatttagtggcattaattaagtacattcacactgttgtgcaaccaccaccactgcccatctccaaagatttttcgtcatcccaaactgaaattctatgccattaaaaaataatttcccattttccccttccctcagaccctggaaactataattctactttctgtctgtgtgaatttgactactctaggtacctcatgtccgtggagttataccatatttggttttttgtgactggcttatttcattgagcataatgtctttaaggttcatccatatcatttctattattattacatagaataatagaatctttccttccttttttaaggctgaatactattttgttgtatgtacgtcccacattttgttcattcattcatccatcaatggacatttgggtagttttcaccttttggctcttgtgaataatgctgctgtgaacgtggtgcacaaatatctatttaagttggtacttaacattcttttgagtctatacctagaagtggaattcacggatcgtatgaccattctgtttaattttttgcagaactaccatactggttttccacagcatcttagagctctttgatgatgcttttcttcaaggtgcaggtcggttatccctttcatcagttgggtggggcagtcatgtgatgatgggcaggagtaggaatggtgactccataatttcagcaatcaggcaggaagagggtggaaaggagttatctagagcagtggtccccaacccctgggccacagacaggtaccagttcatggcctgttaggaaccgagccacacagcaggaggtgagtggtgggtaagcaaatgaagcttcatctgtatttacagtcgctccccatcgcttgcattaccacctgagctccacaccctgtcatatcagtggcagcattagattctcataggagcttggaccctactgtgagctgcatatgggagggatctaggttgcgtgctccttatgagaatctaatgtctgatgatctgtcactgcttcccatcatgtcagatgggaccatctagttgcaggaaaacaggctcagggcttccactgattctacattatggtgagttgtataattatttcattatatattacaatgtcataataatagaaataaagtgcacaataaatgtaatgtgcttgaatcatcccgaaaccatctctcctccatctccaaacccggtctgtggaaaaactgtcttccatgaaattggtcctggtgccaaaaagattggagacctctgacctagaggccttttcttgaagtgaagtggtaaaataagcatggtattttttaaaatgtagatcgcaaagtacggatcaatttttaaagcaacatttttgaggtttttttcatacttgacttaagatttaggtgactgctggagatcacgagtaaagaagaaaatttccagatggatttgtctacaggaggaatgatcaatttaaacatgaatgattataatagatttatg

SEQ ID NO: 317452 - DNA, 4001 bp, Homo sapiens
gaaatttcatcttcaatgcaacagtgttgagaggtggaatttttgtttgtttgtttgttttgagacagagtctcgctctgtcacccaggctggagtgcagtggcatgatctcggctcactgcgagctgagaggtggaaccttttaagaggtgattaggttatgaaggctgtaccctcataaatggattaatgttatcaccaagggagcagtttattgtgagaatgagtttgttataaaagtaagttctgtcctctcttgctctctctcaccatgtgatgctttccatcatgttataatgtagccagatgaccctcaccagatgcagcccttcaatcttggacttcccagactccagaaccatgaatggataaatttctgttctttgtaaattacccagtctcaggtattttgttacagcagcacccaagggactgtgacaactatgtactttattcttgtcccatttgttttatgttctattgtctctcttttcttgccctcttttaaatttgggggtattccattagattttttctactctgttagtttatcaataaaactgtaccccaaaaaattaactgatagcttagaaacccccaaaacatgctgtcaacttctggcagtttttgtaaatgtaaaatgggtacattataaagaacttaaagatgttccttgcttagaacaggaagaacctttaaaatattggtgaataaatcattttccaatagtttctgctcttgcttttgttgtttgtttgttttgttttgtgttttgttgtttgtttggtctgtcccttcaagtcaggccaccatagctacagttgctctttggtaaaaatcttaataacagagtcaaaagattaaagtcatctcagcaaactttgagttgtctacacccagattactctccttctctttctccgcccccacccaccacttccaatcacctctttctctctctttctctctctttcaaacaggaaaaagactttcctggcttgcatttaagttctaaacacaagttcatatttatagaagttgaagaagttgtaaagggcacttcaaagcattcttacttgaaggactcgactttgcttaaacgctgtaagttgttttctaatcagagacctaactcacacatcctaagaatgaaggaacgcagaggtggggcgaagcctgccagggagcagaggtcagacttgggttagggagccagggtcctggacagacccagagcacggaacctttcccacctctgagccacggtgaccaaaatccaagctccgtcctagcagtaaccagtgagcgaggacacaccccctgccagacgctagctcgttgaaagcctttacccaatctttgtcatccgagccaagaggggccaggaggcggggagagcgaccctaccgggaatcagggaagcgggagggccaggccgtgagggaagcgggagggccgggccggggccaccgcccccctcggcctcccgagggaggtggcggccagaggcccggagccccagcggaagctctccgcggcaacccccccggggcctgcaaggttggaagggcgctcagcccagccgcagcccattggcactgcacgcgcggggtcccgacctcgggctctgcaggaccctcgggctccctttccgtgtagcccctgcttctcccgagggccgacctgagccggcttcgctggtgtccacattcccgcgctgggccgtgcaaagaagcaccggcgtcccgggggcctggtgcgcttcccgctatccccgcccggacaggagctaggggcccaggtgcagccgaacgggagcccgggttccccagagcccgtgaccgggctgcggctcccctccgcccctgcccgacccgaccccaggaaggggtgcagagagaccacacgagtggggagcgcacgacgtacctgggagaactccgagcagtcacctgagagaacgccgagcagccgcctggctgcgctttctcgctgcctccgagccggcctgcccgggactaggaagtaagcaaaagggaaagtccgcgcggccgggcgccccctccttctggggtgcgggaaccgccccttccacggggcacgtgcgccgctgcgcagccggagggaactctggacctcgcgctgagttccaggcaggtggccccgagcgagcccccgcggccgtgcttcccagcaggctcccgcccttgaccgtgagctaggctgcgacaggccagaggcgggtcctgccccgacagctgccccgtgcaaggctgggtcgaagaagagagctgggggcttggcggaggttccaggtcagagaaaagcgaatcgagacgctagaggcggcctgcgtgggattggcaaccacagggaaagctaagtgcccaaccagtattttcttgaagcttcgggcatccaggacctcacatcacctgaaacacaccgtctttaaattccactcctgatgcttttccatccatggaagcccgaactcaggctcatgaatcgtgcttctcctttccccacttttccacactctattcacctgccagtacatctccagggtccgcttccacccaaaagtctatgccctcctgcattaaaataggttcaccctccagactaacacagaacgattttgcctaagggagcagataaggacagccccggatttttttccccaatccagtgacagtccctactggtgcaccatctctagcacctacattccatcccacttctcaccatgcaaagatttgggcttcccacttctgtctacagtttgaagctaagcccttcccttgcccctattccatccctacttcccaaagtaataccaaaaacagtcattgatcaattttcttcattgccacagaacctagctgtctccacggttaggaatatgtataagggaagaaaacaagcttttaaaattcaactgccttaatgttaataatctaccttttatgttcataattacatttgattttcacaaagtgagatatgaagcagagcaagcatccttgttcctcccttacacaagaaaatgtcatgtgaattgtataacatatgacagaactgagatttgaaaccagaattttaccttaaatccagggctgtttctcctaccctgttccacatccctaatcctctctgatggttggaacatcagggaaacttaatcaatagacctaaatatgaaattgagaggtttttgtatacaggtcactatcttactatttttctttatcctgaccatcaggttgtccagctggctgaaaatgctttcttattaattccaaatctccagctctctaccttgtgatttctgacaaaagaaaacttccttcaaattatttctcctgaaactaaaaacttgttttttctctatttctcttccctagttgaactgcctaaggtggattttgatgctattgctctataatcccaaagtcaattagaattgtctggcaaagtcagatagaaatcatttatttagccacaaatcagtgtcctctgcatatattgaaggtagttgtacactgtccacaaagctattagcacgtccaattcagacacagtccttatacttgttcagttcttgacattttctttttttttttttttttttctgagatggagtctcgttttgtcacccaggctggagtgcagtggtgcaatctcatctcactgcagtctccacctcccagattcaagcaattctctgcctcagcctcccaagtaggtgggattacaggtgcgtgccaccacgcctggctaatttttgtatttttggtagagacagggttttgctatgttgaccaggctggtcttgaactcctggcaccaagtgatccaccagcctaggcctcccaaagtgctgggattacaggtgtgagccacagcacccggcctagttcttgacatttttgaagcaccttcacatctagaatttcatctgaatcttacaataacacatgcaataaataattctgata

SEQ ID NO: 317453 - DNA, 4001 bp, Homo sapiens
accatgcacacaaaaatcctaaaaccttcatttccaaagaaaagagatcttgattaataaaaaacttttcatcagtaacatgaaccactggaaaacaatagagataagctttccaaacatttagagaaaattattttgaatttaaaatttcatatccaggcaaagcatagtggctcatccccacaatcccggcactttagaaggtgtaggcagaaggagatcaggagctcaacaccagcctgggcaacatagtgagaccccgtatctacaaaaatattttagaaagtagccaagtgtggtggcacaagcctgtagttccagctacttgggaggctgaggcaggaggatcgcttgagcccaggaggttaaggctgcaatgaatcatgatcacaccactgcactccagcctgggcaacagagcaagaccttacctctaaaaaacaagaaaattacctttgaccaggccaagaaaattacctgtggctcatgcctgtaatcccatcactttaggaagctgaggctggaggatcccttgagcctaggagtttgggaccagcctgggcaacacagggaaacctcatctccaccaaaatttttttttaaattagctggccatagtggttcacacctgtggtcccagctactcgtgacactgaggtgtgagaattgcttgagccagggaggtcaaggctgcagtgagccacgatcatgccactgtacttcagcctgggcaacacagcgagaccttgtctctaaatcgataaatgaaataaaatgaaataaaataaaataaaataagatagggaaatttcacatccatctgaataactaaataaaaaggtataagtattttgagatatgcaaaaattcagtaagtttatagccatacgatctgtatgaaaaggttattctaggacatgcttcagtaaaacaagcaaaaatgcagttaaaggatgaaatgagagtgaagaaaacgttgctgttgaatgagatctagcagaaataaagaaaatgaaaaaaaattaaaaagagactcactcagccttagaattttggaaatattttgtgagggcacatggaattcacattctttgtccaagtgagagacaatattgcctgatggttaggacatggggtctggaggcagactacctggagttaaccactatccatagtttgatttgtaaactttgcaacctttgtagtaggttcatacacaggcacgcccatatgaagacacataccagcacgtaatcatctgtaaacctgggaatcaacttgctgaagccaactccatttttacccgagtaccccacaattgccgataccagtttctgatcttcccatacaccttaacaactttccacttctccacttcttccattatccttcattaggtgaaagaaagccatttacttactcctaggcatacctgaatgttctctcctatctaagacattgtcatacaatgccagctcctgtctcccctccagccaataaaactaacaaaaggggatacgctcttttaacctcttggagttttgtttctttaaggcaaagatgtgatttgctaaaaagactgttgcaaaatgatttccatagcttccctaatgtgttttttccaggtacagaatgctacagagaaaaaaattaaatactgcataaatacattatcacattaactagatattggtgctattacttgtgttctgagttatacccttctcccatgcccatatcatatcccttttcttccactttccttcctgaataattctgactagatttcaagcaccagatcaaagaaagaccaaagaaggctaaaaccacatgcattctgctagcaaactctactcagcaagagagaccctgcccagtaagaacgtgaaatgaacaccttcacttacttggatgactgctagcctttccttttttctttagtccaaatccagacatttcatcagggaagtgtgtggcaaatagacggcactctcgaaagtgaaagtaaagcttgaaaaaaaatgcttttatgtttggtgcattccaagaagggcaaagggagaaaacaaaaacaatctctgacaacctcagagaggcgtttcaaaccgcctctgaaaaacacctagtttttattttattttaactttttttaagctgagatccttggatttcattgaaagggtcacagatttagcaacagctaaagttgaaagtggggacctcaccatttgatgtgggcgggtctggacctctgcaagttaaggaataacagtgaatccctcaattttctgctagactcatgcgaagctgtcagaattgagtagtgtatggtcacagggacagaaaaaaaaatccctaatcaaagctgaagtactttcccttctttcgtctggcttttatctctttgcaacactgtaaaataacaccggcagaaattaacctcttgatccaggaagaaactgagtttcacagcagagaaagagccaaacatggcaaagctgagagccagtcccactcctgctgatccacttttccacggtcagacgcgttagggaacagatcagtatgcccagaaaagttcagattaactaagaatttcgttcttaatttgctttaatgactccaactagttaagtaaatgtacttgttaagaaatgaactcactttttttcattacagatgtgctatgatctattataactatattgttatatagtgaaatatcacaattggaaggaactatagaccacctaatctaactcccttgtttgagaaattaggaaaacgaaacctagggaggtgagtggtttgcctaagaacatgccacaagccaccatatgcttcaatcacacaagtcataaaacaactggacggctgggacatggcattagcttgaactcattgcagagctgatggcaagaaacaagcgtgcatcatggtgcaaagtgccctcttgtgggctccagcttcagctagaccgctttatagttactgggctcagggctacatgtctctgattttcatttgtgacatctgtaacataacaccataagcaaacagatgtcctgagtacgtgactgtccctcacatctatccattgggatgtccaggaaaacttcactaatattcaaaagatttcttctctgtgagcgccttgaaggcagggtgaggtttattctttgcattatagctccccagcaaccctctgaggtagactgtttctttggccttcaatgaaagagactcgtcctcagaattcaaacccttgtgtggccttctcccacgctgactctaggcttggccatttgactagctttgaccagtgggatattagcaagcatgcaacaaggtctcattgccaaacacgattacccaggcttgagaagcaagcaaataaatgattgttgttttaaatttaaaaaaattggaatggtgtcatatgcattattagcgaaataaaacacatcatctcaacaatccttcatacctatcccttatgccttatgactccttatacagattaaatttcccacgactttggttgactaatgaatggctctcgataaataaattttattgatggtctcctgatgcagtagtttgggcttaataccagttcatattcagatattattagtccttaattcttgctagtttctaaatacaacacagattgttttctctctactgtacatttcttaactatgtgcattaacttatttagctatgatggtgattggagcaatagtgaaaaacctcatttttcccctttttaaaagaattaaggctgggagcagtggatcatgcctgtaatcccaacactttaggagattgcttgagcctaggagttcaagaccaacctgggcaacgtggtaaaactccatctctacaaaaattacaaaaattagctgggcatgttggtgcatgcctatagtctcagctacttgggaggctgaggtgggaggatcacttgagtccaggcaaattcaagtttgcattga

SEQ ID NO: 317454 - DNA, 4001 bp, Homo sapiens
tgtctagtgtagaaaatgattaaatcagttatgtataattaaataatagcctcaaatactgtactttgaaaaaatgataatgttaaatgaatacagtaatagaaaattatggccgggcgcagtggctcacgcctctcatcccagcactttgggaggccaaggcgggtggatcacgaggtcaggagatcgagaccatcctggctaacggtgaaaccccgtctctactaaaaaaaaatacaaaaaaattagccgggcgtggtggcgggcgcctgtagtcccagctactcgggaggctgaggcaggagaatggcgtgaacccgggaggcggagcttgcagtgagccgagatcgtgccgctgcactccagcctgggcgacagagcaagactccgtctcaaaaaaaaaaaaaaaaaattatatatgtagtaagactctaattttgcaaaatatgattaaaacctgacatatacgtaaaagctagaggacaaacaatgtgatgaaatataccaaatactaataatagtggttctctgaatctctgaattatagatgaatttaattttctttcttatactttcagatatccctaaaatgtctcattttgaatgtcctttataatccaaaaaagttatcgtaaggcaatttaagagttgtctttatagctgtgtgaaaatattttatatttaaagaaacgtgcttgttttatttggaatattaaaatataaagatggagaactttcagataatagtagataactggcattcacagatgaggacctaccctacaggtccccggcaaccagacccacggtgtctgggttcatgggactgaaaatcagtcaccaggtggaaaagctggtcagctgtccttatggtatcctgccacaaaaacgcaatattcctccagaggcgttcataccctgaggcagttcctagggaatacactaaatgaacaagatagtaacttttctatttattgggaaaaaaggagggaaaaatgggaagatgagagtggaagattagagagttcacagttttttaaagaaagtaaaaataaacaggtaaatgctcttgattttttaaatgcatcaaataaaaagggtgaggaaatagatgaaataagctacatttcagaaaaaaagggtagacaagacctatgaaaattaaaactacaaggaagaagagagcagaaaaaaaattaagtgaaataagtggaggaaagatcacataatcaagttaacaaataggcaagaaaaacattgtttcatttgtcaaactgaaggtggaaggacctggaggaaggcaattgctacactgtgccagattcaagcttgtgaaggggcttggtcccggccacttcctccatttaataaatgtttattcagagtctatttttctgccagtgccatgctacgcactaggcaccagggatataaatatgaataggactgacataattcctgctttcaaaaagcttatgaattagggacagacacagaccagcaaactgttacagtgacaaacgacaagggagatcaaacacacgtctgctgtaaaaacatataataaataggtgccatatcagtggtatataaaaattactgttaaatgttactgaaaacaataaactagagaaagacgaaaagagaaaattcgctgggccaaatcagaagaaataaataacattagttttgttccttaattatcaccacaagcgctagttgttttctatcttttcaagacagctgtaaagacgctgctcttcatcctgctcgtgaaattcaaaggacatttgcaacatctacaaaaaaaaccacttcaaatcattttgcaaaaatttcaaggaaacattacctatttcctatataatgaatggttagcaaacttgcttacttgaagcacctgtgccataatgtgaaaaagccacagaagtctttctacttaccaagatctctttttcagaagaagagaaaataacttgtaaatgaacggaaatacaattgaaaatgcttgacaaacacaagttcttaaagttgagtaaagcggtaccttagaaacagattggtgccatctgttggcccacactggaattactcctacgtatatttttacctttcaaaggtccggaggtgagttagcagttttttctgggctacagacaaaaccagtaatccaattttctaattcgtgtgaggaagcaacttacaaacaattcaatgtgaagaaaaatatttttctaaggtaatatttctctgtaagagtttgcagcctggttattacatttgtcacctgagtggaaagttattttaaacagcctgttttctattatcaccatatttaacatttcaagaataattgcagtttcccttatcaagcaattttgagcattattttagctggatgagatagtttaaaataaaataagtatagttccacaatttgggtttttttttaaaaatcaacttctaaggaaagtttactggttgatacatatttatgactacatatttagccatatgtacgagcaatcatacccacattctgatcaacatttggtgttattaaatggtttagattttaatttaggaataataaataacactgaaatcctgcaagactaatttaaaaatcaattttctaaagaccatttagaagaatttcagaatgacatcaacaaaggctgattaccagaagtctctggttaaacagagacttctggtggacagtaaacccttttccccagacttcttgcttaactgagttctgcaaaggacagaaggcatgagtgaaacaatcattctataatttatctcactgtctggcacaatctcatctttattaaaaaaaaaacaacaacaagttaagaccttacaatttggctaatgacaaagttggacatctccgtaagaatcacttctgctttcaggaggaagagaaaggctggcttcttgtgattcatccttactcatcaaacataacaggaagtctcctcaggcctggggaggctcagtaaggagtggatggatctctgctccactggcaaaaggagacagccagaaagcagcaggtatctgtgaccctggaaaaccagatttgtgaaacaagccaagggaaagggctggctgtggctctgagggaatttcaagtaaccgtggactaaagtcttaagaaaacagacaactatcactgcagatctgggcacattgacatgtctcattaggagattgcatcacaacaccaatgttcagaaacaaggagactattcttgtcgaggctgtcataactcagaaacgtctgtaaggggatgacaaaaacacaaaaatcaagtaatagcgaagatggcaatgacagttaagcaaacaaagaaacagacagtactgggccgaacctccacttggccacttactgtgaggcttgggacaagtcccttaacctccatttattcatccacaaaatgggagtacttttaggaaagataatgaatttaaagtggctggaatagtgactgacacagaagagaagtcataatagtaaggagtttggtgcaaatcatatagtttttttgtatgctgaggggtaaagatttcaggatatactatgaagtgaagaaaatcaaggtgcaggctgggcacgatgtctcatgcctgtaatcccagcacttcgggaggccgaggtgggtagatcaccagaggtcaggagttcgagaccggcttggctaacatggcgaaaccctgtctctactaaaaatacaaacattagctgggtatggtggcaggcaactgtactcccagctactcgggaggctgaagcaggagaatcattggaacccaggaggcagaggtagcagagagctgagattgtgccactgcacttcagcctgggcaacagagtgagactctggctcaaaagaaaaaagaaagaaagaaagagagagagagagagggagagagagagagagagggagagagagagagagggagagagagagagagagagagggaga

SEQ ID NO: 317455 - DNA, 4001 bp, Homo sapiens
tatataacaggtaaactaaattttgatataaagatatgaacttgctaagctccagcaaagatttacaataagagaacattaatgagcaaagtaacaaggatgaacaactataagctgtacactgttactatttatataactaaagttaataacaataacatttactaagtgccaggcactagactaagcactttacatttaatttccacaattctatgaggtaggtactattgttatcccaattaaacagatgggaggttaagtaattttgccaagatggcaactcagggaaagacaggtgcccaactctgtcctttgggaccacattctgagctgtactgaaagaggatgcagcaaaaccactaatgaggttatatcaaaaaaaaatgacagagccagaaatgagccaatgaaaacaggttcatatgccactcttttgacttctatgccaaagcaacgtacttctactatacagcctgataaaaagtgaagctctgatagtcaaggacaactacagtcaaataccaatctatctccccaatcactcaaacacaatgagatgtaattgctttcatattccactctgaaaaggggaaaaaaactaacactataaagagttggaaatcccacaagcaaagtgacaagcaaacactgaatttacacaaatgtgtacaatctaaagtacaaaatatgcgtcagcagtggatcaaaataaagcacaaaaaactcgcgaaacaacgaaagaaccagactgtaagacaaaaatggcatacaatgaaaagagaaaaaaatgaaaagaaacaaagaggccacattgtggacacaatatcgtaacttctgaccagattataaacttttaaaattttgcttttattaaaaattaattgaaaaaaatttataaagcatgtttctatgcaagaattactctcaagaacacaacgattacgtaaaaaataggcaagaaacaacatactgtttcaaaatacaaatatatgtagtaactataaagaaaagtagtgaaattataaatacaaaacttagataatgtttgcttcttaaggtttcctgaaagttcaaagaaggtaacacagggctttcaaaggctatgttttatttcttaaaactacaaaatgggtaaacgagaattcctgaaactgttcatctttacacttgaaatgtgctttagtaacactcttttgtatctactcagtttttaataaaaacaacaaaactgcttcagtgccctggagcgaatgggggcgtaacggcaggattcagggcactaacgagaggtgaacggacgccgaggaagaggcgactaagcccacatactgagtctacccaggccagagaggcagaggtgtgtagggccagcgatctcagaagttttgccaaactcctcgatgcgttacaatggaaaggtgccgggtttcccccaggaagtagtgactagcgagaagttaggcacaaggcaaagaggagcaaggcgacgtgtgagcacttcagcactcggacgcggaactctaaggtccaggcgttgggcctgggactcgcctcccagaggcttcgccccgcaccccgcacactccctgaaaataaacactttgcatcctcccctctcctaggttcccgaaaccgcaccctccctctctgcctgctcaacaagagccttccggggaaccaaccgagcggttcgggggagcaggagggggcccaccatggtgacgtcctcgtggccacggagcagctccgcactctagacccaggtaatctcaccaaccgcaggagcagcagctcacaagagcacccgggccgaatcccacgtggcgcctgagaagcccgcgccgacccaaccggaacaggagaggcgagtgcgtttctctaaagcgtccccgttaactgagaccgcgtctttttcgcccgtgttgggcttttaagctctagcccaacggacagccagacctgcgtgctcgccgggagcggcggaagggagcttgcggcgggaggctgaactctgcctggtgctgagtgcgaggctggggattggagcccgggtggagacgctacacgcttccggccccaagagcggagcttgcccatctgtcccagagcacgactccagagcgcagcaacctcttcagacaagaggttccctcttgcgggctcccgcatctcaggggctgggaccctctcaaaagggccgctcggtgttggctccccggagctcttgcacggcacaggctcctgccctccgcttttccacgtactagattaccttgggcaagtcctttcctgcactgagtctttttttgccctgccctgccctgccctgccctgccccgccccgcccctcttctctttcctttcttttcttttcttctttccctctttcccgccttccctcattccctctttctttcttcctcccgggttcaagcgattctcctgcctcagcctcccgaacagctggaattacaggcctccgccaccacgcccggctaattttttttttttttttttttttttgtatttttagtagagacggggtttcgccgtgttggccaggctggtctcgaactcctgatctcaggtgatccgtccgcctcggcctcccaaagtgctgagattacaggcctgagccaccacgcccggccgagtcttagtttctttatccggaaaggccacttcctcatattcaaggcctctgccaacccagtttttgttttcttctcacagcatgtgagagtctttgtttcacccatacatgttagaattccgtagacaatgtaatcattcaaaaactatttattgaatgcctactgtgtgcctggtactggggatactccaacaatatccctcactcagctcattttccaggggatggaggcatgtaaaaatattatttcaaataatataagtactctaataaaaattagctggcgggggcatgtagaaaagctgttttacacatggtggtctctataaagtcctcttttagaagtgataattgagcagagaccggaattgtaagagaaaactaggcatgggaagaagctccaggcagggtgaagctggtgtgccttgatatgtgtgtgcagctgttaacagttgagggtagttggctaggtccttggcgttttgaacaaataattggacaaaacacacaaataaagcaaggcagcgaaagcagagatttattttaaatgaaagtacactactccactgcgtggaagcaggctgtggcaagctgctcaaaagcacaggttgcagaattttctggggtttaaataccttctagaggtttcccattggtcttccacaagtctgattggttgaggaaggggaccaatctgaggcactttcatttttcaactgccacacagaaaaagaagggcttgcaactgccaggcagcaactgccatgcagaaaaaggaggggttgaaggggagtagtctttcaactgatatcccatcagcacaaatcagtcctagcttccctgcttccagaccctattctcctgccgcacaaatacttgtatttaatcgacagatatatcaatttttggaaataatttaaattgtaaacaagagtgtgtccagaagattcctgaatctaggggcaaggtattttcacatggctttttttgtgtgtgaatctatgcaatgaaggtcacctttgaatatatactgtggaggcagcacattcatgcatcacttaaggacggggatactttctgagaaatatttcaatgggggttttgttgtttgttttttgtcatgtgaatatcatagagcacacttacacaagcctgcatggtatagcttactacccacctaagctgtatggtatagcccattgctcctaggccacaaacctgtacagcatgttactctactgaatactgtaggcaattgtaacacaatggtaagtacttgtgtatctaaacataagaaatgtacagtaaaaatataatctcatgggatcaccattgtaatgcagtc

SEQ ID NO: 317456 - DNA, 4001 bp, Homo sapiens
aacataataggtcacaacaatggatgccaaaatccagaatccagaatggatattaagtcttggaagaggtttctcctttttctcaacagctgtggaggtttctgcaaataagggagatttcaacttattaagttaccacaattttgcgaggaaaaattacacttaagccaaataaaatcatttcctagagctaagaaacagtctctcccatgataacaaatccttctgtaaaacccttgagataggtttatatttacaaaaaataagagcccactataaaatatggtcaatacagtcaatttatttcctctaaatacattgtgaaatcaaatttacactttcatcgtctttcggaaataacaatgtcacctggaaatgtaagaattttaatattatgtttcacatttcttctaggaaagtaattagtcttgttaattaggaaaaatgccaaaggcaaacattagcgcatgaactggacttgtggtcttccaagaacacttttataactaaattttttttttttgagtcggagtcttcctctgtcgcccgggttggagtggaatggtttgatctcggctcactgcaaccaccgcctcccgggttcaagcaattctcctgcctcagcctcccgagtacctgggattacaggcgcctgccaccacgccgggctaatttttgtatttttagtagagacggggtttcaccatcttggccaggctgctctatttggccaggttggtctcgaactcctgacctcgtgatcagcccgcctcagcctctcaaagtgctgggattacaggcgtgagctaccctgcccagcctataactaaatattttagttactttaaacacagctcaaaagtggaaacggcacaccagagctctagttccagcacagcactgtctagacaggtgatggacaagacatttttcctgtctggaacgcaatctgaaagaatgggtggatgggggttgggtcagatggatgatttctattaagttttccggggattctgacatgccctctaggttcacgtgagaatcaatggtccacatctgaggttttgggcctttagatgaccatcggaaaccctgggaagcatgttcgtaatattctgggatatcctcaaaatgtatacatcatcatgcctgggcatgaggttattcgtgtttttaattttaaaaggtaataaatggacgtggttttaaaacatatgagataaaaaatatccaaaatgaagtatctgtctcccatccttaacctcagatctaatccccagaagcaaccaccacttacaatttctactgaattcttccatattctatgcattcacaggtgaacatacatcacaagttacctgttttgtacccaaatggcggcataccatagtgttccacacttccctttgaaaatcatccccattggtacatacgagtcgacctgatgtgtcaggtatacatatacccaaatttacttaaacagctttctgctgacgggcaaggcagatatttccagtaattcgctattacaagcaatcctgaagtgaaacactgcgcacatcattgtacactgcggtacacgcatgtttctggtaaatccttaagacttaaaactggtgggtatttttaattttaatcgctatttccaaataggtgtcaaatcagctctccagagaattctgaagcgcagctgaaatgacgatgcacagcactccgcgattctaaggatcttccctgacattaaatattcgacttgcaaagccgaaactcagtccttccagactgggccagggctgccggaggccggccgttttccgacgcctcgcctctgagaacctcggggcggcttggtgcgcgcctcacccggcccggcgtcaccctcgcggtccagctgggcctcggcgtccggcaggaggaggaatcgccgccggagctgctgccgggcccgcgaggagtccatcttggtaccgccccgaaatgcgacggaagtgacgtcagacacagcgcttccggcgtccgctccgggtctggacctcctggcgtttggattggagactgtgttctcttcgctgtttagttagcgagcagctagggtggagtcggcctcaaaggttccgctctcatgtcggcaagtgtgatttgaattttaaaacactgagctttgccggtggaagagttcccaagtttattccgacctacggaagcccaggaggaccaggattaccgctgccgctggatgcgtccagggccgggatgcgcgaccgtgagacgctgcgcttccgaagccctcgcaggcttccgggtgccagagcaggagacataccctctgtccagccttccactctcagcccccagtttttttcctacttttgcttttcaggagtcgtccagcaagacttgaaaggaggagaaaggcctgctggacaggatgctagagcctggcagtgaccacttgggggccctgggcattaaataaacttcttggggcccgtttcgttattacacttggctctagatttgttgtgcgtttcagtgagaagtacctgtatgtggttcatgtgagcctcctcctcgccacttgtgaaaaatcctcccagcctgaaccgagggaactaaattgctttcccagcaaactgcggttttccacactgctcacgcccacaaactgtgtgttacgagttcacaactttttcttcgtcaataatcccgcgtattactctcccagccgtttcccagcgtgtcatgtgctgagaaatggtgggcttagccacgcaaacgtttactgagcatctactatttggtaggagctgttaggcaccatgctagcagtggagataaagatgagtaagacatggccttgcacgtgaggagctccttgtccaaagaaaaccacagaggtatattacaagaaaactctatttgtaaatgtatgaaagcatttcatcaatgcagccaacattttctgagcagctgcatgtgataaaatggtgaggacagaagaatctagtagaggaagcagcttcaatacagtgccataataaaaacactgtacatggggcataatagaaacactgtacatataaagggcagtttattctgctgcagtgtgggagagcagggagagtggtttcaggtgagttgaatacaggggtggagagccagctacataggaagtaaaatttgaattagtaggcactgtttaatatcttcgatgtgttggggtgtttgtaaaaggaatgtaataagaaatactcaagaaaagagtgccagccgcgcgcggtggctcacgcctgtaatcccaacactttgcgaggccgaggcgggcggatcacaaggtcaggcgtttgagaccagcctggccaacatggcgaaaccccgtctctactaaaaatacaaaagttagccgggaatggtggccggcacctgtaatcccagctactctggaggctgaggcaggacaatcacttgaacctgggagaaggaggctgcagtgatcctgccactgcactccagcttgggcaacagagtgagattccctctcaaaaataaaaataaaaaaaattaaaaaaaagagagaaataccaaatccctactgatttatcatttcttcagcctttcttcccccttcggagcacaggatttaacagctgggtggatcatatggcctttctaaacaatacctcctttatcctgtttttttttttctgttttttttttctttcaagactcctaaagaactggattcatttattcaaagtcaactgaagtctttgccctctcttctctctcgtacggggttagaagccttgttaacaggaagtgaatttgtcccatcaaatacaatcttctgttgattgtctcctcgaaaaagggtcagtgcagggcctccgtggtaactgaatactcccaagagcatcgccgctatcccaggttcccatacatggtatgttcaggtcagatcaggtttctccttttgtggtttcggggcctttgaatttgga

SEQ ID NO: 317457 - DNA, 4001 bp, Homo sapiens
ggctaacacggtgaaaccccatctccactaaaaaatacaaaaaattagccgggcgtggtggcgggcgcctgtagtcccagctactcaggaggccgaagttgcagtgagccgagatcatgccactgcactccagcctgggtgacagagcgaggctccgtctcaaaaagtaaaaataaaaataaaacaggtaactaatacctaataaagcttgaaaactttcaaactaagttaaaaataaaaagagcttgacatccgactgtgaggccagctgtgctgtctgctccaggtgtggctgccacaattcacttgtggtccctcataggcctctggggagggtgcagctggaagggctacagaaacccacccagtagccctagaaagtggcctggtcagggccccagccccactcagccccatccatctctcaagtgggcccccagcccaccctctccatgaggcaggcctgggcgcctccacccgacacctgcctccagttcttctgggcccaggcagctgcatcctcaaaccaggatgtggagggtcacccctcttgtatccccagagtggcaaacctggccagccactggccatctgtcctcccagggctgcgtctgcccccgtgtcctccagaggtacccccttgaaatccccctccagccactgcacaccccacctcccacctgtccgtcatccaatcagctgagagagggaccttccagagccccagctagcacctggggcccagcccagcacccccctggacaactctgagcgtcccacctgcactgcacagaggccctccccagcctctgcccctgtggcgcccccaaactggaactgcctccaaatccgcctgttctctccacacccaccttccaaggcctagtgcagtgccaccctccacacagcccctccgaccccttccgttggactcaatcaacagttgccttctcctggccactgcccccaaccacgacaagcaagggctgcttggccttgcaacccccaggcacgtgacggttcaggacttggtgggccggagcatcccttgcccaaggttctgaacttgggttcccgtcacctgcaagtcagtgccggcggcgcccctaagcgcgctcagcccacgccgcggtccctctggatgaggaccggcgcctctccccagctgcgcccaggcgctttcggggcctcggggagctggcggaggcctcctcctgacctcccagcaagccctgcgcaggagaggatgcggccggccggcccgagcagcctcaccgagcggcagcagcgagtggcacaacagcgtggcggccgtgcggcgcaagtggaagggcacgaaggcggcgtcctcgctgcccagccagcccgacagcaggttctgcaccgtgagccccgccgcgtggaactcgttgggcgtgaacacgaagcacacggcgaacaccagataggcgagagtgaaggtcacctcggggctgtccatcgcgcagccgccgggaagctgtcgagctaggcccccgccccggcgcgcggacgaggccgcagcgcccagtcccggacctgtcggttgcggcggccgccgcccggccgcccgcggggcactctaggacatggagtcccgccgcccggccgcccgcggggcactctaggacatggagtcccgccgcccggccgcccgcggggcactctaggacatggagtcccgccgcccggccgcccgcggggcactctagggcatggagtcccgccgctcggccgctcgcggggcgctctgggagatgcagtccccgtgcgggtgcggcctctcttctcggccggccctggaggcggcaccgcacctgtgcattgagcacaggtggggaaacttaggcctgagcgaggccctggccatgaagccccgcccagtagcgtcagttgcggaactcgaaattcatggggcgactgcgagcccggggtctcagcttcagacaccctggcgtgccctccactccggaaacggaaccgtcggcgcccgagcggggggtggggggggagggagggcggagccggcgaggcacagcttcccattggacgcccgccctcctgcggtcctgcccccggccgcgcgctgattggccgcgcgaaggcaaccgtcggcgtttgaaactccggcgcgccggcggccatcaagggctagaagcgcgacggcggtagcagctaggcttggcccccggcgtggagcagacgcggacccctccttcctggcggcggcggcgcgggctcagagcccggcaacgggcgggcgggcaggtaggagagcggctacacggcgcggggaggctggggtcctgggggcgcgaggccgtcccgccccgccccgccctcggccctcgccctcccgccccggccgccgctttccccgggaagcgtcccccacggctcctcctggggccgccgccagaacctgtaccgcgccctgtcatgggacccggccctagaccgaccgccgggctgggccccctggatggtggccaggggcggctagagctgggccaagaccgacggcggagcgggcgccccgaggtgctttgctctcctcgaccctctcctgtctctcggtcgcccaccttggctctttgttggctcccagcacgcggaccctcctgttgttctttggtcccttccggcctccgtcctggggccaactccatctaggccgcctgcggcggacacctgggcccctaccgcttccccgcacctgctgcgccgctccaccttccccccgcaccgcatccctcttgtgcaccagagtagcaccaaagcaccagcctggggccggtcccttctctgcccagagcccctcccgggcctccatagtcagtaaaggcccctcctgactaaggctgggtctgctgctctcccgagctcctccaggccgccagaaggcttcctccgagtcactttctccctgagttcgaggcttgcgggtcccccagcgatccagcaccccttcccctgccctgtacccagttattcagggcgaaaacctaagcgtcgtccgtaagtcccatatgtgccagtggccaggcccgggtctggtctggcatctactccttgggctccagaagcctgtggtttccctgcttcccttctgctcttaacctccccacccacacacagcaccacagtgggcttctcaagctgcagcaccgacctgccggggctgccccctctctcttctccaggaccctccccaactttgctcttcttcaaatcaaagcctccccaggtccccctccaccaccaggtgcctgtggggttcctgccctggtcgacactcggttctctctggcagcctttttccctacgtcattccctagactgggaacgctgtagacagaaagggtggcaagtgtgtgggtgaccggcgtgaggacctgggcagccctggaacctgggactgactggaggctctgatgtggaagttccttggcacctgttgctcagctctgggcttcccttgtttgcgcatcgtctcccagctcctcctctgggccttcaccctctcagcctggtcttgtcccgctgcctagcccggtgggagagagcagaccagagccgctgtcctgcttttctgccctctactgcccggtcctgcctcacgtcacacgcagaggcctgtggggagaccagggcttcctctggctcatccgggtttcttattggcccgggcttttccgtctcttgacttctgcttgatatagtaatacagcagtagagattatgcaggcttgggttttctttctcaccatctcagcctgaaggccctttagctcttggtcccaggaagcagcagtgctgcccatggctccccctgccaggctggagagtgagtctctgaagcaagatggggactcagtctgaggctttctctgccaagagacacgtgtgggaggtgtgagttccagagcaatgagcacacctgtgtgggaagtggtcgtgccccttgcagcagctgtcacgtc

SEQ ID NO: 317458 - DNA, 4001 bp, Homo sapiens
aagaattagacattttttcataaagttaccatttggaaaaggccactgaatacaattcagatttttagtttcccgagatacatgagaaaaaagcaccaccaaagtaattttatcacaggaggtacagcgtctttccacaatgccatcttggattcatattttgcacactggccctttggaataagccctctggaatagaagcagaataatccagtggtttcttttttcctgcaaatttaatgttatagtaataacttcttgtatatatgtattgaataaagtacacctgaaatcacctttccttgttattttatttcacaatgacaaatatttaaaggtccatgtattgttccttatgtgttcttgcagagaatattaaatatacaacaacctacaaaatatgttatttaccattattaaagatagtttaactgaaaacaaggatcacttcaaaactggtcaataaactttagtaaagaaaatgtgtatttgaaattgtgtggactttcttaaaacaaaaacacattgctattaagaaaacatcctctatagggatgtggttgaggaagacacactgaggcacatttcaacattgacacattaacactattcaataaaaataattattattctactgttaggctcaaagagaggttcagccctgcagtgacttacatgggttatggctcaagggtcagctgaggcaggtgcttgctgctaagataacagaggtgccaagataacagaggtgcaacaggtcagagatgcaggaagtgtcttgaaaagctaacctatgactaaaaagacacatgactgggtgatagctaacacatcattttctccccattttaattcacaacaagcaaagcaaaacaaaacctttatgtgtacattgatagaagagaatgtctaaccttcaagagtggcaaattattttattgagaaggctccacaaaggccctacacctctgaaacggagagactaatttgacgtgctaattagagtgcatgaggtgcatttcgactactgaataaacatcaatcagttattacctatagataaatgaagtttattgcatgcagctcttgtacatttcagagcatgtgatcttatttcattgtgaattggcaataacttactgtctttaaaaaggctctaccgctctctaaaataatgaaatttttgtggaaaagaaaagcagtatcactccatccagcacatttttcccaattcttcctgcacaaaacctaaaaagtctcaaacattattttaatgttttcttttcagcgttcgctgatattttgtcaaactatattaattcatttttattttattacttttgtttcatttattagtaaatacttctcctttacatttttcctagtaatttaaacttctacgcagactttgaaaaaattcgtatttggtatgttctgatcaatactgcttgctccactccaactaaaatttcatttttagtttcatgttgattttcccaaatctccaggcaagtaccgcctgtctttgggctaaaattaacagtgcttgaatgtatttattccgagccttgatttttctttttaaccatgagcacgtttctgaaaaatcatgagacgctcccctgcaaagcgacttggctttcctttgagtggctgtactcactgcgttccgggctggcggctgaagctccttcctactcagcgccggcgcgatccgcccactacgtgccagtgtggagccggagcctgactcattccctctacgtgctgggggcggcctggccagcctttactttctgcggggacaatttcccatacaccggccgggaggagaggggagggctctagcacccgtgacccagactcccgttcccagggtgctcgcgaagagcgccaatccagccttgacttcctgctgggacgtttacctccacttaaggagggtggagaaaggagggctttagcaccggtgacctagaggccttcataggacagcaggttggggaacgccttccttcagttgctgtgctggactgaattgtcaggtggctcaaaaggagtcgtcaagccctgggtcggtcaaccaggaaactagaagagttttgtgtatttcaagaggtgattattcaggaaactctcagcatgtcaccctctctaagtgtcacagagggaggtattatttgtgcagtttatggataaaacaaaagtctgaggaatttcacaccattgtaaaagattatctcaagtgaatttttccacttggtattaagaaattcatctgcaccactgacgtcattaacatttcttgtgacattacaagatttcacttgtaatcactaattctttgtagatgcacctaagccatttatctgtacaggccatttatctgtattttttttttttaagacggagtctcgctctcgtccaagctggagtgcagtggtgcaatctcggctccctgcaacctccgcctcctgggttcaagcgattctcctgcctcagcctcctgagtagctgggactacaggcacccaccaccacacctggctaatttttttgtatttttagtagagacggggtttcaccgtgttagccaggatggtctcgatctcctgacctcaggtgatccgcccgcctcgccctcccaaagtgagggagtcctctcaaaaaaaaaacaaaacaaaaaaaacatctcttcatgtgggttcgcatacaccaaaggatgcaaactttaagttggaaaggggaagtgtaggttctgtgctagtctgagttcaaagaagccttctctgaggaagtgctatttaacccgagaccatccagtggttggtaatgggtgtagcattcacaggaaggagaaaacacaaggactgttaaaatatgacatttcctagaaggaagttctgccttaaacattaatcacatccatagactatcatgtcagatgagcagatgggaaggcaaaataacatttcatttaaagaattaaagcagcaaagctttttcacttaaggaagaggattaatttagcagttcagaaagattttgaagaaatcagttcccctttccacacatgcacacctaagacacacacacatacacaaacttgcttccaaaaatatagggcctaaatccaacctagaattgtttcacttcatggtcacaagatcatgtggtttattcttgcttcactcacatggagaaactgaagcttgtgtcagcatttgctgagaatttctaaagtctaaaagtgagttgggggctgaattaggcctgagaagattcattagggatatgctaggccattgccttttacattatgccacagagcaaatccaaacatgcatgactctattcttaaactaaaatttttctttcaaattgtttcgtatacatgaatgcctaaacagaatggtctgtattgggagagtcctggcagacactagaagatccaggttctgactttagcttcgtctgttagcaatatttctcatggaaactcatttaatctctttaaaccttagttttcttatatgtaaaatgataataataagacctgtgcacctcccccttttatgtggtcaaaagagatatatatatatatatatatatatatatatatatatatatatatatatatataacattattactaggacttctggtttctgctctgacatttgaaaggtgtgaaagtctccacttccatcatcacaacaagaaaaaaatgagcaaatcaaaaatcaactactctttttagatctgcagagaattgatgtcataggacatgccacctctttgcaaactgaagaaataggtgaatacggagaattacagcttatcaggacagcaaaagccactggagccagtaaaggataggggggcatttatacagtatttggcctattgctgaaggctgagtgtggactaacttgagagttgaaaactcagagacagtgggagtcattcatatgggagcatccacacattaatgagttttac

SEQ ID NO: 317459 - DNA, 4001 bp, Homo sapiens
agacaagagtgtaaagcaaagggccttctctcttgacaattgcaaagcagataaagtgagcccaaaaacccctgcaaggtcattgtgaacatgattgtggtagttctacaacaaaggctaaatagaacgcattattgtgttcacgcaaaaaaaaaaattactccatagagcaaattatccccccacaaagcaacatggaaaaggtatttgtaagaaatgcatgaattaagcaattgctctgaagacttaaatgccaatttaaataatccaaacagattgcattcagctaatggcagattataataaacatgcattaaagtgtttttcaaatactttaatatatttgtgaatgtcataacatctatcaactagtcattattgttagcaaaacttctttacccttttatttaccatgtccagtttgtgagcttccaacttgggggacttgcaaaacatttattaaataatgtataaaggacacaccattaaaattcctacgcttatgccttgaagattaaactcacatttctagctcattaatagatgacagctatagttaatcctggaaacatggagtctctagaacacatacaagaaaaagtttgggatttgatacatgagagctgagactaaaattctttgatcggtcacatatatgggcctaacaatttttccttgaaataggaaactttaagtaggtcagtttaatgactgctaccatggagtttataaatccacactcaactatcctttcgatgaactgctgcccagaatggagttatagccctgcactattaaaatgtctttggttcaagcagagaaagatgcagaaactgatcctgccatttaggctttgttattgttttagatccaataactgtttggttttgtttttcaacatggcattggtatatctggttccccaacaggacctcgcatgtaggacatcggagtgggttcactcgggaagatggacttccattctacctgagctatgttcccacatgcggtcacaatcctggcccaaccgtgaaaggcggtctggccggaataaacctgaccaaaaagatcagtgaaatgtgtgggacatcataaagtgctgtgggggtaggggtggaggaaaggaatgagtagagaaaaaaggagcatgaatttaaaatgggaaaaccctctcatactccatttgattcatttaaggaggggaaaaccactcaaggactctctccagaacccaaagctaatcacttttttattgcagcagattaccaaagagcctaggtaacccacctaccacggcctcccgccgaaaaaccaaaaatcccatttcttcccaagtgtgcgcccaggaaaggaaggaagactgtgcatttagagtggagggcggtacacagggcaaagcaagttagtgcctccttcccagatcccctgcttcccgagccagcctgacctggctaaccgcaaagtgcagggagaatggcacagggaccgggaggtcaaacttggggtcgcttctcacccgagtccacccgataacgagatgatggggcggcgggtggggacacctgtcaaaggacggggccggggccggggccggggccgcagcgggcgggctggctggcggcactgcggcggcggggaccgaggcgcgccggctcgggcgttcgcaggtcgcggggcagagccggcaccgactcctggacttgccggggagcgtgcgcccgcggagggctcgggcgggcggccccgcgcccgggacgctatgggagggggccgcagccgagcagggccccgcagccgggcggacccagccgccccagccgcgctgcagcccccgccgtccccggtctccgcctgcgggctgcgcacggggccgggccggacgccccctggctgcgcgacgggcccaggcaggggagggggcgccgcgcctacctgctctggtgcggcggggccgctgtcgcctcgaggggctgtgacctgctgcggtggcggcggcggcagcagtagcggcgggtagggcgcttccttcaggaaggggtgggatctgctcacccgcccgcccggccccctcctgccgcgccggggcccgcccccgacttattctggggtccccgctgctaggccttcggggagagttgatcccctgggtctcgggcttctgccacccccccggggcccctaatagtcacccggggcaggagccgggtgtgggcgggcgagccgcttccttccgaagcctttgtggacgcgtttgcctggcgctcctcatccaacaaaaggaaggacagaatcttggatcctccgcctggtggttatttattcctgacctgttgtaaccttctgcctggctctctttcgtccgcacacctagggtttttgcacaaagcagctaaaattcattttcatgcccattgactgaatgtagttctcctccactcagcgctgtcccgcggtttttggtttttttttttccatcctattgaacaaacacagagccaacttcggaccctggcaatgaacagcagacaccaaggccgacctcccagcgccagcttgcagctttcctccctgggtctcgtctgagtccgtcataaactgtgttcatcagcgttttgacagcttcccccatcccggacccccaacctaccatgggaccccatggcaccatgtcagtgacctctagcagcagcatggatcaatgccatttttatcttaggctcatcatgagcctgggttccaaacacaacctctctggcctccaacaggtggctctctatcaaccggcctttgtcagtctgccctctattcttttgggggcttccgtagcacacctgtctcctttaaactgctgtctctacacaagcaggcattccctttttttctttttctttttctttttctttttcttttcttttcttttctttctttttttttttttttttgagacggagtcttgctctgtcgctcaggctggagtgcagtgccgcaatgtcggctcactgtaacctctgcctctcgggttcaagcgattctctcgcctcagcctcctgagtagctgggattacaggcgcccgccaccatgcccgattaatttttgtattttcagtagaggcggggtttcaccacgttggccaggctggtctcaaaactcctggcctcaagtgatccgcctgcctcagcctcccaaactgctgggattacaggcgtgaaccaccgcgcccggcccaaccaggtgtttctaagaatcttctccaattcagcatattcaaattctgcaattaacgttcggttccagaactctcccttccccacaattcttgtgattattgtctactatgtgtatattgattctttttttttttctgtatgttgatttcttgttactgttttctcctggctactagactgtaagcttcctgagaccagggatcttgccttctcttgttttccttattttaatgagtgggactgttatccattcaattaaaatagcaaaagcaaaaactgaatcttagtctagactcccttgaaagtatatgctcaattttgtgggaattagcttatgtgtacttttctgaggagagtaactacacattaatcagaccctcaaagtggtctgactcccccaaaggtaagattgcttgaggcccatccatgaacccctcctctctctactccctgtccccatgccattcatttctctctgcaataacggaaagagtcctctagctagatcttccaattcattctttcagaagtagatccagccaaagaattagctgtccctcaaacacagaagtggtactctgttttcacatcagaatcaccagtgggggctttagaaaatgatgcctgggttcacctcagacccagagtcaaaacctgattggaggtggcgggggaaaccagaacacaggtattttgacaaagaaccgcaggtgattccgacatggccatgccatatcactccctttcttgggaatagggctcccaatttgtaa

SEQ ID NO: 317460 - DNA, 4001 bp, Homo sapiens
ggttgcagtgagagtctaaggggcaaaaatgaggaacaagtgaaggggcataaatgaggggtccttaagggggaagatgtgcacgatcagattcaggtgtcagaaaggcaactttaaccaagtctcttcagattctctttttgcatctcctgaattgcagacactaggactcaatcattttttagaagctaaaaaaaaagttcaggcaagatgaattagtattaagggagtgtttgaggcacctgtggcagtgttgtgcaatagaagaggtggaaggaggatggctaggcttttcttccctgatgtcctactacgaaaggttccagagctcttggcagagacagtgattggttccggggcggcggtggggggaggggggcagtggtggtggggggtggaggagctcaaagaactctggagtagaagccagaagagctgactagcagcaagacccagacatctcccttcttccacctctgtttcttcacctgtgtgcccaatatggtttgagctgcatcatcttcaagttcccttccagctccaaaacactgggcataaaacaacacatcaacttccaaacccactctgaacactaaactcaatttaaccagacatcttttcagctggaatgatttgccttccactttgttttctacctcagatgcctgggggaccacatggagaacacccaggggaagagaaattgatggagtggggtggctgggtgctggctgctgacctccaggaagttgtcacatctgttaggttggggctgatgtccctcattctatctaaagaactgtagcttgagaactttccttttgcttggtaaatactgccctacactagaagcagtcggtgttcattgacagaaacaatgggcagccagtgtatttgcccaaaggcaagtcaacaagagaggcagctgaaggtgcttgtgcttgttgtagcaactggcaagggtgtaaatcagttgttgcttttagcccataataatgagattcaatattgttttttccaatacctttgattggttccaatcatattactttttcaaacaaatcttcattagtaacaatcaatgcaaaaaaaaaatctgtaaaagtaacaaggtgcaataaaagtagatgaaagaccttacttgatgtgttagagggctaccctctaacacatagctctttggtagctcttcggataatttcccgtttcctttttttttttttaagtttatgtcgtttctttagtatgctttctagtagtaaattttcacaccccagtttttccaggagattttggaatcagcagacttctcagcccacaccataaaaagcaaattaatcatgtctctgtttcagccaattgaagcttttgtttttttttacataaactgccaaaaagtttatggttttcttaatatgcccattaaagctggtaaattacagggacgcacacttcctggaagacaaagactgaaagagggttaaatgaagtgagagctgtagccagtttagacagctgcagcgaaagcgaagtcccctctccatcccaccccccaaaaaaaggagttctaattttctccacttctttcacagaaaggattagattttctgggtgtcaccctccccggcagagttctgtagcctcgggcaccctaccagcttttgcgatcctccttcccaggagtaggaagtggaggcggcttaccccggccgacgggaacgagcgcgatcaccagggcgaagactagggctgcgcggggagcctgcatgtccgctcgcctcggcagaggcgcgctcaggatgctgcgccgggctgcagcctctctgaaacgtgaacatttcctgtttcctgcttgtttgggtcggtgctgacttgaaggagaggtgtgtgcctgttttttaggaagtgatgtaattctgcaggagcctgtcagaccagcaaggattgcaaaagagaagttgctgttgaagcactggttctattatcacgcctctccagccctttggagtcccggcctccagcttttgaaaccgtccccggggcaacagagtcccttgctcagatgtcgttcggtatctgggactgggaggggtcctggaccacacgcattctcactctgtgattttgcttatcccccaggtgaggctccggggctgcctagaccctaggaagaagctgtcctgtagaactttctgccctgatggaaatgttccaagtctgcgccgtctgatacagtatcagccacattggccactgagcatttgaactgaggctagtgctgatggaatttaaattttattgaatttttataaaattttaataactccaagtggctagtggctgctgtgttggatagcgcaggcccagacagcagggacaactgcatcatcagaaaactgccagaccacttctctccgccaggtccattctcctttctccactctggaatgccctcctcccaccaaggcccacgccagatggaggtggatgccacacccacaccttaaggttatgttctgcttccccagagagaaatgatcttttcaaggtccatttccaaaggagaatatgctctgagggtggaggtaggggtgaatctgcatctcaccttccttccttcttacttgacaatcaagttctcagacaacaaacaaaacaggacagaaacgaaatagaataatggtagaaatcctatccaatcgaaacaatacagaaaggttgtgtctagtatacagtggagattagtgtgtgttgggtgttctattggaggtccttcccttggtttaggtttagggcctaagcattcagaatgcagtttcataatcgtggtgccaagagagacagacagatggagagaggggtagtgttgaggcatcagacacatctcatctctaaacctttccctgcagatcaccatctgagtcatgacttcccgtcgtttgtcttcagtgatctggttggtgcaaacgtatgaggtgactggaattccttagcccctgacatagctgttaatttttctttaatgcattgctgcttttcaatgtcattagtcactgtttatctcagttattattcacaagaaataggttggtgattcatgtaaggatcagtttgttaatggatttacagtatgcactttaatgttttaaactggcaattaagtcaattcttgataaaatatgctttttgcaccacaggtgacaatacagaacaaacagcaggagaaaatagacgtgctcaaaactgggtgattgatttgaaaacaacagagaaagaactattaattaaacacttgctgagcatgtgaatagatcacgggctccaagacctgctggtactgagttggggtggcaattattcctgtacaagcacgtgtttctgcagctgtgacacacacgtgcaagaaagcaggcccagggcttgggagttctctccattttaccatttatgccctattaaaatattattaaatgttattaaaacattgttgaatcccaggctggaggcaaatgtttgtcaagggcaaggttgtcagccttcgtttctttcatcttaaacttcagctccctgtggaagcttttgcagtcaggtgtctgtggattggaccacagactgtcttattctgtggacctctgctgagccccatgacatggccaaacagttcattactgtttcaacaagtgcactatgcattgcttctgagcagtgcaacactaaatcagagtgaggtacaaaataaactggagctgcagagaaatcctgcccaaccatgtaattttcttttgacccctgtgctctctaagacccttagcatgattaagctgatcttagggggaagaaaattaccatgattgatcagaaaatggtagcacctcaatgatctctttgctgcagttaaaatcccagggaggctgtgtggtaggtaaagggctatttacctctgttttaattttagcaaccattaatttaggcaaatagccacccagcctcagattaaatcc

SEQ ID NO: 317461 - DNA, 4001 bp, Homo sapiens
atagaaagtgggaaattatctaatgtcttgggccaaaattattcacctgagactatttttcctttgaagcattaaaataattgtcttacacttcacttttatattatcaacttaggcaaactttagtatttcattgtttttagcctctctatatggtctttgtgtctaaaattagtattttcaatactatagttatgacttagcttatcccacactgacatgactaaacccaaatcttcccttactgaagattgagtatatctgcatcacatatttcaccccatgaacccccgcactgtttttcaaaagggccgaatgattattaaaagtgcaaacactcctgacatctcattcaaatttccacaatcctctactaagacactgattcttgcaatgagttaggagtcagtttggctttgtggatctggtagaagctcaccagatttgagtgggagagtgccctttccttccttgtacccatttcccccatcctgaaccaacatgtttttaggccctggatctttagaagtttagtcataactaaggccaacgtgaaaccatgcgtcatcccaacttaccatttgcagaaagcttccatctcccgttgttccagccttctttttgcaggcccaaactgtcattgcagctgtggtcccctgagcaccagtcaagggcagcagctcggctctagaaagagagatgacataaatctagggaaaagctactgaaggatgaagatatttcccaaactaacattagcgagagggtacttagggcatactggtactcgagtttgctcctgcccgcccatcttctgcaaaagctctagtaatttaacctgaaaccacagacccgcctctccgtcctttttcctgtttccctacactatgcaaacagtacctcttttagctggccctccatgccatcacccaaaaggtcacgtaccggccaaccctaaggcatcttccaaatgactctcactgtaacgttcaccatccgctgtcccagattcgaaacctaccctgcacggcaatccgcaagcactaaccgtggttggtggctagaatatgagtaaggatcaccgggaggaagggattcctccctccaaatggacgactgaatcttctctcccccacgccccaccccagcaccaccagacgaaccccatttaccatctctcaaagcgcaaaaatatttaaagcaatatttaaaatactttaagtgcgccccgtttcctcctgccacccgtcccaaagcccacacagtctttctcaaaaatgtggatattcaggttaacctgcgattttgttcgaaagtggctaaactgcattatccgaataatttacttttccactccttgggtataactaaaatgcagttggacagaaaagagcttgcagttgtccaaagtcattccggctccaaagggcgaattctcttttcgccatctctcccagccctggaacagcttagggtccctctcgaagagcacagcgccagcccagaccccatacacccaccgtccctggcacccgaacgcgctgcgagccccgggcctcccacaggagcggagacgcgggtccctgcgcctcacgccggaacggacccgtcagagccgccgagccccgcacctggaagctgggaggccgcgaggacggagaatcgaggcggagacccagcccagcgcccgcgcagctcggtgccctcccgccagtgcccgcactcgggtcacaccgcttgctctcgggagaagccccaaggctcgcggtgcaccgagaggcgcccgggctggagcgccccggccgtgttggccacggagttcttcagctgcttgatgaccacgaagagcaggaggaaaagtaagaagagcaggaagaagaagagcgccaggtagagcagcaagttgagttcccactccatgctggaggcgccggcgctcgctggccctgcgcgctcggcgcgggctgcagctggagggcgagcgcgccgcccgcacacccacctcccgcactcccgcccctcgcgagggcgtcccgctatgggcgccgactccggggtccgtgctttgcctcccccggctccgaggaaacgcgccaaggagctgaggaaatccggcgcagactctcccagctggcaccaaagccttccgcttcgccgagatcctctcaggtgctcttgaggacgcgagcgacttccctaggagcgaacttccgcgggcacggacgccagaagaggtaacagctcagtcttccaggggaggtcgggactggtgttttgtaaatgatttaaaagttccacccccaacatccagtagggtccctagctccgctgcgttcccaattaatttatttcgttatatccctccgttcctgctttccgaaaggacaggggatgtcatggcccagagacccaaaagaatgaaaggtggcagtgaagatggggtctgaaaggctatgagatgatttcgtgctatgaggtgtctgagtgaattccagttcgagctgtcttgctcttcagagtagcagatacattcagtgttgagtgtacttttctatggacaacaggtcacttggaaacgcattaagaatacaatgtatttcagaagttatatagcacaaagatttcaaatattggcctcaaattcagtttatttggtgaaaagaggaaaacaagtttactcaaagtgtttcttgagtccctaaagcctttctgtatctggttgacgtgacccaaagcccatatcgcgcagctttaaaagctgttcagtgtatctattactgcagaacaaattacccccaaatttagtggcttcaaacagcataaacattgatcatctctcacagtttctgtgggtccgaaatgtgggagcactggctgggtgattctggtgtcgggttactcatgaggctccgttcagatgtcagccaggtctgccttcagctgaatgcttgtgtagaggtggaggatccacttccagggtggctcactcactgcttgccaggtagggctggttgttggtgggaggcctcagttcccttccatgggtgcttccaatacagctgcgggattcccccagaacaagtgatgaaagaaaacaaagcagaggctgcagtgctctttaccgccagcttcagaagtcacgtgccatcagatctgtaatatcctactggtcacacaggtcagccctattcagggtaggagtccaaggacacgaacgccaaggagtaaggatcactggggctcatcttagagtcggctatgacagctgttaatacagccagctatcattgcccatttgtaggcctaactttattttattctttatttgtgaagatgcagaattgcctcctggactgaattctggggatgagggctgacaacatcccagattgtaataagtggctgctccagggatgacaggggttcaaagagacagggtggtatgaaaacagtctgtgaactgcaagtctcatggacccgattctagtgtcagctctgtcagtggtcacttttgctcagtgactctcagtcccctcatctgtaacatgccttgcttatctttcccttggatttgttgtgaggctcaaaaatgagaaaatgttaaataaaaatgtgttttgctatataaatgtcagatactgttattattctattacgaagggcccccaatgctacaagctattgtacaaaatttccaggccctaggcctctccatcaagcatcttagtgcataagtgagaagaatctttctttcattttctctttgtctctctctcaataacattatattgatccacttcataggcagtggtatgctggagctggctcgtaatgactcacaggagctgattgttaaattttgtaaaccaatttttaaattccagctattattaaaagttaaattatataaacctacaattatgttaacaacaaaggtaattaatactccaaactcatcactttctaattattttattaggttggtaaaaaggcaatcacgg

SEQ ID NO: 317462 - DNA, 4001 bp, Homo sapiens
gattttataagagctctttcttctacctaccaatagaaggggctcccatctgtcccccactaagaatttctctgtgcttcatctatcttctttctgctcaccactgccccagaaggccatgcttctcactttgagaaacaaaaactaaaagaactacatgtctgccccaaaatgaaaacctttaacatgctcctgtagtcaccagttctcataaaatactaaccaatagttaattaagtcatttttgggatgattacctggtttttattagatccaacctgatttttaagaggtgctaggtgtagatcgatagctagctagctagctagatagatatatagatagaacctactccggataactattaaatgagcttactctcagcccacaatatcttaaaaatagattatctttattctaactattctctttataacacattttcacccagtggaatcaagcactgaaaatatgtgctatgattgcttcatctaagtaacataatgccagaaaaccaaattgtagtcatagtgtttatttagcaaaaatatttttaactcgctacttagcatcatgtaaatgcaacatcaaataatcactgaaatatgtcatcaaatataattagcaaaaatatttttatctggctatttagcattacatatatgcaacaataaatattcattgcagcaaataatcaaatatgagtttttctctgattttaatcaaattcatataaagactatttaatgatagaatacagccttttcttttcaccttttcttcttattaaatgctagggagcacaattaccatttgaacctcacattaataaattttcaagtcctttgctaacatcaaaatagtttaaatttatacctatttattttcctaatctaggtttcagcaattatatcacaattttctgaaacgttcacaaagttaattttgttccatttttctccagttacaaatacatacacatacatctgtttaaatttccactcaccttattttgattgtattttcaaaatatataaacgctttttcttgtcaaaaggtgacggtaagttatctgtgtgaaatagttgtagtaaagggaattctagcatttttaacacaataaatatcactttcttcattaaagaattccaaaatgtaaaaagcatacttaaagctgctttgggccaggcacagtggcacaagcctgtaatctcagcattttgggaggccgaggtgggtggatcacaaggtcaggagttcaagaccagtttggccaacatggtgaaaccgtgtctctactaaaaatacaaaaattagccaggcatggtggtgggcgcctgtaatcccagctactcggaggctgaggcaggagaattgcttgaatccggcaggcagaggttgcagtgagccaagattaggccattgcactccagcctgagcgacagagactccatctcaaaaaaaaaaaataaaaaataaaaaaataaaaaaaaactgctttgaagaaagtgtttcaaagagcaaaatcatgatgcaattattgtaatctcaatgtctgaaatctagactacagattttaaatattttcatttttaggtatgctatgataattaagtactatgaattaggttactgtactatataacagtcaactaaaattgcaatcttgttttattagtttttcagatctagaacttcagcctatgcagcatgtgtccaaaaagaggatcttttctgtaaccactagctgacactaatttttttaaattaagaaaggaaagctagattacaattatatactcacctttcggtgtcttgaaatattccggcaaaattaaaatgaatgtgatcactattgccacaaataatttaaggagggctgtttttgtcatgtctcttcacatgacacaaatgtgttcccttgcagtacattcatggtatgttgcttcctgctttaagtttatctctgcagcactttaggttaatgcagttcacctcatactcacttccttttgagtaagacttaaaaaaaaaaaaaggtcttgaactgagacttcacttttgagtcacttcccattaaaaaaaaaaactaccccccaaataagcactttcagaccatttatttgtctttctaagcaagaaaggtaaataaatgatctcaagaagcaaggggatcttctccccacccaatttataaatataaacccacagtatactcacaaaaataaaacggtgggctgggcgaagtggctcacatctgtaatcccagcactttgggaggccaaggcagaaggatcacttgagttcaggagtttgagtccagactggtcaatagagcaagccctcctctctacaaaaataattttaatatagctaggtgtggtggtgcactcctgtagtcccagctactcaggaagctgaggatcacttgaacccagaaatttgagactgcagtgagccatgacaggccactgcactccagcctgggtgacagagtgagatcccttctcaagagagaaagaaataaaagggtgaatgtcagtcatgtctaggttgcatgcacatgactcattcatttacttattaaatgattgtcgatcctgtttggtgccaggtgctgtgctgaattctggtgttcagaaaatagtacatctagaagatagaaacattttaaccattgccaatttaaaaggaaaaaaaagtattgtttaatttgcatttgtttggttgacagtaattctaaagatttttaatatttgctggcaatttgaatttcttttgttaattgcatgttcatgtcttttattgcagcatttatatccttcctgttgatctataagacttttttctctattgggaatatgaaatctttgcatatgttttgcaaacatttttcccaggttgtcatttgccttttcattttgtatatggtgggagtttttccacccaactattttgtaacagagtataaaacacgtacctaaaagttttatgcagagaaacacagttcttcattgtatttctaatattacacgaaataatgtatagtttatcaatttaatcatttattcttttgtttttgttttttgttttttgaaacggagtctcaatctgtctccaggctggagtgcagtggtgcaatcttggctcactgcaacctctgcctcccagatccaagtgatcctcctgcctcagcctcctgagtagctgagactacaggcatgcaccaccacgcccagctaatgttttgtatttttagtagagacggggtttcaccatgttagccaggatggtctcgatctattgacctcgtgatctgcccacctcagcctcccaaagtgctgcagttacaggcgtgagccaccaagcccggtctcatttattcttaaatacaaagtttacttgcagcctgattttggcttcctgaaatgcaccaaaactcggtcatctcccttgaagtggcaacatctgactctctaacatcctgttagggttgatgataatactaatggcccacatctccatagttttgttttacaatttccaaagcacttttacaaatattagattattttttaaaaacacaaatattagattataaaggggattctaggaactgctagaaatggctacaaatctgcaattacttacccactgcaagcttctccttcctatttcaatgaaggaataagagattaacgaatctcaaacacaagaggttgttgctactacgctagtgtttaactttcctaagtcttatatttcatatctgagatccaggttctcaaaaatactttaatgtgtttctatttctaatcaagaccaaacgtcttaattaaataattatgcattctgtgttagatacaaatgtttaaaattgagaggatcttttatatcaaggaggtgctctaccctaggaaagcaaaagcaatatactttttagaaaattataaatagcagccttaaaaaggatagtttaaatttaacttctacatatttat

SEQ ID NO: 317463 - DNA, 4001 bp, Homo sapiens
aaataaacaaaaattagccgggcgtgtcagcacacgcatgcagtcccagccactcaggaggctgaggtgggaggatcaattagaggttgcagtgagccaagacggggccactgcactccagcctgggcgacagagcgagaccctgtctcaacaaagaaaaaggaaaaaggaaaggaagggagaaaggaaaggaaaaaggaaaggaaaggagaaatgaaaggaatggaaaggaaaaaggagaaaggagaggaaaggaaaaaggagaaaggagaggaaaggaaaggaaaggaaagggtcagataaatcacccttaaccaagaaattttagggaagtcttcacagagagtaggtatctgctggttctccaaggtgggaagagttgatccgtggcttcaaactccaggtctttttttttttttctttgaaaaggtcttgtgttagggaggaactggcaagagagcacaaagcctgtcccaaagggctcttgaagcacattcttttttgcagatgagcatatccctttagcatatgagcaagaaagcggtggctaaaaagcctggaggtgagctggagccagatcagaagaaacctgaacatcactctcctaaaaaggctggactgaaattagtggaggcaactcaccgacgacttctgacaagatggcagaattcaatgttcgggaagattagttacgtggagatgggctggatgtggcctgggtgggagtgggggtttgagtgccacactggccgggattcagggagcagatactggaaatgacgacaaagcccacgactgggagaagggagaaatgttaaaacgctgccaagtgactaaggactaattctattaacagattaaaaagttgatttctagtatctattcagggaaggacaaaatacaggattctgttttacttataaatgtagttttggcatcccacatcgctgcagcacgctgtactgccggagactaattcctctgcgttcctaaaggctacttcctgctagccaaagcacatttttaaaaagtgagagtcatggttcataatccatatttggcaaaaagcacaggcagtgccaagttgaatttgggtaagcagtttggcataagctatttcaacaatgaaatggccgatgtgatgatcctcagggaatacaaaaagcctcctagcagccttctgttaaaaactttttggtagggatgagtctttctagctactctaagacacatctgatcaataaaacgcccatcccggagcagcatcttggccctccggagatcaacgtttatagcgggctcctcttggactctccctctccctttccctaaaggagcgggcaagaccaggcctcaccggaaaacagcgcagccgaccgccctccaccccgggagcaggggccgggctcccctcccccagccgaggccggcggagtgcggcgctttcaaaggcctggagcctggtactcggcgcagccggccctgcagcctcgctcgccccatcccggcccgctcacctcgacccgggccggctcggggccctgcacagccacaggctgcggctgcagctgctgggccggcgccggcggttctttgttccggtggctaaggtcttcatctgggccggcccggaccgcagccggggcccacagcagcggaaccagaaagagcagaagcagccggggcgccgatgcgcggccgttccctggagccgcggccgccatcccgcctgccgggccggccgcgcacgggcgccgcaagaggaagtgccggcgacgggaagcctcgaccccgaacagcctccgcggcgcgtcctcacgactcgccgccgccgccgcttagggagcagtcagcaccatccgggaggtgcaagcagcgggagtgaggtgaggggcaggccgaagtccgcagccccggctcggcgcccgtcctctccggcggcggctaaactggagtcagccagctgcctcggcgcggcccagccccgactcctcccggccccgtccctgcccgcgacggcctcccattggcccggcgaccgccttggcgtcgtgacgtcctctgccaggttgaggtgcggcgcgggccctcctcccattggatccggcgctcccggcaggtacccggcgccgcgtgtccttcctctgctcgcatcctcaccgcgccgcgcccggggctccctttctctctctgtgccccaccgtcccaggactgcgaggtccttcacttctgcttcctccagagccttccgccgtaatgtccgcacccgctgttccctgcgcttagtctctcttagaggtcaaattagtgcgagcgcctctggttacgtggcgctgactcgcaggcactgccacgcccagctctgttccgctctcccccgccgagcctctgtgccaccctccatgtggccacctaccgccaaaaacgttcttaggagctcaaaatgctattttttttttaaagttctgaaatgggatttggaaataacatgacatttttcaagccttgttttaagatactgcctataattaccccagaccaaaaatggctaacgttgcccttgtccagtatggccttgacgttttgggtgcatcttgttttgtgctattccttagaccctttaaaaatgctgggcttttgaaatggactgtttaagacttttgcaggatggagctttgagtgggcaagactagaagacaggaaaggatggtcttgagttaggcttgagaatatttttacgtcttcccaaaagaaaaagtgagctacttaattaccataagtttgagacctagtccctaataaaaatcgatagtgctaaccatgtgccaggcactaatctaatattatacatatttacatacagtaaacctgtactcagtaaagagctaaggaagtttatcactaactgaaacaaaaaattaatccaccaaaacaatctgtgggaaagtgggcaaacctactttgagttcaccaaagatacagtgtttgtcacaggataataaaatttccgtctgtttttttgttttgttgttttctttgtttttgtttttgagacggagtttcgcgcttgttgctcaggatggagtgcaatggtgagatctcggcccactgcaacctcctcctcccgggtacaagagattctcctgcctcagcttcccgagtagctgggattacaggcatgctccaccatacgcggctaactttgtaattttagtagagatggggtttctccatgttggtcaggctggtctcgaactccagacctcaggtgatctgccggcctcgtcctctcaaagtgctgggattacaggtgtgagccaccgcggccggcctccgtccatgttattctgtccgtaattccccttcttccattctctccttgtaaactcctactcatacttccaaaacctattcaagcttccactctcagaacttttccccaacacatggcgttacagaatttgtcacttgttccttcatgttattgctttatgcattcttctattactgtgtaagtaggatgcctccacttacagtttggggtgtgttaaaagaaaaaccttagacaaattaaacttaacagcgtttaatcaagcaaagaacccaaagaatgatctgcaaatcaaaaagaccccaaatcaaagtaagttcagagaggctccagtcttgccgagtggtcggaaaaaataaagtgacttacagaaaacataattgagggacagaaacagctggattggttgtagctcaggtttgccctatttgaacacggtttgaacagttggccacttgtgattggccagaactctgtgattggtacaagaataggttacagtctgtttacatacccaattaggctacagttcaccatgtatggggaaacctttaggcctaacttaaaatatgtaaggaggcagctttacactaaatttaacagatgcaactatcatccctggagtgcaaatgtttgagctttcagaagccagtaataacataaaacccag

SEQ ID NO: 317464 - DNA, 4001 bp, Homo sapiens
tctctgccccgaacatcctcgttccttggctctgttacgacactctcttggttttcttcctccttcactgactgctctttctccacaaactgtctattctctgaagattctaacctctttatgtctagtacaccatctctgttggtcctctcttcagctcctagagccaactgccacctctatgctgaggatgcccagatatctgtctctagcagggattctttcctgagctctctatccttctattccacagtcgaccagacaaacgcactggctggaaaagccatgacttgcgttgaattgcagttgtatcacttgttggccctggccgaataatggcattgttgagcatattttctcatcccaaaataaagggggttaattatactgtgctttcttcacaaagatgttttcactacaatgaactattacagaaaagggtgttgtaagcaataaatcagtgcctaaactaagctattgctactgttatttttgttatatatatttttaaagatgtcatttggcttcatgcaatacttcattccataacatagataagtgttccaacgagctgaggctattatcttttaatgataaagataacagatgttagcttctgggacggctaagaggctgatgtgagctttagaatccatttttgagttggagaacaaataactctgttgaaggggttgcaaccttaaatgactataggaaccaggcaggtaacatacatgagcccatctggtcaggcaaatgactgtgtcttacctcaagggaccactctaggtaattggtaacacacatcattttgggtccaatattgacaggtttgatttttccacagaagctggaaaactaggtttttaacatttaggcctttcaattattattattattattatttattttttgaggcggagtctcaggctagggtacagtggcgcccgcctcccgggttcaagcgattctcctgcctcagcctcccgagtagctgggattacaggcacccgccaccacgctcggctaatttttgtatttttagtagagacggggtttcaccatgttgaccaggctggtctggaactcctgacctcaggtgatccgcctgcctcggcctcccaaagcactgggattacaggtgtaagccaccgcgcctggcatcagtctttaaatgatagcaactaattcacctcctgctacccactcccaacccccaaatactgtgtgggccaaaaactaaaaatgcattgtctgtgagccatttccttattatcctataaggaaagtcaccatttcatctccaaatagttgggcattacgaacccttccaagtggttcatgaggatttgcttttgccttggaaaatgtcagggtgagaacgaaccttgagggtcacagggcagtctctgcagtgttgtggttgcccaggacgaaggtttttctagcccacggctcccactactggtcactgccccaggccagaccctggccctctcctcggaagacagagcaatgcagcagcgtttcccctgcaaactgcctgcctggctgctgggagggggctgccaaccttactcactaagcgtcacaggaaactccgacctccatgagacgaaaaccaagtatttactgaaagcttaacgcacgctaactccttgctccttagccaactgagagaaaaattcgcgaacccattcgcaaacgcggcgctaacagcaaacgggaggctgactccacccagaggatggcgaagcgcttaaaccggagacacctgagaaggagcctcccacaaaacagaccatgtggggaacggtaccgggagctggactggggcgctgaactacctgggcgggaatcgcctcggcgactgttccgcgcgcctccgcttgagtcagcccggccgggagcttgacagccggaagttcatcgcaagcccggcgacgccgcgcacgcgctgtctccgtcagacctccgcgcctgcgcgcgcagccaggaagtgaggccgcggcggaggggacggggctaggccgggtcgccgcctgacgcgacgcgtcctcacgggcgcctacgtcacggcgtcgaggcggaagatggtgcacctccgggccggcggttgctgagctgacccggacggcgagggagcgggagcccgagcccgaccactccggctgccgcggggtgcggcgcagccaccgccatgtcgctgctgcagtcggcgctcgacttcttggcgggtccaggctccctgggcggtgcttccggccgcgaccagagtgacttcgtggggcagacggtggaactgggcgagctgcggctgcgggtgcggcgggtcctggccgaaggtgaggccccgggtcggcagcgcgggtgcggccgcggagtgttgtctccgggacgctgggggcagcgtcagcccggagtggaagggcgtgggttagggctggggagggtcccagcgggatcgtgggtcagggtcggccaggggagggtctctgccgagggcgtgggtcagggccaggcgaaggtcatagcgcgggcgtaggtgagtgcctgctggcggtgattgcggagggcgaggctgggaccgggtcggggtactttcttgtcataagagtagggtcaagtcggagcaaggcctggggcttggggaaccccctcagggtgggtgggggaagatgttacggtgaggtgggggatggtggcaggcagggagcttgggtggggacccacagcggagactgagggacggtgcctagaaggccgacagctggagtcaggaggtgagcggtgcaggaggtgggtttaagccttggccttttgccggacatctggggttattgagcaggcagggacaggactggactttggaggttagggctggttcttctacagtccagggaacttgagagttggtgggtgcacacgtgttgcaggtagttgcggttgtagcctggggggtgggggggttggccgagggtagactgggctgtgtctcgtgatcccccttcgtctttcaacacctcagtgtttctcttcccggtgaacatctactcgtgtgattccgtgtgtagtacaggaagcagagccagtggttgtgacctatatagaacttgcagagtggacaggtcactcggcttaagtcctcttgagtcagtcttgagtcagttttgtctctgcatgctatttctagctccctggatgtcctctccgttcacacggaatcgatcaccagtgccagtgggtcccattctctcttgtggattttccttacattttttgtccagtggtgcctggaggtgtgtcatatttcactggctgtgaagtttatgggctaaacacagttgacttgggtgcggaagcgtaactctattctgctgtattggcacagggagagggagtgaagcgacacaaaagccctcaccctcaccagctccctggtacctctcagggctggagggttagcctgtccaggtgcctgctctgtgaccagacaggagactatcccagaattctgattatcacaaaaggcctgcggagacattttgactgtagcattatcacacactttgtctccattgtggtcaaaaccaaacagattttgggtatgatttggtcagaaagtctaagctcttctttcagaagtgggggctgaagtgtgatattctttcacatcagttggaagatttctctcagatcaaatcatttattctgaaaatactaggtggttatcttcattctttaagaagtttattgtggacaggacttgctttctggaacttcagacttgtgctcaaggggtggagagacagaggcagcacagggacagatccttaggggtggtacagacagtgtgagctttgggaaggggccaagcagaagatggcacggatcttggtgggagggatggagaatgcaccctcactggggcccggagaggaagattcgtataaagaaagaagcttgtgggtcacttagcacccaggaagaagaacaaggaa

SEQ ID NO: 317465 - DNA, 4001 bp, Homo sapiens
ccgtctgtactaaaaatacaaaaattagttgggtgtggtggtgggcacctgtaatcccagctacttgggaggctgaggcaggagaatcgcttgaacctgggaggcagaggttgcagtgagccaagatcgcgccactgcactccagccagggcgacagagctagactctttctcaaaaataaataaataaaaataaacaacaacaacaacaagtaagtatatggggctgggtgcggtggctcacacctgtaatcccagcactctgggaggccgaggacagatcacctgaggtcaggagtttgagaccagcccgaccaacatggagaaaccccgtcgctactaaaaatacaaaattagccgggcgtgatggcgcatgcctgtaatctcagctactcgggaggctgaggcaggagaatcgcttgaacccaggaggcggaggttgcggtgagccgagatctcgccattgcactccagcctgggcaacaggagcaaaactccgtctcataaacaaacaaacaaaaaactatatggactatgctagtatgggaaagtcatcagaaaataatttagtgtaaatagagaacacaaatgtatattaaatacagtttatgtaaaaatcatttccacaataaagaagggcctaaaatagtcatggtcttattatagttcttgtaataggtgttcctctgtaaaagtacttggtgggttttattaactccgaatttaaagttcattatataatatttatatctgagttatttaccttggggttttccagcttgtagtacattactgatgtcacaataagcatatgacatcaaaaaatatatataagggactttttgcaaaacctttgttgggtaagagctaatttccacagtaaaaacagacaccaaagttaaaacaactagaacgctttgattcaagaagctagttaaaagctaataaaattcaatacatggttttcaaggtagtttatttgacctagtttcgtccaatgtctgaacagatcagatttcagcaataaaattaccttactttcagggaactgatgaatacttgcaaaacagtgcccttctaagcagctatattaatatattctattttctcgacccggtcccacctccacctgtagcatgacttgaagaaccgtgaacaagaaattagacaggtttatatcctaagagtaggctcgtttacattagatggttttcaggactgtcagggcagaaatggggtaagggtgtctctttcccaaccatagatgggtagaagaaagtgtacaggctgatggtgcagaaccctcttacctccagtttctgtaattcccacacgcataggggaaccgcaaccactattgacaccaggtagatgaccgctactaaaggtcgaatccactgtctccagttcctccaggtacaagtgcaaggcatgttttcgcacaaatcagatccggttagcaagggaaaagatctcgaaaagattgtaatggggagccctgttctctggctgttttgtcaactcgcatactacggagaaaaagctgtcgggcgactttacgaacagctcgagccgcctcctggaccggcgctgtgtcttctgctgctgctgcttctgcaaatgtagcctctcagggtgctattggcgagcagtgcaggcaacatcctttcttctccaccccgcatctacccggttgtactgcggtggaatcccaggcagagccgctgccctcacctggggatcgccctgagctctgcctgtaccatggcttccaggagagcagcacagaccaggaaccggcctctagggaccctgcacactccggttctgtctcgcagctgcctgcccactcgctcttttctttggggatcgagcttcctacctcccgcactggcaggcgtctcttcagtcgattccgctagtaggtaaggccccaggatctcctcattctttcgcacgggacctcccctacagcggaacccaaggccaaaccaagactttcagctcttttccgcttccgcccctgctgtctgaggcaggtgattcgtcgtcagcgccaaactgggcccgccccatccgactcactttgcgccctctgattggtcagctgtgggggcggggctgcaggattgcgtactggggttagaaagaagagcaggtgcgtggaagtgggtggaattgccgcagatggtccagcgggctattgcaaggattctggaagctgcgggaattatttgaggacacttgaagcacacctactacattcttctgctggcgttattccagtttaaagaaagcttgggtaaggggcggttacttcagagttggactggaagagagaaggcccatctctacacaaaacatcccctattcaatctagagtggatacagaagcccgctggagtaagaagacaaggaagaatgggaaacctccacctagttttctgtcagttgctagaatctaggggctaggccgcttggttatttctggatcctacagaaggatcattctaaaggtagcttcattttagaattaaccgcaaatagggaatgtcccttctacatttggaacttgtgttaaaaatttgcactcatttaagttttaaaaagttgacattccatctgacaaaggagtttcatatgcttaaagcctttagctaaaccaatagagtaaacaaatatctactactcaattacatatacaaatgcgttttatattgtaattgtaattttcagggggacaggcactgtactaagttcattacctacattatgtaagttgttctgcacaaaaattttgagaggtaggcatttttccactttacagataaaaaagtcaagtggctgataaatttgcccaggctcactgagctagttaagtggtagtgtggagatagcaaccttggtctttgtgactccaaagggcattatatttaagcatttgacctgctagtacctgccacctggggaatttccgcctaatgaccatacggataaggaggcttgtaacattgagtacacctagcccaggagtctcacagagacacctaaggaatattatgagccccttttttggtatcgtctgtttggacttgacttcactgcctacttctcagttgttaacatttgtattttacaacctgacccaaactactttctaccggaaaaataggccttatgtttgttcttcctaagcttactttaaaaatggaaattaaggctgggtgcaggggctcatgcctgtaatcccagcagtttgggaggcggaggtgggcggatcatgaggtcaggaaatcgagactatcctggctaacacagtgaaactccgtctctaccaaaaatacaaaaaattagccagttgtggtggcgggagcctgtagtcccaggtactcaggaggctgaggcaggagaatggcgtgaacccgggaggcggagcttgcagtgagccgagatcaagccactgcactccagcctgggcgacagagcgagactctgtctcaaaaaataaataaataaataaataaataaaattaattaaaaaaaattcctgatcattaaattaatgcttgctctgttgttaaagttcataaaaaagaagaataatgaagagaaagttaattttactctacggccaagtataactactctttacttgtttggtacacagtagaggctatcttggatatgccgtatgcgtagattgtctctgtgctttcagctacagcgtttttgctgcctataatctttcccattctttctcatgggcaaactttttttgcctaatttgtgagaccttcctttatttttgtttccccatgtattcttacagcatttatatggtattatactcatttacttatttgtcttgtttagattttgaattcctaaagcaaaaatctaaatccattagaaaaaagcaaaagagagaagagatgagacagatgcacaaatgatttcacataccagtttgcgaactggaattcttctatggtgaaatttctt

SEQ ID NO: 317466 - DNA, 4001 bp, Homo sapiens
cagttggtttcactgcctgcaaacaatgaatccctactaacacaaagtctttgactcaactcatttaagtgtctgtaactaaggcatggtccaaaatttttagctttttcttgaaggctaggaatcatgtttacaaaataccaaaagcaggcaacttactcagatctaaagtgactccaatatgtggttggtagcaaaacattaatctctaattaatttttatttatttttatttttgagacagagtctcgctctgtcgctctgttgccccggctggagtgcagtgatgcgatcttggctcactgcaacctctgccttccgggttcaagcgattctcctgcctccccagtatctgggattacaggcccccaccaccccacctggctaatttttgtatttttagtggagacggggttttgccatgttggccaggctggtctcaaactcctgacctcaggttatctgcctgcctcggcctcccaaagtgctgggattacaggcatgagcctcccagaccatccccaggctccagtgtttgaggaagcagatttctagtactatatgcatcctaaagctaaaagctacagatccaagaacgccagagcagcttagcatcaaccaagaagcacttactgcatgtgtttttctaagacactctcattttcctcttacatattcggttttttctgtacattgtcagctcatgaagctcagccttaaaaactcagaaacaatgaattttgctttaaatatatatgagtctcaaatctacttacaggtcttacagttaattttccattttctcaactggaaaaaatagaaaattttagtttcattagaaattgtttggtctttatttcatcaagattatttaactggttactgcacaagaatctaagctaccgtaatgctggaactgtttcatgtttctcttccttttcctgatgcagttcattcagtgataggatcacagtaatattcctactaatttattaacccaaattagtgctttacagtaactgtcaactttgcatttctcaagagcaaaaattttattacttgccagtggaaaatccagttaactctcagcatacatacatgtttctcctaaaaacaccttacgatactgaagcaaagaaataagatttttgtaattatgctaccattctgtactatacacgctgtaaactaggccactggttttttgtttttttgtttttgtttttgttttggtaatctggtttgaatctatcaaagatttaaaaacctttgtattcctaccatgctagattcaaaacaacacatgacactttttctctcgtgtgggtttccaggccatgatagcgacaggtctgcgggacgctggcgcccggcccgagcgtcgttgtcactccaagtccacagcctctagagccaaggcaagggacctcaccaggaagggagattcgccccctgtgcccctgggacgtccgagcggaacccatcggcccggctcccggagactcgcggggaggaagggctgtcaggccaggcgcgcatcacgtgaagctgccagttccgggatcaaagacgtaccccgcacgtgggctgggcgccagcctgggacccccgggggccgcgcgcccaccgcccaggagcccaccccagcctccactgggaaaattagcccggagccaacgtgtcgcggatcccacagccgcctggagccctcccaaagccccgcgcccaggcctccccgggcacaggcggcgcccccttcggccgcggccgcagtcgccaagggtggcttccctctctgagtctccgccccgtgcgccccggcacaagaaaaagcggattccggggccaaccgcccgccgcctccgtgcactcacgtcctccatcctgccccccgccgccatttcccgacgccggaggccgaagccctggccagcccggcctctccacctggacctgtaagcctctggccgcgaaactcgccaccttctgggacctgccaggcccctccccagacacaccccctcctgcgtccgccccgcctccggctggcccgatccccgcccccttagctccgattggctgagatggtgggaggggtgtgccggcccagaagacctggactgtgggcggtggctaccgcctgaaccacctcggttcctggggcttctggccgcagcccctcggtgcgctcttacccagagacttgagcatttaaggatgccttcctagtccaagaatttaactattttcgggctccacttgcatattttaagaacattaacttttttcggtcttgcctggttgtttgcagacacagctctacgcctaggtagaaccagcggtaaaatcctactccgccagcagagggacaggagcagaataaagattccaatttccatgacatatttacagatttctccaatgggaaacaaagcagttcggaatgcttacggcgttcgtttattaagacagagtctcgctctgtcgcccacgctggagtgccctagcacgacctcggctcactgcagcctcgaattcttggcctcctggccagttctcccacctcagcctctcaaagtactgagattacaggcgtgagccactgggcccttgtttcttttaaaattgaatttcaaaaagagaaaaaacttcaatgacattttctaaaaagctcatgattgtaaaaatgtaagcaaacaaggaaagaaattttctgttaccagctcccggagagaactttgatatcagttagaatatatacactcatacatttttttggtggggcggcggagacggagtctcgctctgtcgcccaggctggaatgcagtggtgcaatctcggctcccaggttcaagccattctcctgcctcagccccctgagtagctaggattacaggcgcgtgccaccaagcctggctatttttgtattttagtagagacagggtttagccatgttggtcaggctggtctggaactcctgaggtcaggtgactcgcccgcctcggcctcccaaagtgctgggattacaagtttagccaccgcgtcttgcccactttcatacattctaatgcttatttgtacattgagtatagtgtgatccagtttaggatgtgtgagataaaactacgcaaatgttagtgaaggaagagatggtgtaagactccacgtgatcttcttttttctttttcttttttttctcgtagagacaaggtctcactatgttgcccaggctggtctcataatcctgagattctatgaattatttatcacaagccttttctagacgtgcaaattttcttctctgcattttattttgaaaattttcaagcctacagaaatgttgaaagattaatacaatgaacatccatgtacccctcacacttgattcattagttgttcattttttgtcttggttgctctgtgtgtgggtgtgtgtgttcacatacttttttttttttttttttttttgagatggagtcccgctctgtcgccaggctggatggagtgcagtggcgcgatctcggctcactgcaagctccgcgtcccgggttcacgccattctcctgcctcaggctccccagggtctgggactacaggcgcccgccaccacacccagctaatttttgtatttttagtagagacggggtttcactgtgttagccaggatggtctcgatctcctgaccttgtgatccgcctgccttggcctcccaaagtgctgggattacaggtgtgagccaccgtgcctggccattttttaactgaactacttgaaagtaaattgaagacaatatgaagcttcattcctagatactttgttgcctaaaataaggatattttatattttctttcataaccacaatatcaatattacacacaactaatagtaattccatgtttactaataaccaatctatggcaaaaattttctaagttgtttccaaaatgtcttttttagctgctttttttgttttattttgttttgttttgtttttgagatg

SEQ ID NO: 317467 - DNA, 4001 bp, Homo sapiens
aaagtctattggtatacattttttaagagtaaactgtccaaccatcaggcaaaaaaaaaaaaaaatcactagatctttgggtgaaaaattgttgaggagcaatattcacacagtgtcacagtatcatgccaaagaacactttttaattagaaaggaaaaaaggtatctttacaatggagaaactggtggacaccaccttaatcaaataatcaaacaaattctgcaatgatgggataaatcaatgtaaaatgcttcctgatatataatatagatatacatattagatgtacctatatatgctgcaaaacatgtctggactcttgaaaactatcagtatcttaaaagacaaaaaaggggaggagagggcagaactgttctagattaaaaggcagtaaacaagatatggccagtaaattgaatgcatgctttctgagatagggtctcgctctgtcaccccaggctggagcgcaaaagcacaacccacctcagcctcctgagtagctgggactatgctgggactataggagcgcacctccacgaccggctaatttatgtttgtttgtttgtttgtttgttttgagagaaggttttgctctatcacccaggctggagtgcagtggcgcgatcttggctcacggcagcttcaacttctcgggcgcaagcgatccacccgccttggcctcccaaagtgctgagattacaggcgtgagccaccacgccccgcctaatttctttgatttctagtagagatgaggtctcgctatgtttccaaggctggtctctaactcctgaactcaagcgatcctcccgccttggactcccaaagttctgggcttacaggagtgagccactgcgccagcccatcgatgcatgctttttgacagaatcccagatgaagagaaagcagctttaaaggacaattatggaaatttgcacatggattttatattaggtaatatttcccaaatgtggtaactgcattgtggtcacacagaataatacttaactacttatggattaaaaagtagaggacagcaatgctccgggcacaaataacttgttagctccagatcagcatcttaaaaaaattacaaaagcataatgatatttctcttcataaagaacaaagtgaagaagaaaaagaccaccgctctcctccctttgcataatttctatatacgattgtataaactaggcagaaacgttctttgccggcactcgtgtgctccacgtggtgtgtgtcatggatcatgtgtgtcatggcacaatctcatgcggcatctttaaccttggggcctacggtaaacaaaagaccgaggtgggagaagaggaaagaaggcccaatttccatggcatacaggtgggggccaccagctccaggtcagcctattgtcgcttcagaaacaaacttgtagttccctccatatcttcgctcaggacctcccctctccccgctccaacttccccaccccaactcattaatcccattcctgaatgcactgagcttctggaacgcctcgggactcgcaacgcttcctgcttcttcctaactcttgcaaatcaagccagactaccctgccctcgcacttaccacagcgcccgccccttgggggccgttcggggtcgtatctgccatgggggctcacactagcgtctgcgacgccgcaaccgcgaagagagaagaaaggggagagaaaacgtcagcgctggggccaggacccgggtaccggcttccctgcctcgcgccacacacaggccggatgcaccctgccggaactctgagcctccaccagggaagggtctcgctcgcctggtgcagccgactggatccagggcacccgcagcagccgggaggtacctgtcccgcaccgccgagatcaaagcggtgtttccagaaagacgggagcgaaggtggagcttcggggtgaagccctaaagagccaacctacgccgccggctccaggttattgccgaacccggaagtgctcctttcatttccgtggggaagaggcggtgacaaagagggggaaacgggagcggtgcccagaggcatgacgggaagtgtggtttttttctcctaatttgagccccacctgtccttccgccgattggcccagtgagctaagaaatcaggatgggggagcaacttttgcattaaatacagctcacaaatgatctttcctgcccattctcaaaccatgaaatttccgcacttcctgatatagaggcctcagaaacatctttgattcctttctccaggggcttactaagcccgttggttctacgtctattattaattctttcaataagtatttatgaggcctgctatgtgacaggctccatacttggcacggcggataaaaagaggaatatgacacagattgcaaaagagaaacaagtaaacggaaatcagagcatagtgattgtgtaatatgtgtagaggctgatttaatcacagggagcacagaggacggtacctaaatcagaagggatctggggaggtttcctggaaaaggtaagtccgggccttgatcttgaacgacaaaaagttggctgaaagtgttactggtgtagggtgtccaagttcttggcgttttgaacatagaattggacaaaacgcacaaagcaaggaaagaataaagcaacaaaagcagagatttgttgaaaatgaaagtacactccagagtgtgggagagtgagacagcagctcaagggccctggatacagagtcttctcgggtccaaataccccctagaggtttcccattggccacttggagttcacttcatgtaaatgaagtggtggcccgcaatcagtctgaatggttgcgcaaagcaaccaatcagaggctgaagaagttacaaagttacacttctatgcaaacgtctgattggttacaaaaagcaaccaatcagaggtactttcaatttcccaaatctgcgcagaacaggttggggcttgcaaagggagtagtatctggccctttattcacttaagcgtggacagtaaggattttccttcaatttagttctaggaagtcagcgagaaagggcattaggttccctaccgccataccatattcttctgccttaaaacgggaagggaactccatacagagtaacagaaagtgcaagaagtaacaggacagcgagaggactagttgagtgtgaccagaatgatggtaccagtcaggggattgtgaaagatttgcgctagagaggcaggcaggggtgtactgaggaaaggatctgaacttgaccctgaaatccagagaaccatggaacaattttaatcagaagtgtgacatcctgagatttagaaagttctctctggcaacagggtggaggatgaacagaggggcaaattaaaagtcaggaaattcgttgtgaagccatttatatatatataaactaaaaataaaatcctaagtaaggggtctgtcgactgactggatagatccctttcttggccaaggggaccccagccatgatgggacaggagatcagacatgcctcattataccccctcccttttgtagtttagacacaactgactagcaactacttaggcgtggaaagttagggttttcctttcaaattagttctaggaagtcagcctatgtttaacatgttaatgttacaataaagatcataacattgacagaacaaactctttgtgggaataggataccaaattataaacaggacctaaggccatgccaggcaagggttaagtcatgcaccccctacacttaaaaaataaactatgttctaccacaagaggttttttttttccctctggcagctaaacaaccactggcctagagagaagcaatattaaaacaattacaactaatccagctcacagacactaactgaacccctgctataccaaccatagctacagctttgattgcacaagagactgatttcagtaacgttctccagataagaccactgaccataggctggttctggccactttacagaggccatgcactt

SEQ ID NO: 317468 - DNA, 4001 bp, Homo sapiens
tttttttttttttttgagacagagtcttgttctgttgcccaggctgaagtgtagtggcatgatttggctcactgcaacctccgactcccaagttgaagtgattttcttgcctcaccctcccaagtagctgggcctacaggtgcatgcgccaccatgcccggctaattgttgtatttttagtagagatggggtttcactatcttggccaggctggtctctaactcctagcctcaagtgatttgcctgcctcggcctccgaaagtgctgggattacaggcatgagccaccacgcccagcctgtttcctttatcagcaggtgtcactgatgtctggaacaatggcattgaccactgattctacccttgtaatttacatccctaagctgcaaacactcctataaatatattaatgttcatagaaaaggacacttttggtgcccataattatgagcttgatattttaaaagagtgatttggagaatatgaaatatgaaaaactggaaatcctgttttacaatatcatgattctataaacatggatatgcattttcacattcaatatactttaataatttaatagtaaattattaatttttaaaataattttttaacagtcaaacattaatgctagatatttacatctgcttgcccattcatttgttcaacaaatatttatggagtactggttatgtttgaagcattgaagaccctttctgagggtctcagagactttttgtcaattactatgtgattactgaaggactgatgcaaacatgcattttgtgagtggggaaggaaacctagtgaagttcactaacttagtggccaatctcgtatcaaattatcatctctgaaattcactggatggaatccttgccacccagacaggctgcagtagctgataaggaagactcgactccaaggagttgaggactgcaaggaattatagccatgattctggcttctgacagccctctagacctggagacgtcccctaacttctgttttcctcaaattccttgctttaaaatgggagttaacgatacttgtgatacttgttctacttagccacaaggctgtcttggctattaaaggaaataacatacataaagatgtttcaaaaatagtacaagtctaaacaatggtgaaatattattatcatcatggctgtttaaaatcactattttaactgtatataaagttatgccaaggaatcttattttttcatattctttgcacatggcataccccattttgaaaaacaatacccaaataattcatgtattttttcttcaaaacgtaataggaagaattgtagagaataggcatgttttcccagtattgagcttgttttctcattctcccacatggaagccctgggtcttctacaatggaggcaggtgtctctgcagctatttacctctcaatctgcattagtcccacaaggacccaccataagggacaagtaaacacagcgaaagagaaaacgctatagaagctaaattttgtcaatattgctgaaagaaggcttgttttaaaacatataaacaccctccttccacacacacaaaaaaatcaaaaccaattaagacacaatgtaatatagtttttcattaaccttttctaaaatcttaactattgaacttggccacatgaaataatgctaacaatttttatacaaaaactttgatttcaaacacagaaattaattaatccaggatgctatgataattccagaaatttaaaaaaatccagtgcagattgaatccaccaaagacacctcactagcagtcctcttacacatcaggaatccggccactgacagacagtacatcaaacaagccatctataaaacagaactgaacttaccgatacatcatgtacaggaggaagaatatgatcttgcaggtctgcacccactgaactcaactttctaatcaactatatgacatctctagatgtattagaagtctacggctcaaagaaataaggaaacaaattacaagtagttgaaatgaaactagtttgacaagtctgaacagagaagtttcaacccatagaaggccttgaagaaagccagagacaggatagtcccaacaagaaagcaatatttttttagtatggactaattttgttaaaggaggagaaactggttacaaagattagaatgagaaataccttaggaatgtactagaattaagaatttaaagaagattatggtaggtatataagtattttaaagaaactgtcacataaaagctctagataaaaacaaacagatcttaaaatctaaatacataataaaaatataactcaagaaatattccataaattcatgttgaacagcaggtatcttacagaagcatagtgaatttactaatacataatagtttttttaaatacccacttctgagagtacaggcaaataaattaatataaaactatatgtttccccaaatgacttaatgtgataaaacattgacagacatttatcagaatgaaaaaaagagaagaaataaacattttcaattagacaaacaacatattaatacatgttctttgtaaaaaatgagactaaaaccatgtttgacaatgtcctactcttggtccctttccttctccctcagaagcacctagtgttaggagaaggggtgttaatgcttataatgcataaaaaacatttatgcattttaatttaaaagtatcacattgtatacattattgtgcagtttggttgtattcgtttaacattgtgaatatcattccattttggggaaaacagatctcccttattctttttatttttggagacggagtctccctctgtcgcccaggctggagtgcagtggccccatctcggctcactgcaagctccgcctcccgggttcacgccattctcttgactcagtctcccaagtagctgggactacaggaccacgcctggctagtgttttttttttttttttctatagttttagtagagacggggtttcaccgtgttatccaagatggtctcaatttcctgacctgttgatccgcctgcctcggcctcccaaagtgctgggattacaggcgtgagccaccgcgcccggcccagatctcccttattctttttaccaattgcacgaaggacgaaaatatttagtgtttcttgttcataccttataaccaaatggtacccatttaagggggaacactactttaaatagaggttttccaagtcattgcttctagcacttggagaaagcacatttgaaatctttttacacagtacagcagagtgctttaagtgcataggctctctaggagtgccaaggttcaaatctcagaagtttccatgtctgtaaaataggaataatattaattatcatcttttagggtttttgtgaaacatatatgagttaatgctgtgcatgtaaaatgtttaaaatagtgcctcttgcaatggaagcaagaagaaacatcggctattattattaggactgtatttcatttgcatatgttttcttacctaatatttaacagacaaaaccttagtgaaggttattctagtgaactatacaaggaacacacataggaacattctttccttccttttccttcctttccctctttttcctccttttcttctggcatagtgcttcatggaatagtgaatagggcatggacttagaatggaattctgactctgctagttaatttgagcagattacttaaatcccttgagcataatttttctcctatttagaatgggttgataccatctatatgcaggacctttgtgagtgttaaattgcataatgtatgtgaaactgtctagcaaaatggcaataaacaacggcttccattgtgagtggcagaagtcctcatagacagagctctaactttggagagagatataccagcctgcaaatcctggctttactctctagctgctggttggcatttttgtgtcttaacttccttgtccgtaaatggaatgaataatagctttccagacta

SEQ ID NO: 317469 - DNA, 4001 bp, Homo sapiens
taaggtctcaaatttgtttggaattagccagttataacagtctggtagcttgggctttctgagacatgcatattagtctaagagactaaacattatgtagcctaaataattattctaagttctgagatggtttcaaaataatcactgctttacccagcttaaaagagatttttctctaaaaacccattttggatgctctgaaaatttctgaagagtacatattattgactatagctctgacatgactttttcctcctcacatggctttctcttgtcaaaaataatttaaagtactattttatatctaaaagagtacagtaagtttgtgattaactcaacccttcctctaataaatgtagcctctgggaatttattattatttttgaataatagctgcacttttaaaaattatgttctaaatatcaaaaaatgtccattcatgaaacaatttactctcatttaccaaattaatttttggcaacacttttttctaaaggtagcatttgcattacaagatgaatccctcacttaacaaaggaaataggttaaaaattaatcttcaatgaatttaaccaacttcgtgtacttaactaaactataattgcctcacttttagaatgaatctacttcaaataagagttaattgctggctgcacatggtgactcatgcctgtaatcccagcactttgggaggccgaggcaggcggatcacttgaggtcaggtgtttgagactagcctggccaacatggtgaaaccccatctctaccaaaaaatacaaaaatcagccgggtgtggtggtgagcatctgtaaccacagctactcaggaggctgaggcacgagaatggcttgaccccagctccatcacaggggaaaaaaataaatgaaaactcattgccattctggcataaccatttgccttaatcaacttgcaataatgatgttaatcaaaatggtggtgagtacattacttacaattttaaaacatcagtcttgttacaattttacctttatggtccatgccagtggttagatttccttttaaccacttttgggcactgctttaggagttaaacagcaaagcattaaaaaatatataattttcatgtattagaacttcatttataaaccatttgaattagatgtgcctgaattatctcatataatgaaatgtgttaaagcatgactgtggtgcaaaattcttcaaattttataaaaataaacattttttccatagaaaactttaaatcattagggtgagaattgtgcataaggagcagagaagtgtaatgaacaaatgggtaatggcctctattcttcactttctcctggaactttgaacaaaagagagtctacagaaaggaagtcattggaaaatttatgaagttttgagaacctgcagtttgcctgttgctaattcagaatctatattagaaagtacattattccaaaatatataatggcattcatattttttattattcctaagaaaaccttttaatattagaaaatttgatttcaattacattactagagaataaaaacggtagcgttcttatgagtgattgtaaaagaaatcttatgcctcatttccttaagatttcaggtcaattatatatttatattctttcccagtaagcaaaattttgctgaattattatttttctttttaacttttggaaactttcccagagacttcaaagggtctgtagacctcagacaatagagtgtttcttaacagtgtccaggaataaaaactaaattataaaaacagtcaattaacaaaaaactagaacatacttaatggcaacttgctacattttgccaacttgctctccccagtgaagtcccctttacctgtacataatgttctgattgttatggcagtatcaggtataacggtggtaatgatgatgacgaagataacgataacgatgacaatgctggtaatagtgatgacaaaagttagaaccttctgacgcagcttttgacttatgtgctacatccagtgttggagcttggtttttatgggctgggtaagatgtagagaacaaataagatgaaacttgtctgactagtgttaatgaccatcacatttctgtagtttcaagacaggagttaacccaagaatgacaaacttccttgacttggcgatttagaaaaaattacggcccagtttggtcagctaagaggcacacccaagaaacagctttgaagtatgtaggggtaatcctaactctatattttaccaattccattatactgccttgtctcttctcagttgaaactaactataactagttaaaagtttctgacaaatgtcgttttacaatacgtcaattttaatatggcaaatattgccatcattctcatgcagatgaaattctatttcattgtggtttgcatttgcttttccttaattacctgtgagaataatcgtttcacatattttgagggaatttggattttcacttttgagaatcctgttcataagtttagtttttcatcaacaggcagcagatggtaaggaaaaaaaaatgggttgctaatctttttttcttatagttatatgtgagttccttatatgatctggatattaatgtattattatactggatattaaccagttatgttcacctatttattaattacctgtccccagggtgcagcttgacatttcattatgtaaagagatttcagttctttaaaaacttcaagaatccatttacttttgtaatgacatgaaatgataatttaattttatattgtcttaatttgaaattattttttcttactaataacctgttttccaagacttttttattgcagagttcatcttttctctacggatgtgtgaggcctcctatatcatatacaaaatctgcatgtttcttaactctctattctgttccaatagtctatttaccttttcttctgtcaatactaaatagttttaattactatagatcaggagtcagcaagcattttctgtaaagtgcccagacaataaacgtttgaggctttgtaggccatatggtctccattgcaactattaaattttcccattgcagcacagaaacagccaaaaatgctaagtaaaaaaatacatgcaggcatggctgttttccagtatttacttataaaagcaaatggtgaaccaggtccatgggttgtagttttccagcccctgctgcagattacagtaggtcatgatttctgaaagcatatgttttctcaaacacttcttcaaatttatattggtaattcttaactttctattctgccatatgctttgaggatcagcttattaagtcccattattaagtcccaagaaaatattttgagattttgagatttcaatagaaattctatttatttcacagaatagtttggaaagattcaacatcttatattgttaactgtttatcagcatgatgtatctttctatttattcattaattttgttttgtcattttactcataaagtgatataaggcacatcttttttatatttattcctctgtttgaagtttttctcatagtcatgaataatatttttcctgttaaattttctaattatttattgctagtgtgtaggaatgttactgattggtattagtaagtagcatgcccagcaaatttgtttagctacttttaaaattaatagctgtctttagattctttgaattttctatatagatgattatgttgtctttaaatattaagatttccaaatatcattcagtacagttccttcctttcttggattggctttccttcagtttctggtattttttgtcactctccactgccttcatatggttaatttttatattattttccaaagtgtataattattaactctagaaggcctgaatataaggtagtttgccattactggaatgcttaaacagtaacttttaaagaacagaatttcttaattttaatttaaaatttatcaatctttgcttttaagtttagtgtttcatgtatacgtgtatg

SEQ ID NO: 317470 - DNA, 4001 bp, Homo sapiens
aacctgagaaaatctagagtgaccaaggatctgaaatgagtaacacagctgttcaggttcctgggccctacggtaggatttccttcttcagacaagggaagaaggtagataaagaaaggagcatttcatcttgcagcagcatggaagagagctgggagtttaattttttataaaaaaagcaatcaaaccatccaaggcagccaattttcaaccaaaagtatttcagaattacctgaagatttatctaaaattatgccaaaattacctacaattacctaaaaaaagtatattgtacaatttaattttccttctgttatttgatatgaatacctagctgctatttattagtagtagatacaggctattaaagagataaaatattccaaaaagtgtgatccttagaaaccaaaattccacagaagagttatttgtaattggcaaggttggctctgattgagtgtcaaatttcctgtacaatgatggatcaacttagaaatttgattgattcaaagccttctgaaattgtacaactctttcaggatttgtatcatttacatgtcttcttttattattttccattgaatgatgttttgatatacacttgactgcttataagggcaatattttaaaatcagagtaatttctttaaaattaaaatatttcagcaaaatacattttaaaatgcactatattacccaaataatattacacttatagatggtttaagaacaataaaaaatataattcataaactcactgctttagtataacaaacctgattaatgttctatgttctttattagactttctcccatgtatagctttacaaagtagtagttgatgagtaaatacaattttgtgatttgtttttttcacataaaataagaacaaactcagtatgtaaattacttcataggtttttaagctactttaatacatttcttgtatctattacatgaatatgaaatgattttatttcttctatcattggaagcttagacagctatccacttttcactcatatatatatattcaagtgcatataactgtatatatatttttattacttaaaatggtttgacttttgattgaattttccaatgttcaggagatttaaaataaattcagctgcacttattatagctaacacattgttcatgcttttgttgatcctttcagcatgacttatcagtatcatgttttcctgtagtcatagaaaaataatatgcataatatatacacttaagtgcacacataaacataccaagttacataattatttcattgttttgagatgttaacgtgtgacttgattatctcacaacttttttctttctttatgtgaaagtataggaaaatacttattcattaactaaaaagaaaaccagagagagattattttctcttaaatgttagcaagaactttcttgaaaataattctacaactatataaaaagtagaaaaataccgtctttactttctaaaagtgtactttaggatttatggcatatttatttaatagctagcaataaaactgtaatggaagtcaaaacacagaatcctcgaaaagttccaaacaacacaagaattgtttactgattgcaattttaaaatccacacaccacttttcgaaatgttgcacatgagaaacaaaaccacttccttatttaaagatatgttgtcataacgctaagctaagtatttttgtggttgttttataaaaaattcagttaagcaactatgtaccttatgaaaataatatcaagcatattatctaaacaatatctaagagtttcgatgaagttttcagagaagtaactagaagattgctagacacagtcaaaatttgctaagcttctttatatttttcccatactgtaagatatagtaaaacttttaaagctacaaagacaaaaacaggacttacctatacattttaatccttaatgaagaggttcttttttctgcctactcaactgctttgagattcccactcaaatgaatgactctcatgtattacgtgtgatctatagttgaggacaaaggaggaaatctcatgttaattaaaatctaacttgttaaacaagtttgagggaatcaacaaaccaatagtatgacttgtggaagataattggaaatagacagggaatttcacaaattagtaagaaatttatttattctggtaaattgagattaaacacaattacaattgacaggtattttgtgaaagcctgtgactacttcacaactgtagagtcacttttagttcaagaggatttgacacttattttgctcatgttatcatattgttatacacctcattcctcaacacagccagccaagatccatcagaacatactttccgtacattaatgggcactacctctgaattccctcatctgtatgattaaatgcagtttttctcataatatatgaaacagagcataattgagtagatgcacaaagtaagacaagcaaacagaatagttggaactaaaatccactttgtttttttccaaatatgatcatttgaaaaagctattctaacacactactactagaagaggagcagacagaagaagacagtatgagtgtgtagggtgttagggtaaggatggagagctcaagaaaacaggcaagactagcagggaggggaaaaagggcattcctgtctaacattgcaaagaagcaggatataaatttggaaggttatactggggttactttgtgagaactaatgaatgctaaagaattggaacttgtaatagaattattacaatattattagtagtacaatatgaattctagtcttagctttttcaccaactaattgtgtagcttaagggaaaaaatttacttatttctccataagtcacatgtatctactaagaaaagtggaagctgaatcaggaggtcttagaggactctcaattataaaattctatgacttcatcttgtaaagcactgacaactaatggttaaatttactccaatactgcaacttcagatgtgttcagttacttgactttttctatataatgtgcaaatcaaacaacagagacaggaataagtggttacttatatgttttttcccaaatatatttgggaaatatattttttacatacagtatctcatgcctgacattctgccattgattttttagcaataaataaataactataataagatttaaaagtttaaaaaataaagttacctaaacaaaccatttttaaattttacatgttaacttcaagtacctttaaatatagttatatcatggtatataattttgtattatgctttttatacttaatattatttcacaaatatatcgctattactaatttttatttttagtagctatatatttataactttgtatttttatataatttaaaacacaaatatggtaccaagattcattaattattagcagttttaatggttgcattttaaaaggtaaatcacattacattgaatggacttatcataaagcaccaaagttattttctaatgtgaagtatttagacattttctatttttttattgtagatgattctttgaatgaccaccttcacaaacatagtttttctttgtcatcctacagttgaatttttcttcagaataaactgaagaggcttattgagccaagtgatttaaatattttaatggcttataaaattatacttttgttttaataatttttactaggatttaaagtgttattttctgttttttgcttacagaaattttctctaattatgcatgctctttcttgtatgtctttatttcctggaatactcagcagcaaaggcctttttaccacgtaggtacttactcatcatatgttgtttagatgtctcataattaacgtattagtgcagatcccagtgccctattactattcacaacagaacgtggggatgagtcgggggaaaggcatggggaaaattgaattcagtctgaaagtgacttcccgcatgatgagctcaacgcagaa

SEQ ID NO: 317471 - DNA, 4001 bp, Homo sapiens
gtggatgtcgatgcctataaattcagtctgcttattttcacttcttctcagtggttgctgataaatacagttagtatacacccctatgaccaataaatatatttaatggacacattcttctcttcccaaatctgttctctataaacttatgcctgatagagttttctttaactttctgttgtgtgtttataaaattcatgtgttgatctcttcatgctcaaagaatagtccaaaataagagtttggagaaaatggcagtacaagaagaataatgcttacccagtttaaattttttcctacccttaaattctaaaaaaaaaaaaaaaaaactgattcttattcaggtagagtcagggagaaggctatccgaaatctgactgaaaaggaaggagcatgctatttaataaaattccccacctgtttcttgtattctttctgagttaaaaccaatgaccttaagaagaaattgtctacttatatcctaggatttcaattatccctcttcctcgataacactcctgttggcacatttacgacagcaaatgtgaataataaacttaatccttttttgctctagtacatgctcttaacattttatctcatctagacccactcaaacatagatgtgcttcatctttcatacaatcttcagatcaggaagacgtttttgtttgttagatggttggttttggtttttggttttttccatgagagattatttgcatctattctgcagcaggatttttaaaaatagtcacatcttttgcttcaaattagagactacactcagaaaaattcactccagtattcccacattataccgcctctacacatttataaccaaattccaaatctctgacatataccatagataaggcttgtaatctatttagtatgttaagtttattggaagctttcttgaagcactgttttctatagtaaagtcaatgagaaaaagagaataggatacaaaaccatcattggttgtaaagaaatacttgcaaaaggcagggagccttgataagcccaacaaaatgtttagtatccgtagcttttagttgcttcatggatatgtacagaagagtattaaacttctaataacaagtatgtagaactttcaactgatgacagaacctgtttttccatgttaaatgaagaccacagatttcattcaaagtttaacattttcaaactgttctcaaagtaaaaactaataaaaaatgatatgccaatatgagaatcagagaaaataaattttaatcaggagataaaattattttcaaagacaaaactagtaccccaaaaccttgttactgattagtttctaactttgaaagaaaacctcaaaatgatcatgacttatctttggagaagttgactatggccaggcatatcagtggatttattttttaaatcaggctataataatttagtcatattattttcttcagttgtttctgattctttcaaaacatctagagtttttaaatttttaactacttacagaaataaacatttttttctgcattatttcagactttttttcatgtacaccttctaaaataaaagtgtttctcaataagacaaacaaagcccaagctaaaaatatgttatatctttcttgaaacatatggccaaactaactaaaagacagctgtcaaacaccatgtacctttacattgtgtagaaaccttctaaaagtaaacagaaaaacacatgggatacaacaaaagaggacaggaaacactaatacagaaagaatagaaatctttttcttgacataattttatgtaaaatctcaaaaatatgtttctatatttaaaaaaataataaactgtagatctacacattccttggtgtggctcatactgttttaaactaaaagttaccttaagacttctagaaagaaaaagggaactaactcaccgatacatcattgccaaccagcaatgaagagtcctgtgaaggtcgaggtctacatccaagtgtgtgaatccagctctatcaatgactttgtgggctgaattgaagtgaggaaataagtcactgatgatctcaacagaaccagtctgacaagtcttggctggtgtagtggggactatatgtgactagcaggacaaggacaaattttacagggagcaagagcaaaaaataaatttataatttattgttttaagataatttcttttaagtattagtgtaaaccagattttttagaaaagtcagacgtataaatttggaaagaaattttaaaactatcttgcttgaccttctcttgtttacagagaagaaactgaggtttaattaagttaaatgacttggtcaaaaaccaaatagttattaaattgccaagccaggactgacattcatattttttaaactagcctgacacaatttgcattcgattatgtacataataaaaatttcactttggttttaactatgttagccattgaaaatacactagagattagaaaagcattaatatttttaaattatgtggcatcattcttctagaaaaatcagttagtttgcaaatgtcaacccatacttaagacgttatatttctttcattatagtggagacaggcatatcaactcacgctgaatcactactgtcttatttctagggtgaaaattacatttttttaaacgtgtgctcacatactatgcaaatatctgtgtgtttgtgttaggtataatctctaaattgctttccctaatccttacaaaacagagtaggtgtttctcctctgtgctttcatggtatcataatacttacctcattatactagaaattttattaattgtatctcaactccacaaggttgtgaattcttaacagactgaaaccctcttcctagcatattcaggctctcaaaaatatgcataaaaagaatgagtagagggcaggttgcaaggaaaggaggagaaaaagagggggtataacccatcctaaaaagcaccttaaaaatattgtttaatttcattacatatccatttagccaacagctcacctaaacagatgcaggagttggaatttatgtaatgtgtgggatcagacggccaagaattggaatcattcactagcagtaacccaagaaacctctgtgctgaggcatactgtgctaggggctaccaacatatatcctttttattctggtcactaggtcacttatcctgatgaatagcatggatatttatttacttaaagtcattcaatatatagtattaggtttctgtatactcatttaaaaattacactttagccaaaaataaagaggcaataataacagtaaaaacttctgggttatgagattaagctgttcttatacagcctttaacaaagtgaaatctctgccaatgaaatgttaatatggtttaataatactatgttctattttatactcacattttatgaaaatattgataatacttttgttttcaaaggaaaacagattccctctcagtgtaactttgggccaagacttgccagacttattttaacaaaatctcaagacatttgtttctttcacaaaatcaagatttcaaattcaaataaattctttatataggcctatggacctgtatacttagggtaatatataacctagaattgtagatacagaaaatgagagggctatcatgaatttttttaaaactctgtgagtataagctacaatttgtagaaaattaagagattacgcatatgtaaataaaggacaagtgaatgtcagactaaagatattaaaaatatgtcttccttgctatattaatggcctttgttcagtctgctcaatgggcattgcagtgtatattatcaaattttatgatatatcttacactttagtagaaatttgaatggcaaggaaagaagaaggaatgaaacattagagtcataattttgtcttccaaaagttcgaaaaagcaaaagtttgtctttcattcaaatttttgttgctgttttttctaaaaccataaattttattctgcaatactttt

SEQ ID NO: 317472 - DNA, 4001 bp, Homo sapiens
ccaaagaataaaccaataaaccaaaaattgcttttagctatccacaaatattacttcaaggcccattaatggtaacaacctcacccctcattcatttacttataaaccttccccacatttcacagataaaagtgaggtcttgagaagtaccagacaaaagagttcaaagttggatcttgaacacatctaaatgatggtactctttctactttaccaaaatgagaaagacagggcttttgctaagaggccatagtctatctgactaattcattctttgagactagatcccttgggcaaaatacctttactaatgaattcaataaatccactgtctaagcttcttatctttatacacaagatatattttttgacagaatatttgttttaaaagcagatctgatttgaaatctaattagcaagaatattttaaatcctccaaataataaatgtttgagatgatggatatgctaattactctgatctgatcactatatattacatgtactgaaatagtgctatgtaccccataaatacgtagaattattatatgtcaacttaataataaaaccaaaaaatcctcagaactctaataaactctggatcaaagctgacgaggcttcaatatagaaatttcatgttgtaatgatattttcagggtggaaaagtgagtgtttggagatgatgccgtaagttgggaagagaagaatcaggctgataaaaaacacttactgaagaattctgaaataaattagaataagagaactccaaatttttctaattttttaaagaaatttttagcatattatatttatatgaatgttagttaaatataaaagttttttctactgtacgttttgtcttattctgtctttatcttgataaataagaaatatactttgttgtatttagtaagaagtacagataatatgctatatcatgctatcatgatgggtttatatgggagatttatgcatgaaatggaagtcttccttaggcttatgctgtcatttgaaagtaaattagggagggcaggaacactcatcatttaagagtgccagagcctacaggctttaagtatttaggttaattgaagacaaaatcaaatgactgaacaattaaaattatcacaaaatcatgattaagttggaaacatcagtcagtgcagaacatgtgggaaatttgtgtctgtagaaagatcgagaacctttttaagaaacaaggctagacttagcacaagtttgaatgaaatcatccatcaaatatcaattattcctttcgaagtctataaaacaatagcctgaatattacctaaacataaatatataatacaaatttatttaccttaaattcaacaattgatcaattattttggagttcaattatgatgatacaaagtctagattttgttaatttgataattttttacatatgagtattttaattttaatcatttcactcatgatatacaaaataacctatcatagtttctattagagttaaataaaaattctagtagactctcctcttaaatttatatttaattttcccagaatatacatcaataagcaacatatgataaaaatgtataccatgctatggaacatggaaaagtaactaaatgggctatattaaacactttattctttgaagtgtaggttttactaaatgttttaaatattaatatagttaacttattacctcacatcatttctatttcttttatttagaaacaaaaaacaccacattggcctctgttgttcaaaaaaattctgatatttaaaaacaacaacaataaaactttaatataaaatacaataacacacattaaaactctaatgtttaaatcaatctccaccagccaacatctgtactacctgtctcaggaattgtaaacctctgtccccactgataacctttactgagaaaagctgaatacttacgcgtacatcatgaacccaggactggggcagcttctattcagtcaccatctgatctgtatcagcaggttaggacttggaggctgcaaaataatgacagtcactggcaacaagaaaggaaacaagtttgacaggtttagtgagtgaggtatgcagtcttctagcctgataagaacaagaacatgatcagttttgtgccaactggctccacacagtgaagtaattgtcaatatccgcatagagaagctccaagtagtagagggctcagaatgtgcaacttgtgatgattcagaagaccacacttttccagttggggaagtatgataagcattgaggtgtggccccagtttgctttccaaaaaaaaaaaaaaaccaacaaaacaaaacacactagagcacactgatggcacttcttatttgttcattagaaatgttcagtctcttccctttgagggaataacaaggggtagcggagtggagaagacctgagttatgaaccagggcacctgtctcagccattattcagcttattgggacttactttcctcctaaggaaaatggcaggactgtattagcttttcttaatactgtccattttagctctaaatataatagaacgtattgaaacaatttatttaccccaaaaaaggcagaaaaggaaggtaaatatcaaaagcaaaaacgtattttcttctttcttattattaggaataactttgtccatcttagtggtatgaattcccagtatttacaaaccgtccctttaaatactttcatatatctatagagaatttagtataaatacatgaacttcttataaagatcagaaaagttacaaaatagaaattacaattttaagagctattaaggctcagagtcaaaggatattaaagaaaaatgataaatttttactttggttgtacagaatatcttcatctaaaatgctaaaaatgcaatgtgcctctaattgtaatactttcattataatgctctgcaaaggtattaaaaggaactatattttccaaaacatttgacaaatgaaaaaaatgaaacagattgtcagtttgtataaacaccaacaatatgacagaagacatatgataatacaattttgagtagaactaaaaatgtctaaataagtagttaataaaatttaccagtcagttcacactgaaaactataacttcatttagcaaaagtaactttcatctttggagcattactttttttcaaaagtaaaaaattccaaaatctaataaaaaggtgctagaaaaattatatttgtttagtatataaatataactgattattttcatttttatatagtatatgtagtagtatttgtgctaatttgaaattaacattgtgtaaatattctttttaaatggttttcatgtttacatttaagcatttcacattaataataaactaatattttataatccttatttgttaaaattcataaatatattctcagcctcttacattagtaaataataatacagcagacaataagctctgtggcttaactgagggaaattaggctttacaagaaacatgtccaagtaattacaagcaagtccagcaaccagctttgaggattctggattaaaacatgtggtatgtatagatttattctctcaagaaaatcagtgttttcatattgaatcacaggacatggtggggggaacttaggagatacagcaatatttactttaaccatgtttaaaaagttagagattacagtagaagctgttttatgtttaatggctcaaaaatagagatttaattgtctcccatcggaatattttctgtttggccattctttcaaatgatcttttatttgaatagttttaaagtttgtgtttattggtttttattttccccctccttcagctttcagtgactacgtaaaataactcatttttttctctgacataatagctttaccacagtggggtgacagtataccaggctactagataagatgactgggttcagtttctggcactggcatgaattacctttgtgaaaataggaatgttcttaacctttctacatctc

SEQ ID NO: 317473 - DNA, 4001 bp, Homo sapiens
catccctgcactgtgggactacagcggctattttattctttatttttcagatattcaaaattgttttataattttttttcttttttaaaaagggcatgtttctttttctctctaaaatcaggctgtggggccaaccctggagacaaaaactatctttcgcagactactgcctttgcaggcttagtttctttcctgggcaaactaggataatagccatgaatcaaatggaataatagatgccagagctcacccgaatgtttcagatgcttgcaaatactattgcacaaaaaaactgttacttatactgctgttgtggtgttatagtttatcatcaaaaaacagacataaacatcatagacaaggacaaagagaagaaagtcaggatttgcgtctttttttgtttgtttttgagacggagtctcgctctgtcgcccaggctggagtgcagtggcacaatctcggctcactgcaagctccgccgcccgggttcatgccattctcctgcctccgcctcccaagtagctgggactacaggcgcccgccaccacgcccagctaattttttgtatttttagtagagatgggttttcaccatgttagccaggatggtctcaatctcctgacctcgtgatccgccgccttggcctcccaaagtgctgggattacaggcatgagccaccgcgtccggacccttgtgtccatttttaatttaattttttcagacaaggtctcactttgtcacccaggttggagtgcagtggtgcgatcttggctcactgcaacctctgcctcccaggctcaagtgatcctcccacctaagtctccctagtggctgggagcacgggcacgtgccaccatgcccggctaattttttgcactttttgtagacagggtttcaccatgttgctcagccttgtctcgaactcctgggctcaggcaatctgcccgccttgcctccgaaagtactgggattacaggcgtgagccactgcacccagcctaggatttgtgtcctttatcagacacgggctgcatttgccattgctcccagcatagagttgaagcgccactagtgaaagacacatgcatgggtgagggctggaagggactctagaacacaatatgagtacacgaccttggacccaagacacacatgtgtgcgtacacacacacaccatacacacccctcagaatgtgtctcccgcacacacacctcaaaacacccctaagaaccaaccggaacatacacactacacaatacacacagaatacacacagcatacacacacccccctcggaatgtgttcccacacacgaacctcaaaatacccctaagagcccacctgaacatacaccacacacacacagaacccaagaactgcaccaacccccctcctcagaacccagtgcctcctcaccatcccccaggacccagtgccctcccaaccccccaggatccagcattcgcttatccccttcagaaccttgcaccctcaccccgcaggacccagagccccctcacctccaccagcacctggtgacgcctcaaaccccccaggacccagcacacctcagcccgtggtgtccccttatcccactcaggacctggtccccctctctcccctaggacccagggtcccctcaccccccagaagctgttgccctatcacccccaggacccgacggccccttacccccaggacctagtgtccctcaaccccaggacccggcaccccctcaacccccaggacctgatgctcccccaacccctcaggagccggggccccctcacccccaggacccggcaccccctcaactcccaggacctggtgctcccccaacccctcaggacccgaggccaactcaaccccaggacccagtaccccctcaacccctcaggacccggggcccgctcgctcacccacccaggacccggcggccgccacacgcactctcgctcccgcagctcctctggtacccgccctcgtacctggcgcatctgggcctcggcggcgccgccctcctgccttcgcagctgctcccggaagcgcgcaacctgctccagcagcgcgtccactagggacggcgcggcgtccccctccagcgcggccaggcgggcgcggaggcgagcgatgagggcgtcgcgggcagcgagctggtcctgcaggcggcgcagccgctgtccggcctcgtggtacagggtgcagagcgcggcagctgcgcgcggggcctcctcccagccgcccgaccccgggtcccgggacatggctgtaggcccgcccgggaggccgcgcggccgccggcaacttccgcgcccgggccccgccggctgccgcccttcccggaactttccccggtgcgccccgcccacccacaacagcccggccccgccctcccccacgcagccccgccccccgcgcagccccgcccttccccgcgcagccccgcccgacggcagcccgcccagccccttctcgcccggccccacccctcccaccgcctacagcccggccccgcccctgccgtccgcacccgtccgggagagttggcctggcccccgaggctgtccacaccccagctggtgctgggcttattccagtggccccaaacatccgcctctgaggagttgtcggagagtcgaactcagcccaggagtttggggattcatcagcctctgatggaaaggaagggcttaacgacaacccccaagctctggagctaagtgtgggtctgaatctccccgcgagggtccaggccttgcggccacagcagcaacagaagctccaggagctgagctcgcagcgcaccaagcacgtggcatgtgttccgtcacctggggacactgagcccagaaagagctccaaccccctgccccgcacgccgctttcttttttctttccttttttttcttctttttgagacggagtttcgctctgttgcccaggctggagtgtaatggcgcgatctcggctcactacaacctccgcctcccagtttcaagcgattctcctgcctcagcctcctgagtagctgggattacaggcgcccgccaccatgccctgctaattttttggtattattagtagagatggtgtttcaccatgttggccaggctggtcttgaactcctgacctcaggtagatccaccggcctcagcctcccaaagtgctgggattacaggcgtcagccactgcagacgctgctttgtaaggtggctagtatgggcccacgggacaaccttcctgctagatgctgttcttatatagcagaagcagcaggaaaccagccccttcccaccctttcgcttttccatccctttccttccccaaaattcccagacaaacgctagtgtttttccacagcccagtcttccccacaatgatgcccaagcacacatggggtctttccaaggttccctactcaggatagggcaggggtcttccctgtgtgtgcacttgcccacaggctccgcccctgagcagcttcttgactttcttcccttatgtgatccacagccaagcctgagctgagcctgggaaaacacaagcttgtagaatcagacaagcctataagcaaagccagagccacccaagtgcttatggcccggacattgggctacacaggcctggctttgctatggaaggctccttcttactcatcagagcctgggcttcctctcagcagaaggaagggcagagcgagtgcccaccctacctggttgggctgttgtggggactagagggtggagtgtgcatggaatgcttgtccagtgcagtggctgctgcacagcaagcctacagtccccatggctatggttacaaacaatgcctattgattgtctggggcatgagtggaaaaaacaaaactggacccagagctgttagaggctaatgtgtggcctggggcacgtcattccagtgacctaccttgagcctctgcctcaactgtaaaaggtgcatgtgacaatccacagtctctcatccaacaacagccttggggtcag

SEQ ID NO: 317474 - DNA, 4001 bp, Homo sapiens
tcatagacaaggacaaagagaagaaagtcaggatttgcgtctttttttgtttgtttttgagacggagtctcgctctgtcgcccaggctggagtgcagtggcacaatctcggctcactgcaagctccgccgcccgggttcatgccattctcctgcctccgcctcccaagtagctgggactacaggcgcccgccaccacgcccagctaattttttgtatttttagtagagatgggttttcaccatgttagccaggatggtctcaatctcctgacctcgtgatccgccgccttggcctcccaaagtgctgggattacaggcatgagccaccgcgtccggacccttgtgtccatttttaatttaattttttcagacaaggtctcactttgtcacccaggttggagtgcagtggtgcgatcttggctcactgcaacctctgcctcccaggctcaagtgatcctcccacctaagtctccctagtggctgggagcacgggcacgtgccaccatgcccggctaattttttgcactttttgtagacagggtttcaccatgttgctcagccttgtctcgaactcctgggctcaggcaatctgcccgccttgcctccgaaagtactgggattacaggcgtgagccactgcacccagcctaggatttgtgtcctttatcagacacgggctgcatttgccattgctcccagcatagagttgaagcgccactagtgaaagacacatgcatgggtgagggctggaagggactctagaacacaatatgagtacacgaccttggacccaagacacacatgtgtgcgtacacacacacaccatacacacccctcagaatgtgtctcccgcacacacacctcaaaacacccctaagaaccaaccggaacatacacactacacaatacacacagaatacacacagcatacacacacccccctcggaatgtgttcccacacacgaacctcaaaatacccctaagagcccacctgaacatacaccacacacacacagaacccaagaactgcaccaacccccctcctcagaacccagtgcctcctcaccatcccccaggacccagtgccctcccaaccccccaggatccagcattcgcttatccccttcagaaccttgcaccctcaccccgcaggacccagagccccctcacctccaccagcacctggtgacgcctcaaaccccccaggacccagcacacctcagcccgtggtgtccccttatcccactcaggacctggtccccctctctcccctaggacccagggtcccctcaccccccagaagctgttgccctatcacccccaggacccgacggccccttacccccaggacctagtgtccctcaaccccaggacccggcaccccctcaacccccaggacctgatgctcccccaacccctcaggagccggggccccctcacccccaggacccggcaccccctcaactcccaggacctggtgctcccccaacccctcaggacccgaggccaactcaaccccaggacccagtaccccctcaacccctcaggacccggggcccgctcgctcacccacccaggacccggcggccgccacacgcactctcgctcccgcagctcctctggtacccgccctcgtacctggcgcatctgggcctcggcggcgccgccctcctgccttcgcagctgctcccggaagcgcgcaacctgctccagcagcgcgtccactagggacggcgcggcgtccccctccagcgcggccaggcgggcgcggaggcgagcgatgagggcgtcgcgggcagcgagctggtcctgcaggcggcgcagccgctgtccggcctcgtggtacagggtgcagagcgcggcagctgcgcgcggggcctcctcccagccgcccgaccccgggtcccgggacatggctgtaggcccgcccgggaggccgcgcggccgccggcaacttccgcgcccgggccccgccggctgccgcccttcccggaactttccccggtgcgccccgcccacccacaacagcccggccccgccctcccccacgcagccccgccccccgcgcagccccgcccttccccgcgcagccccgcccgacggcagcccgcccagccccttctcgcccggccccacccctcccaccgcctacagcccggccccgcccctgccgtccgcacccgtccgggagagttggcctggcccccgaggctgtccacaccccagctggtgctgggcttattccagtggccccaaacatccgcctctgaggagttgtcggagagtcgaactcagcccaggagtttggggattcatcagcctctgatggaaaggaagggcttaacgacaacccccaagctctggagctaagtgtgggtctgaatctccccgcgagggtccaggccttgcggccacagcagcaacagaagctccaggagctgagctcgcagcgcaccaagcacgtggcatgtgttccgtcacctggggacactgagcccagaaagagctccaaccccctgccccgcacgccgctttcttttttctttccttttttttcttctttttgagacggagtttcgctctgttgcccaggctggagtgtaatggcgcgatctcggctcactacaacctccgcctcccagtttcaagcgattctcctgcctcagcctcctgagtagctgggattacaggcgcccgccaccatgccctgctaattttttggtattattagtagagatggtgtttcaccatgttggccaggctggtcttgaactcctgacctcaggtagatccaccggcctcagcctcccaaagtgctgggattacaggcgtcagccactgcagacgctgctttgtaaggtggctagtatgggcccacgggacaaccttcctgctagatgctgttcttatatagcagaagcagcaggaaaccagccccttcccaccctttcgcttttccatccctttccttccccaaaattcccagacaaacgctagtgtttttccacagcccagtcttccccacaatgatgcccaagcacacatggggtctttccaaggttccctactcaggatagggcaggggtcttccctgtgtgtgcacttgcccacaggctccgcccctgagcagcttcttgactttcttcccttatgtgatccacagccaagcctgagctgagcctgggaaaacacaagcttgtagaatcagacaagcctataagcaaagccagagccacccaagtgcttatggcccggacattgggctacacaggcctggctttgctatggaaggctccttcttactcatcagagcctgggcttcctctcagcagaaggaagggcagagcgagtgcccaccctacctggttgggctgttgtggggactagagggtggagtgtgcatggaatgcttgtccagtgcagtggctgctgcacagcaagcctacagtccccatggctatggttacaaacaatgcctattgattgtctggggcatgagtggaaaaaacaaaactggacccagagctgttagaggctaatgtgtggcctggggcacgtcattccagtgacctaccttgagcctctgcctcaactgtaaaaggtgcatgtgacaatccacagtctctcatccaacaacagccttggggtcaggtgtggtgtattgtattgtattgtactgtactgtatcgtattgatttattttagacggagtctcaatctgtcgcccaggctggagtgcagtggtgtgatttttggctcattgcaacctccgcctcccaggttcaagtgattctcccacctcagcctcccaattagctgggattacaggcgcccgccaccacgcctggctaattttttgtattttagtagagacggggtttcaccatattggtcaggctggtctcgaactcccggcctcaagtgatccgcctgcctcggcctcccaaagtgctgggattgtaggcgtgagccaccacgccaggccgccatgtgtattttaga

SEQ ID NO: 317475 - DNA, 4001 bp, Homo sapiens
acggtgaaattttgccaagcatatgcttctgctaccaaaggaggatgggtatcatctttcctagaagttgttcaacatcacatcatatattttttgcttctgtaatgcctatagtatcttagaggttgtcagtataataacttcatccttaaatgactcctgtgatgtaaatttcaattttactaatattttattcaaatgtatataaaacagatcaatgcttattgtagacccacagtctttgaggggagtattctgctgcatgtcgagtctttccgttgaggtaggtaaaatcatattgacaaggagagacttacacacccaacacagttctagaataataaagtatagtgcacaggaaaatgctaaattatatacaattgaaggctaaaatgcttgttaaagatactgaatgtaattgattgaggtgaatgggagaaatcaatatttctatatttatttgaaattcagatcttttccctttccaattaattttaaacactattgttagagtagcctattggaaatccttggctcaaaattcttaatggtaccccttgtcaagtcatgattttcatattgaaagtacagatgggcctcttttaatgaaaacgttctcatagagaatctgagaatatgactccagacacacaggatctcagaaccctagtttaagaaatactgacttgagaacttgatcattattatttcttgaaattatctttcacttgaaaggtatcacaaaatagaagttttgtctttataaacagaaatattggcctgtagaataaattctcagctatttagtctctcactcaagagagagtatcaactgagtttccttctttttactacacaccacctgtggaagccaaaacaaactgttagttgatccagacacaaatacgtgactttcctaccaccacgtctttgtacacattctgccttcagcttggaatagcctttccttctatttttccatctttctcctgtttctctttaccagaaattaggttaaagcacttcttcgtgtatttctatcccactctctggaaatctcactttcctcagatttccaagaacagtttatctgtgcctcttttatgaggcagagcatcctaccatatatgatgcttaggcatctgcatggcttttcacttctaaacttcaagcagcttgagtatagggtctgaatctgattcctcttctgcaagtaacaaacacaatatcttgcatgtattaggtgccacattaaaaaaaaaaaaaaagaaataactgaaccaacgaatagaaggaggctttaaaaaaaactttgaaagattgatagaatgtggaaagcgcctaagtaagggattttttttcataaggaactcagtaaacttctcaccctccttcaggtgagctaaggattaagcaaatcaggagaaaagatacagcaactccttcaacttactggtggaatacagttgtttcctaggagaaaaatttgtgcaattacagaaaaaccatccaccaaggcttgtcaatggaaatttacaaatactttaaaaatcaaattatcttcataacctaccatgacttttgccctctggatagcaataaaagaaaatatgttcagatagataggccatactgttacccgtcatcttttccttttctattctatatagctccattcagacagcttctcttctactcttaatacactatcattgccacaaagcagaagtgctctaattagaatattagtattagaagcatataatctccaaataaactgttattacctttcagaatcttcagattgattggtgaacattaccagtttatcgtcgtgtttctcatttttgttcatgagccatccacatggaatctaaaataaaaaaatatgaaggacatgaggctcagatgtacgtcaagggaagttaactatgtcagtcaccaaaggagaaaaccacctgttaaatgcatttttcatcaaaagccatgtttttattctcatgtcttgttttcagccctgccagacctgagaagacagaccacaagcctgccttctgcctagtttcaatgaaaggtaaaccactgggtgtaaacacaggctcagtgagttaaggaagaatctcatgacagggagaaattgtccaggagcaagtaaaagaaagctagacattctaatacatagagcatgaacggttaaagttgtcagactgacatgtttgtagtttaattaaccccagtctaggaatgagttctccaggagtgcctactgaccccaggacaccagcagctttcttctaggaagaccgctcatgccagctttttctccaacaggagtttatgattatttctatgattttcagggtaacaagggaagtggtaatggacaatgaaaaaaaagagaaaaaaaactgtacttccgacagaatttgtttctcattttttaaatttattattaagtttcacttaagtttggtgcaacttaagcaccaaactgtggacaaatattatacagactacatagtatgtcatgggacttacagtagaatcttgagattgaagaatttgaagaattgtgtatgctttaaaagccaattcctgcaggcaattaacacattttaaatgcatctggaaaccaccaattgctgagaacccatcagaaaatttaggagttaggcccatgggaaacacgaagccagtttgtctgagtttcaagcatttctgtttaattgtaacaacaaccaaaaaaaaaagtttgttaaaatgctccaggaaagattcatttcagctattggcaagctggctgtacatagtgttggagggtggctttttattttgttttgtgttgttttcggcttgtgacagctgtttgaaaatcatctgttaccaccatggtagccagttactagatgaaagcaaatgcctttctggatgactggaggagttggaccaccaactagtagagctatgttttaaaaatgcaaaattgcaaaactgcccatcttgtttatatggaacgctggagatattacacaattctgcaaatatgttgaagaggaaaccaagtgataaccatctgatagagtgactgcaataagtgtccatttctgaaacatgaaggcttaaatatttaactaataaagaaatttgtagtaaggtttttaaaatgtcttatattctttcactatttcaaaaattaccgttaaaatgctaatttccaagcatatgcgaaattacacatggagtcctggagtatcagggaatgatagaatctgacactgtggagaacacgctaagaattataatgccatcattttacagtagaggaaacagaactccagagaaaacaaatgacttggctaattaatgactgatctaggattaaacaccaaaccatctgactcctagtcatgatcttccattgttgttcataactgaaaattatacagaggaaattttaagtttgaaataaaataaaattagatactgatatattttaatactaatatattttaaaactaacctacaaaatttttacattacagatacaacatcataacactatatttcttaggcaatgtcattgtattatttgaactctggtagtaaacaccccaaaaatggcatgtgcaaagggaaatctccagatttaatattgtatagtttaagatttacaaataatatcttagaggcactggaaacagacaagatggaaatggtctcaaagacattaattagtttactgaacattgtatttccttcctaaattgccttttcctaggctagaattttacatttgttattattctatccaggaagtaaaaatattaaccagtgacaatcagaaaagtcaatatcccaggcataattataatttccaatagtttattttccttccttcctccctccctcccttccttccttccttctttccttccttgcttccttcctttctgcctccctcccttccttcctccttctccccgtccctcttcttctccctc

SEQ ID NO: 317476 - DNA, 4001 bp, Homo sapiens
aaagtgatttctttttgttctaaggtctttatccttcatgaaataaatatttgaaagatccaaactgtcacaactccaaacagatgggagtacaactatgagtaataggtgttcctctaataattcatcattatctgatcttaacaagaaagcagtgtttagaaaaagagctaaagagtaaagtgttaaagagcaatttttaaaagttaacaaagtgaggtctaaggttttatcctcagcaggaagtatttagttggccaaaaacttagtaagcacctttgccttccccttctcactccttctctaccttggcccccgacctggacaaggaggcccccaggacttttgaggaatcagggactttgactgatgagataaatgggaactttgcctgtctcttctacactgtgccacaggtctctttgacagctatgtgctttaggttcctttaacaggaggagtcatatttaacagtcaatttcccatgtttaaaaattattatttcttcctcattcatgcctcattaatgtcattaaaattgggaaattgtataatggctgcaaatttcattgagagaattgtactggaagccaatgataattaaatatatacttggagagacagtaggaccaagcagaaggggagacagaaagagagagagacagaaaaacaggcacagtgagagatcaagacaaaaaagagagaaatagacaaagggggacagagacagagagtgacaggaaaagagacagaggcagaggtacacataggaaagagagagagagagagcgacagaggcacaaagaaagagagacagagtgaaaaggaaaagagaaaatgaaaaggcataatgtttttctcttctagactttaaaaattcattaaaattctgatataaaaaatacactaaaaaagttgagaagatcatatctgaaaatagtttgttaacgttgatccattccacaaatatttgctttttgctcattaggttaaggcctgattcaggccttccactgtggggacaggtctgtgcatgcagtgccacttgaaaggacactctgggagtctctgccacagggcattgatcgagattcctaagaagaacaaagttctcagcatttcacagcagggagtttgcggttaagccagaaagcaaatgttatcagattcaagaaatatcagcactgcgcctgtaagcatctagtctacctttgtctactgctggcttttaaaatgaaccttccttgcaggatagtttaactgctcacacttaaattattcctagggaagtttattttgcaatctcgtttgggaaatttgactgtttaaataaaacagtccagtaactttatattcagaaatacattcttttagaatgttttatgctccccattgatgtgattctatagcaccatgaagaacacggtgaaaaatgtcccctgcagaggaacacactaaatggatgctggctctgctcattgcttaatcaagattgttcaaccctgtaatatcccaagagggaaagcataattattcatataagtacttacatttagttattatttataggatttttagaagtaataaagcaaatagggtaacattcacttagttaaatgtgtcatttccaaagcttattttatctgatgtgcacaaaggggctaactaacaaaagctgtaaaataaaaaatgtaaaggaaacaccatgcattattacatttacaacaagttctatcttatttctcaccgggaacacataaaaccttatcttaattgttaatattactgagttcctgatcagttatatatgtctttttaatatgagaactttatgcattttaaaaaagaaattaagttacaaccaaccctggtaagtaagcgaaatgaaagtaaaggcacaagacattatgttactcaccatgttctatcctgaaagtccttctcagatctaggtaagcgtattacaaggtctaatacggagacctgtctttaagactctttgaatcaaacagtaactaagtggtttaagtagaaacatgtattttgaaaggttaatccacccatacacagggaaaccccttttttaagaaagtcattctgctgccaagagactattaatattcacctctcagatacaaatacaacctacagataaaagattcacaacctatgtgaaaataccacagaggattccctcttagtctctatgttgtaatggaaacacaagaaaacagtatacctcttcaggcaatcaggagtactacaggaaatctacctgcccacttaatggaaaagttagatcagcttaatagggccacaacacataaacataaatttagaattagtataacttactgtaaggaccacataggtcacacactcatttctaggaatgttcctgtgtttcatcttcctatttctttccctgagagagctagcacccaggttaacatttaaacagtcaacctttaaagtaatttagaaataagctggttaccttttaaaaataggacttgctgagtgttttcttacttagaggggaaattatatttagagtctctatgtggcttcactggcactatatcattaggaattatgtgaatttttcttgccataccagaaaacagtctgcataatcattagtagtggcaaacctctccaaactgctaaagacatttgtaccagtttgggaataaaatgtttgctgatgaagtgcctaatagtgattattattgattagttataccatttgcttatattgaagtattcatttgtcagataggcatggtaagattaagaaaatggcagctagcatactggcgatatgctggaggagacattgtctcagagtttgattgtttgctctactttaactctcatcacaacaggagttaagacttcagaaaagcagatggacaacgatgagccccttctacacttccacttctacagacatgccttgggaaatgtgagacaaagggggcctcaacattatctttttcattacaaaatgctgtaaatatcaatcctggttggtaaagctgtaactgtttcttacatttttctttactgtattttctttttctgtactgtatcttagtttctgtattttcaaaaattttaaaaaataatctattatatgatgtagcttgcatatgcagtgaactgaaaaagaaaatcaaaacagagcttaggaagtaaacagtccatccttaacctgagttatgaaattaaatacatctgatatgaaaattccattgtttcaaggtcctctaaagcattttgaatatgtcttttaaaaagccttttaaatgaacacaaaatgacatttaccctgttagtttctttcaatgtgagaaaattaattacttaatatttcataagagtatgctattttagtgcaatatcaaaagaacaaggagaaattaatcagtcaacagcaaggaggttaaaagtttaagccatccctacagactggaatcttcagatctaactaatgtctttctttcctgaaagtacttttaaaattacagaatgctatgcaaattcacaatgtgattgctattattagaactgaagttttcccaaagtgtgttgaaagacgatcttgtcttaagccacatgtcttttcatttgacaatcacatcaatttaagtgtggagggagagtacagaagcatatttcagagagtgctgatccaagcaagaagttatttccatcaaaaactatgggataactcagctacttgggaggctgaggtgggaggatcagttgagcccaggaattctagtccagcctgggcaacatagtgagactctgcctctaaaaaaacaaacacccgtggcagggtgcggtggctcacgcctgtaatcccagtactttgggaggccaaggcaggcgtattgcctgagctcaggagttcagaaccagcctgggcaacacagtgataccccatctctactaaaatacaaaaaaattagccaggcatggtggcatgcacc

SEQ ID NO: 317477 - DNA, 4001 bp, Homo sapiens
agacctatgttacaattaagaccacatttaaaaagagacagtcttctgtgggtcaataaattctgaatgattatatttgctcttgacctcaagaaggtgttctggctgagcaccaagagtgacactgaaacccaagtgtcaagtatgttggggcccgtaattggaccttcttcttttggggaagacttccaagaaactggacccattctgggttagaacagactaactattaagcatctttgatctggaaaatgctgtgagccaaccctacttagtgtatcttgaggtcatcagcaaagtaggggcacagtaagactggattttagaatggtggttcccaccacaagagcacatcaaagtcaccgttaagcttgctaaacatagagcatcctgaacaatggatcagaatttctagaagagcagccagggcacctctatttctaatacatttcctaggtaattttgattcatactaaagttcaatatattcccattctagggaataaattatgggtcctcaaaaatgtctcctctctgtttgtgatgtagacaaaaatccgtgattggcaaacatttgtatgtccctgcctttgggagcccagatgtggaacaatgagacagtgtgctttttgtttgtttccccataaacaattttctctggaagaaaattataatacatttcacccttgatttttctttaataaataaaaattactgaaaatctagataccaaatctgcaagaggctctatttgtaactgcacgagtactagtttttgaaattcataagtaatattcagttataggtgggggaggataggagggaggaaaaatagaaaacatagtgactaggaatggcatgtaagtcacaaatgtatcaccaaagctttctctggagattaatcaacattttgttatagttcatatgtctcaggtttctataaaataaagcgaaattaatcaaatacaaaggtttgggggaccttttcaatttgtatttactttgctttacagttgctaatgaaggcatctgatttgcagtaactacaaagattttcagtcattgattctagcaagggctgcttacggaacagttattccctatacataatttcctataattattccctataaagtagaatttctgttcaaagcatctgggcacttctttctctatgataacatccttaccaatgtatattcaaggtctgatgctactaaattaaaaacttaaatgaatagaagtttccatttagtttcccattataccttggttatctgtaaaagaaaactagaaaatatttgaattcattcattcaattagcagtagtctctgttgctgaacaaaatctatggtaccaattgtaaatatataaaaatattactacagatactctattgttacaatatgttctatttctacctacaccaatatagtattcttttaagatttttatagaacaaaaatcaagaacaaaataaggaacccacagaactggaaggctgaaaggaatttaagccccgtgggttaaaagcaatgtactggttacttagatatttttttctatgttacataattttggttaaaaatatagagcaaatcttagctaaagaaagcaaactagccatttctgttcttattaataagtgcacaattaaccactagaaatgccatcaatgctagatgtgatcaactcatctcctagaaatatgttcttacctctttatgctccgtagaactttctgcggcaatcattctagatgtgccctgtacaaaatgtgccatggaagctgtttttcctggagtcttggaaagcagaaagaaaaacaggggaaaagtctcttaaggtatattttagggtgagagcaagtatacaaaatttaaaaaacacacatcaccgttaactcataatagaaaataacagcaataggttttcattaaaaatgaacagaagtgactgtggataggaattacacagaataaagttataagcactgcaactgggattttaacttttcttctcttccaaatagggatttcccaggatgtctcaaataggcaggccgtgactaagacctggggcagattagccttgctatagtatgtaaatcgtcattcttcctttactggcagtttctcccactggaggaggaagttctccaccacagaaagcctgggcaatccaagtgtttcctcagtagcctaactgttataaattcattgtatttcccagagcaattaggtaactgttgactttttgacagctcggtttccctaaaggcgagattttctggcaataccttctaaatgtgagtgtagcttggtagaacttaatgagtcatacataattcataatacataataatataagtgccactaattcttatagaaataaaagggaaaataattcattgtaaagaaaatgggcattgtttgcaaatctaatcttctatattggcagaaaggttaaacttgtctcaagtttaagtctgtcttttctataaatcaagtccagattgtctccatgactcatttgaagtgaaatcttctcatggagaatcattttcactttaattatttgactgttatcattttaggagccttgaggtaatggagcactactgggtagtacagataaaagcgtggaaatggcagatacttggagctgcataagtgaactgcgatggaacagaagacctcattttggacttggaacaaaaggaaagaggcaaggaatacaaaaaaggaaagaatgtgtaactaaaaagagaaaagaatttatggtcaatcatttaacttcattaacctgcctacgagatattcacatatatataggataaagcctaaaactcctaaaattcaaaagagagtgattgagtgtcccacatttggccctcccatttctcctgaatatctccccctactctccaactctcccctgtgctccaaccatcctgactgacctccctttcctgaaatgagtgagatggttctacgcccctgagctctgtgcatgctgttcttgccacctcagatgtctcctctctgggccctccatccaaccttatgacggggaaaacctaagtcaatgcctctctttccttctgatcttctcttgacttcctctaatcagctaaggagagcacttcatcatgcattacgattacatatttccatgttcttgtgttaatctctgtgtccacgcacccaggcactgagctgtctggcacacagcaggcattcaacacattttgctacatgaataaatgaatgaatatctatataatgatttacaaaatcgatgaactttttgctagtttgtgtgtgtgtgtgtgtgtgtgtgtgtgtgtgtttactttcttctggtttcttgttatgtttgggtctacgcttgagtgaaagggagtgacgctgctttaaggcaaaatccaaaaatacaggtaggaatcaaattgttcattcagggttctgaaagtaaaaagttataactcacataagatctgactttagggtacagaagcagcgatttcctgaactgacactttatcaacactaaaatctgctcatcagaaaagaaaaagaaaactctattgtaagaatatttttcttctgaaacataccatgcacatacacactccatagttttatatagtgtaaggttctcttcagctttaactttgtatttgtatagggatgtggtaacattgacctagaaaagtgggtgggaagaacattttcttgccaggaaataccatccttggcattgtgcctcttgagtctcccctgtaaaatatcctgatgcacatacattgttaggtgtgatggcttctattaaatggaaattctatacctttgcttctttctttacaattcctttgcctcttctgttatgcagataaacaacaaacagattttctattagctcaagagagccatatggttatttatgaataagtaataactcttctgaagagccacaagtttggtttcagaaaaatgag

SEQ ID NO: 317478 - DNA, 4001 bp, Homo sapiens
tgaattcccatttacaagtggaatggacaggaatgattttaatatttttatattaattaatgatattttgatgcaatatatatggcagcaaacctccatatgtgttacccattagtactgtgtttttttaaatggggatgaagcactaataatcactacctgtaaaataaagaacatttattattttggtgagtctagcaatcttttctgagttgtaagttcttaaaaaataaattctaacaattacagaatactgatttgacttccacctttttcgtacttttattttaccccaaagcaagcattaaacacataatcttgctaggagagaccatcttgttagtattatgaaacactggtgggagtaagaaccagtatcattgatatgcaaaattgtgcagttatctctgcaaatcattaggaaaatgttgaaaggttaaaaatcaaaacaaaatatagtggtgatccccaaaactattttgacattattttgacgatgagtaatttagtctcaaccaaaatctttttttcccattcataataatcctcctcccctcaaatgtctttaaaaaatacatgaaacagttcaataacaaaaaccgaagagcacgaactattttcaaaaacagaaaaatctctagtgcagaaagaaacctcaaagagcagattcctttgcagacattaatcaatgcgcttgcaaagattatgaagatttctctttcctctttggcggacagtctactctatttgaagtttccactcccactccgttttctgttctttttttagaagatctcgaccgtttctttttcatacatgaggcctgaatattagaatcttctacccacctctgaagccagagagtaattaagttccatgttacgtaggcttggatcgtgcaactggacgacagaacagcaattttagctgccaacacatttacatttccagtaagggcatcaggattccgattctgcgatccagccaggtgaaacccaacagtgagtacggaaacaattaaagtcacaagtctacccaagataaacacaatggcccacagagatatgcctttctggtacttttcatcactaaagtaaaacaggccgcacatgtgggaaagtaattcaacaaaataatgcagtaccaaaagaagaagtcccaaatgattcaagtacaagagataagctccagtaatgtggaagaggtgaagaccaatgtagacaagttgacgagggatgtcttgttttttggttttctggaagtagagttcaggaaaagcatgaaaccagtaagccaactgggatatgtagaaaaacttcatttgaaatgtcatcatgctatggggacgagccttccatataagagttgggtctgacaggcagttttcagagattaaaatgaatgtgccccaaatacaagaaaaaaagtagaacacactaaactgaccagactcgttaaacttgttttgtttcgctttggtgaactgcattctcttgttaattttatccaacacatattcctgaattgtggcatgaataatgattgccaccagcatgtagaagaaaaccgtggccaaatctttgacaccataataatagagggactttgagcccgtggcttgttcctctgctgcagggacagcaacactgtgctgaagagtgagaaacacgatggatgcttctgctgttccctcgaacacaagccccagcaggaagaacatccccacgcaggagacgatgtccgcatgattctgcaggatgaattcctggctgagaacgggggggttcttggtgctcttcttacggagccccatggtggcgcttcccggatactcaccggcgagccgcagctgcctccccctggctgctcctcacagcgccgccgccacggtagcagctccgggggctccacttcccatcccgaagtcagtcccgggtcgcagcggccgcccagaaaaaaaataaatcaaaggcgagggccgagctgagctgagcatgcgcaccagggggacggcggaggcagggaaggaaatcgagcgccgcgcccctacccggcgccaggcccggggttgcgagcggtgatcttcaacgttgatcgtcgcatcttcaaactcgctgccaccgccaagatgctcctgaattcttttttttagtggcatcttcattagtaatcatgataaacctatagagctctggttattcttcagatcattaattataacaacaatagcataataataacagcaaactcccagtactaattaccagttgctgtgctaagcattttatttatatttatgaatttaactttcctgaaacacccagtgaggtagatactgtgataatctcccctcccccaccccttttcaagagacaaaacactgaggcacagagaggttaagtaatatggccaaattcacctccctagtaagggttagagcaaagatttaaatccagtccggctccagagcgcctgtttttcactattacgctgtattgtctcttattgtaaatcaattatacctggaaatatttactaggtcaacaagatagcatattaaaactagttcccctatttgcaataataataatgtttgaaatgataacgtctagccagtattttgaaagactggcacttagagggagagatgtattagttcatggaaaggtctctttttggctacaaagctcaaaacttaatttcttcattataacagaaaagaacctcatatgtcatttgtgtaggttttgcatatatggaggaattgtgaattgaagtttcccaagacttcacgtaggatttggaaactttcaagactggaacagccagaaagtagaatcctcattgaacacttgcaacattcagacaagatccaaggaaagctacactgttttaagtaaggctaaacttgccctaaggataaagctaattcatgcttataaacacaaagtttataagaagccttgaaaaggttaaggtactctaggactgtctaccagaatgcctacttatggcctctaggtgcattgttggcattagcatgaaagggtggcttaatgctccaaaagtgggatttctagcaagcaagacagaaagtaaatggccttttatgacctagtattagaagttatattatataattttcaataccaaggtaggcacaagcctgttttacttcaaggtggagtgaggatggaggggagggtgtggaccatacacatcaacttttaatgagaaatgtacctagtatttgctaattttttaaaaatagccacatcctttccgttgggaataaattttgtttcctctgacatgaaatatacactttttccttccaatgcaaacaatagtctcatatcaatatagcatcaggttcaggcttcttacacaggatatttttgtaagctaaatcagatccaggagcagataaaggaaagtcctatcctttgttgtacttactcttggtctgaagacttgtgaactaaaagaataaagtttttggctcccacacacccaaagcgtaggaaaaatgcaacagacacttccatctacgagtgagaaaatggatgcacacagcagtcaataatcaataataactataagatacatccaggtaaagttcctagattttggtttgagtccaatcttcctttctaggaaatggtgaaagatttttttccctaaaacatggattaaatattataagttgatttgtttctgtatgttggcttgcatatattaaaagataaaagacactagaagccaaatagtgttaacgtaatactgtttatctttgtctttgtcatgtaatagtcattgattatagaattaattctggagtattaattacacattaatacttcaaggaattaacgttgaataaacaagtttacaggtggaatcaacagaacaacatatgaatcagtttctgattatcctcaatctttcttggtctcatgtattcagacgattgccaggcattggtcgaattatctatttaa

SEQ ID NO: 317479 - DNA, 4001 bp, Homo sapiens
aacatggaatattttcaactgaaaggttaatttaggaaagactattagtcttctcatgtttacatactgaaagaacaacaggtattcaataaatgatttgcaaagcttgccagaaatgtctacaacagattgttttagaattgtttaaatatttttaggacaggattaagttatgagggcaaaggattgcatgttcagagaaagaaacagtctagttctgggtaatgtaggaatgaaaattaaaaaggggtgaccaggctgggtacagcggctcacgcctgtaatcccagcactttgggaggccaaggcgggcgattcacgaggtcaacggttcaaaaccagcctggccaatagggtgaaaccccgtctctactaaaaatacaaaaattagccgggcatggtgatgcgtgcctatagtcccagctactcgggaggctgaggcaggagaatggcttgaacccgggaggcggagatttcagtgagccgagatcgcaccactgcactccagcctgggcaacagagcaagactccgtctcaacaacaacaacaaaaaacaagtgaccaaaatacaatacgggcccctttgcttaatatgaacgagtctagactagaggccatttcctgtaataactccagaggcccaaaagacatagctgtggtctttaaatatggagttgaaataagaggaactaaaaatgactgtcatccaatagaaatacaagtcacataaataaattaaaaatttctagcagtcatattaaaaagtaaaacgtggatggaattcattttaatattcaatttaacgcagtacagtatgtccaaaatattatcatactgacaataatataaaagttattaatgacatattttacctttttttgtactgagtcttcaaaatctggtgtgtatttcacactcacagcacatctcaattcagactagcctatttcaaatgcctgatgtagctactggctacagaactggacagcagagatctaaattatgggaaatgtgtcccaaaattgctgcacgaaaattgtatcagaaagtcttgccacattctcctatgtcacctgaaatggtcgtgcttattctgcagcaaaggaatttgaatgagaaccccgataacgcacaggcgcagatcgaatggatttcaatgacaggctggaaggagaaattttcagatatccaatggagcaaccaacgaaactatacacgaaaggaggcgcagctatagaaggtgaataatggatgggagatcaagtaatgcaagggaagtaaactggaaactagcgtgaaagataagaaaggtgacccaatcaaattggcaactaaaaaaaccccaaaacctaatgtggttactttttttttcttttaactaactggaagttcagggtgttaggacacaaggctgctaagaatgggattcagagatgttcaactacaaaacgaacaaaagaggaacgacagtgtggggacgaaatgatgtttcgatgttaaagatgagaagcaacaatccaacgtaggagaaacaccgtccccatggtcccagtatctgttctggtagctccagtgaggaaaggtagagaaataaccttgcagtccctaaaggcagatatcttcctcctcttattcccccgtcttaaacctgggaggccctagaaacgggtgcgtctttcctcgggtctaaaagagaagtgccaggattgcacccgtcgatgggattgcaaaacgcaggcccccaaaccagcattgttaagagctagctctcttcctcggcggtcccgcctggccccgcgggtctccgggcccggactcacccaggccccacgccccgggcccgctgcagctgaggccggtcgccgccagccgggagaagacgaggggaggcggggggatgtcacagaacgccgtggcccgtccccaccgccgcagccccacagccagttccaacaggcgagacttccctgtacccacctcccccggcacaggaagcactttctgggcctgagtgaccgcgctctacaccaatcgctgtcccggaactttacgccgctcctccaagcgtcagggagacgctgcacttcccaggccccaccagccgcggctccggctcgtagcccacagcccactgccggcggctgggcgctgccgaggctcggggcgcgcgcagttggcgtctgccagtgccaagactgtgccgcccccacagccgaggcgcgaaagggggacgcccggcctctgggccgctgccttcgctttctcttcgttgttgcgaacgccgtccgctcaggaggcgccccgcgaccggcgcgatgagtgccaacgaggaccaggaggtgagccccccggctcagggccctctcccagcgcgggcgcggcgcgcagccccgggcccccgtgagacctggtgcccggacagcctgcccggcacgtgccctgtgccctcggagccggccggggtgccccgagttcaccggcgtcccacccaagcgcgcgtgaatggccaggagtccgcctctgccactcttcccccctcatttttcatttttgcaaatccgggagtctcccctggttacttaataacagggatgagcgtccttggtgcacgatccagtgctcttggctctccttgaatcccatgtgttcagtgcctgtttactgagttaggctgatcacctttaaattttagtctggtcatctttaaatctcttggctagtagagggctaattgagttagttacatttctcatggaagaaaatgacactggtggtgcatctgagtttctgtccatattgtttggggaaatcttttacccatctgtctgttttgagcattcatgtaccacctgaatttatggtttatgctcaaatatttccttgtgagatgccattttgacattgaatcatataatattagagttggggggtgggtgctacgggccatctgtaggggaaccttctaactttgataggtgggtcgatgatagccgcagggctgcacagtaagtacgtggtagaatcgggactagaaaccaggtcttattgggtggtagataagttcactgttaatttaaagtataatgcttgaaacttactacttttacatgataaatgtaatagaatctctggattggaagttaacctttaaaggacccaaagtccaacaagctagctagttgatatctgaatctcttctaaaatattcttgccgggtgaatttctaagtgaatgcgttaatagcttcttctccctgcaaagcaaagaacatacagtgtaatgtttctcagagttggaccatagtcccctaccttagaaccatttagatggttgctagaaaacagatgcgtgcactccaccccagacctactgaatcagaatttctgtggtgggcccaggaatctccagtttaacaagaaaatttcattcttctttcagatgaccgatgttctgatctttgaagatagtttcctgcccagtttctcagaccttctctgaggaagtggttccttttagcttgtcttcatatatccattctttgttaatctcttcactatcctggaatcacgtgtttgtggacagattttaattttttaaatgtcctgtttcaaaattgtggcatcttgctgttttgtctagttaaatttactgtcaactgaaatcttttaagtgctttatacaaagcaatttgtctttcatcttcaacttctacatttaggtatctgagtattgatacaagttctacttaccctgctaaatttcatcattagcttgcttttcaaagactttttggattcttattcagccatcagcattattcactgtcccaacaaattgtcatccacaaatttaataaacttgcctcctatttttgtacctgtccaagtcataaattaaaatatgggaaaggattagggacagaaggagtagtactatatcttgagtaaggtttttgttccaatctaatcttagttattcttgaatccggcttgaatttctgt

SEQ ID NO: 317480 - DNA, 4001 bp, Homo sapiens
gcccaggctggagtgcaatggtgtgatctcggctcactgcaacctctgcctcctgggttcaaacaattcccctgcctcagcctctctagtagctgggattacaggtgcccaccattacgcctggctattttttgtattttcagtagagacggagtttcaccattttggccaggctggtcttgaactcctgacctcaggtaatccgcctgcctcggcctcccaaagtgctgggaatacaggcgtgagccactgtgcctggccaatttggggcaaatttaagcaccaaatgtcaagcattatttttgaggcagacagacatcaatctttccccagggccataacctgataaataaaattaaagagaccatatgtgtccatatggacaccatgtgtgtacaagcaattggttagtgtatttttaggcaaattctaagctatactgattactacttttctgaggattattatattttaatttttccactttgtagtctttctgtcttttctacttgctctcattaagccaatcctccaatgtcaggttaaaagaaaagctgcttggtgggagatggaagacacgcagaaatcgtagcctatctcttaggctaggagttagatattactttgatggatatctgatattatcctgttacacccattatatggatgaggaaacggagacctggaaagtttaagtagttgttcactgttcattgctcacactcccaacacagggtcctggctctggtaagcccctctggggaaggtgaggtcttccattggctatcagcccctgaccgtggaggccagacaccacatcaagaaacctgagcctcagagactgcagtagttagacttcaggtccgcctgcctctgtatcacatatttgggcctcagccaaatcaacacagaaatgcacttgaaacattaaacaggacgttctgaaaccacgtgactctgtgaaacgctcctcggaacctttagggaagggccgagtttctttaagaaatgtgtaaacgacagagacacacacccttgcatgatgccagctctgtaaaattaaaaccttgtctggaattaaatataaaactgagttgaacttcaagattccttttagcaatctatagtaaggaaaaaaaaccacaccccccacactcatattttggggagaaaggagggaattgaggtcttttcacttcatgtctgccctcttaaaccccttgtgcgaagagaaggaagaaacgagttctgggcgcggcgagagactgaggcctgcagggctctgaaatcccaaaggcgctgagatctcaaagaaacccagacgcgccccctccggggcccggactcagcgatgcgcgccgctccctgagacgccgccacgcccgtgtccctgcaggaccggccgcagccgccactgcgcagcgcacaaaggtccccacgggctggaacactggcctcatctcgtttcgagccaaccgtaaaacgcgccttctctccatcttcaaaaagggccggaaagatcgggggcgggacggggctgcctgccctggctgcctaggccaaggttatttcctttgtgtgtggatccccaaagcatagggcggttccaagcccggcgctggcaaccctgcactcaacgcccccgtctgcagccttccgggctgtcgcctcctcgccagcgcgcaccacctccagacgaggcgtggcgacgcgcgtctcggggccctcccgcagccccgccgcacgcgcgcccgcctctcctatccctgcctttccgtccccgccaccggtctggaagctttaagcgcctagccgcctgccagcagcgcgggggacacagatactcacgtttccaattgcgtcccgaagcgcgcactgcccccgccgctgtaattagaaggacaggaaagggctctgagagctgcctttcaggcagcgagaggtgacaagcaggcgaccagctgaaagcccctcattttctgcaagctcactcaaaatgctcctcagtgccgccagcgcagctgccaggtttaataactgtgtcagaccgcccgcccctcccccacaaggagccacaaagatgacaggcggggaactaaatccgcatgcctagccgcagtcacccggcctcagccccagcgacgccgccgctgaagtgactgtgcagggaaagaccatgaaaaggtgcaaatgccagccttgacctaggaattctccagagaccacttccttcactccgagcagaaatcggatccttttcccaacagtatttctgaaacaaaacaagaggcaggcgcctttccagttaacctaacatgcatttcaaatgcaaaaggctctttcgcagcaacactcgtccctatttctactggatttctgggtatcggtgggatattctgcgcaccatgcaaagcgtaagaagctcattcaactgctctgctcccgtttcagtcgcgcgcaccaacactcgtgtctgtccccaggaccctggccaacagaaccttactgtctgagggggctccttggcagttcctcgtcgatttggaccatttccaaagcacgggcagctccttgatagcgactcaatcttgtcaagcaggaaggaatcagtggttctgttttgcaagtggaatatcaaagtaaagtactccaccgaagttagaattttataacatatatatatgtgtgtatatatatatatatatatatacacacatatatatatgtataaaaagactgatcccgagcgcacggcagcccggcgaccacgccccaggccccgagtgccccgactccgcccagagagcccttccccgcgaggcccagccagccgcacctgcctctgcggggggtggtttcccgggaaactccggagagcctgttctccctccagacacgcggttcccttgacaactgcgacttagcactaggccttctaagaagaatgtccatgaatgcctgttttaaatcacagattcaaagagattgacgagggtggttgggcaggaataagacggcagtgatttgggggaatggaagaggggccgcgcgagcctgagtggggtcagtggctatcgcaggcgagggactgcgtcgctcgcccttccctaccagtgagttaatacctggctttagaatgaattccatcattcccttcggcttatttccttttctctatttattttccttaagatactatttaaacagttattttgcactgacagagcactagctggctccaggtaggagtgaggagaagcccataaagatgtatgaaacagaggtgagacttcatgggaataatatttggctatagatgatctcgtgcacagaaattcaagaattgtttcaaatacagtcttgcatcatcaggccatgatgcttatgaaatttcactcatgatttcagtcggtttctatggagaaaagaggaagtgtagatgagactatgcatatttattaaacatttaaatgttcacatgccacctggttccttttgttttggttttgttgttgtttgtttgtttgttgagacacagcttcactctattgcccaggctggagtgcagtggtgccatctttgctcactgcaacctccgcctcctgggttcaggtgattctcgagtctcagcttcccgaatagctgggaatacaggcgtgagccaccaagccaggctaatttttgtatttttagtagcgatagggtttcaccatgttggccaggctggtcttgagctcctggcctcaagtgatccgcccaccttgaccttctcaagtacagctattacaggtgtgagccactgcctgacctctatcttgttacttttggttacagacatatcatactaatcacaccacaaataggcgctaaaaggtaaaatgaaacaagttaatgagcttgcatctaaggcataagaagattgtatataaaaaaaattacacatgccccgtactggtttatcctatgatcaattatgtattccgtatttgagctattaaaag

SEQ ID NO: 317481 - DNA, 4001 bp, Homo sapiens
agtgtctccctgagttccgtgagctatgctaacaaaacagtgaccccaagaagtcaatctctgacttacagcacaaagttagacaaagttacacagcttgtaatctacctgaggaaggatcgtgagaacttctcatggatagccagctagtcagaagcacaagtgacaaccttcagcctgcaactggcctctgaggtcggggcagcctggtaggactgagcccttaaacctcagggtctgcactcactgcagttagtgtcagaattgagttaaactgtgggacacctacttaggtgggaaggtgagaatgcattgacctgaccaaatgggatttgtgaggcctgcggtgggcctggagggtgaatgatgcacacctgtcctttccctttggagcctccaccccacctgggagagtcaaaagttcactggcagagtcagaatttccattccttgtcaggacctcctcgtggggtgactcatccctctccagggctctaggaccgcaccaggagaacctggcctcacttagagactgcctgttttcatacaatgggttcaagcattcatgttgcttggcgtcaaattcatttgaaaaacaccctttgtattctgacttaatacctccaggatccgcaaacagcatggtggctttaaacaaggtgtacctagataatagatacaagttgagggaatttggagaggtggggagactttcaaagcattaaatgtattaaagtcccatggttcacctctagctttatgtaaaaattaaacctcaccttttcattttatcaggctcctgtcgataacaaacacaaaccgcaagttcactgactccacaccacggggctcaccagaaacttatctgatcaaagctgccgtaggtgattctttttttcagcaggaggaggaggactttctaaagcaactcccaggactcgagatgttgtagccccctccccaccttacaggtcgcaatgacagcacaaccctttccttgccctttgcgcaccccgtgagctacgacaggtgcctcactgagcaccgaatgggccagccaagagataaagcaggcaccaaagaccggtgcctgagtggttttccaccctcacccattcacaccccggaaaccagcaagcaccccgaggtgtggctggctgagcccacatcaggcttcacccccgactcacatggcgtccccaggctctgctgacttctcacttgggtagtcaaggacaaacgctctattcacctggggctatttcttcattccacagtcgcacggcagagggacatagtaccctttgagcacttttatggggcagtaaaactttacagtctcctgtctgctctaaactgttcccacatttctgaatagacctatttataacatgcaagactactacagtttgccctttgaaaatactagcagatattaggtcctttcaaatggggtcgactgagttacatcggctagcagctggcttacagaaaccccggagaggcccagctaagctcctgactgtgactacctatgttaggaaataaaacagcatttgagtctcacaacatcactggaactggccttatgctttgccacattcatgttgctttggtgtcaaatccagctgtgtctctccctcgattttttgcttccttactcccttcctgcctggattaacagagctcactgtgagctttgtcagcaaatcccagtcttttccttccctcttctgcagggaaaaaattaaaaccaggaaaaagtagcaacccaatcacaacttgtttctcccagccccggattaaccagctggcccagaaaaagaattatcccacattgagaagcgtccttacctgcgttccataacggccactcctgtgcatcgaagaccagagccagcctcctccaatctggggacttagctccccgcagcccgcagacaactgggcccattatagtcatcaagctgccgagttaaagggtggcccttactaaaatataaacagctagtcagcacaagccaaaggggcggggctacagtatcaggggacaatgagagccaatgatcagcctctttgggctctgtttgcttaagatattgtgtttcattccgaagtaggggagacgggaatgagaaacactgaagagtaagggctgagttatcatctttacagcccccagtaggaaaagcgtccaagttgaaaagtttaaatcactgcccacagaagaccaatttcaggaaagtgtttgtagactgcacacataataatatgtatttttaaagccacagatatttatgttgcattagctatctgttgtcttccggggttaataaatgtggtattcatgaggtcaacgggagtttttcaaccaaagaacaaaggccaagaaagttagtttgatgacatgcttattttattgaatatactatctgatcaggagcactcacctcatctacagagcaaacacttgtttgattggcacatctttattttatttatttatttatttatttatttattgagatggagtctcgctctgttgcccaggccggagtgcagtggcacaatcttggctcactgcaaccgtagcctcctgggttcaagtgattctcctgcctcagcctcctgagtagctggaattacaggaatgcaccaccacacctggtgaatttttgtatttttagtagagacggggtttcgccatgttggccaggtgggtcttgaactcctggcttcaagtgatccgcccgccttggcctcccaaagtgctgggattacaggagtgtgccactgcgcctggtctactatttttttttttttttttgagacagagtcttgctgtgttgaccaggctggagtgcagtagtgtgatctcagctcactgcaagattggtacatctttagaacccagagatatggatttattgtatgcccaagtcagcaaaatggctcacatttgatgtgtttatgttcttcttcgtgtgtgtgtgtgtgtgtgtgtgtgtgtgtgtgtgtgtagagatgtgggtctcactatatcacccaaggtggagtgcagtggctattcacaggcacaatcattgtgcactgtagcctcaaactcctgggctcaggtcatcctcctgcctcagcctccctagtagctgggattacaggcttgcacctataatcatgccagaccatgagcatttcatttgatcaaacatatcagaagttcagtatatttggaagaaggcaggagagccgtggcttctttctgtctcccaaacttaactaaattccacttttttttttttttttttttttttgagatggagtctcgctctgtcaccaggcttgagtgcagtggcacaatcttggctcactgcaacctccacctcccaggttcaagtgattcttgtgcctcaggctcctgagtagctgggactacagatgcgcaccaccacgaccagctaatttttgtatttttagtagagacagggtttcatcatgttggccaggctggtctcagtctcttgacctcgtgatctgcccacctcggcctcccaaagtgctgggattacaggtgtgagccaccgcgcccggccttaaattccccttttaaagctattacagcagcttaaccttccaatgccctttgataataaccaagaaccagaaagtaaactgtagggctttttttccttatatgatttctttttttttttttttttgagacagagtctcgctctgtcacccaggctggagtgcagtggcgtgatctcggctcactgcaagctccgcctctcgggttcaggccattctcctgcctcagactcccgagtagctgggactacaggcgcatgccgccatgcccggctaattttatttatttatttatttattttttagtagagttgggtttcagccaggatggctggatctcctgacctcgtgatctgcccgccttggcctcccaaagtgctgggattacaggcacgagccaacgcggctggcct

SEQ ID NO: 317482 - DNA, 4001 bp, Homo sapiens
acgcctaaggatacccagataaagaacattttcatttcttagtaagacaaagaatgaatgttttaactttatttcacaagcaacaaaatccatgaagcttttgttataataaaaaaaaattaagtcattgcaggactatagtattacctatggaaaaaacgtgtatagattttagtcttcttttaaaaaatgtgtgggttatatatgctgcattcatatatcttgaaacagcacgttctatcagagaaaatttttacattcagctgtgttttaacctttccaatgcaaatcacttgtgtcttcctaggagaaaattggacagaaacacttaaaggtttaggaagggttactactcctgtctctgcatccgaaagctgctttctcataccacagcacacatgaaacttctcattgtgtgctgcttgggaggggcgtgcattatttaacattatagtgggttaggaacagtggggctcaagcctctgcctgaaataatgaaagacaccagaaaacagattcacactaggcagaactgaatcctaacactaagacgtcatttgaagaattctgcatgaacaaatggctctccttacatataaactggagtttaaaaccttcttttaaaacaaattttcataaggaataaaactgctgtaacatgatctaagccagagaaacaatcttttaaacacctcattttgaaagctattacattgaaactgtcttttccttaagacaataataccattttatcttttggttcagaaatccatttattaacattcaatttttaatttaaaacaaactgccttgctacttgctctcctatccccccaaaagaaggaataatgtcagggtggggcatacttgtagaaaaagctctgacacaaaaataatccccactgtttcaggaagcaaacctaaggaccaacccaaaacccaagggtttttttttttctttttttcttttccctgtgtaatgctatcattgagctccacccagatttgactgtacttcaaagacaggaaaaaaaattgtcagaaaaaaagcaaattatctcctacatgtttgtttgctggccctcaatggcattcagaattcggagggtcgagtcatgcattatgaatgaatgggtttccaatggtaactgccagccatggaactcaaccccaggattctctaatagaggacagagtggggggagggtcgcacgttctcctctaccctggggcagcgaggaaggaatcctgcaaatcaaatatttcatctccatgtttgcacccaacagagagatgcagggggcaaaattcttctatttaaaacaagccaagatacacactaaaataaagactggtaaaaatacaaatctagtcagatcacattagaacttgataagaaaatcttgcatgattttctccccatacttgttaatttggtgcctttgtttaagcaaagaatgggtctgcattttacagctacagaggatgcagcatcaccatgagagatgaagggagaaaaaagaaccgagagagcaggagaaatcagttatccacctggcacaatactaagcagtctgaacatttaggacctacccatttctgaagacaaacagactaaccaacgaggcaaagaattaaatcctcccaagtctgtcgctgcagctacgcggcaatccaaaagaacaacgcacgtttctgctaacacttcaagttgggaagcaccatgcaaagagactggttaaaattccctaccatgcagtgcagccatcatcagaagcccagcatatcttctgctctaagtagtgatgtgccagttcatgcacagaacagaggaagagaaaaatggaggaaatgagagaaggctggaagtcggcaggaatgtttctgggtcattaacaagtggaagacccccttcagtattcacaccaatcggtcttgatcttacaggacatctttttctcactgagcgtctgttgaaaagactgcagcaaaccaggcaagggattatgggatagggatgcagcagcgagctgcaatgagattcgtgggtggcttgctttccctctgagtcagcagtcagctgtttccatgctctcgtgctgggccgctgagctccatcaccagaaagtgactgcaggattcaccaggggagaggcgaccagtgcagtctccgtgcaacgcagccggggcaggtacagggagtgctacaaatcagacgaagggagtgctgggacgcaaacggtgaacgcagtgagaatagattctaggaagaaactgggcatatggtacctcaatatgaaaagttcacatttagagaagagctttgcgtgagtgtgagagcacacacttgctcgttagaaagagagacgactgatttccttagatgtctcaagtagctttaaacacatatcataatttttttaaatgcaaaaaacaaacaaacaaacaaacagtccagttccacaagcccctactacttttcctctcttggtatttaccccagggcagggtctataaagtacggttccacaaagtcaaatcatgcaatgacatttctttgctttttgtggttctaatgattcagagaaaaatcatatggtacatattttgattcggggataaccagaccttgttcttcttctgatcatgaagttttcagttaaaagttgagaaacttgacaaataacataacttaatttcctgccaagtcattaaacttagttgtaaaaggtataaataatgtaaaaatgatcagcaagtagccatatgatagtgattaggtctccatattacaaataataatttagaataaaaaatcttacatatcagagtagaattcacaaccgttcctttttctacaacaataaacgcagggaacagtattgcatcctattccttggttagttattagtttcaaagggattgctaataatgtttattttaaaaaactgggcatctgcatatttgattacattaatatttatcacattctttccacgcagtcaagcattacagtgagcccttgaaggggcctcagctctgcagagcagtggtgattacctttggtggtagtaggaggagggggatcacagagaatacagcaaaattgacagaccccagaaatgcacatacatgccaactttggcgtgccattttaggtgatacacagttctcaaaatcccagttaacaccctattttagaagttttgtggatttttttaaagcttcattgaattgtaattcacataccatataattcacccatttaaagtgtacaatttaatggcttttagtatattcatagatgtgggcaactattaccacagccaattttggaacattttcatcatctcagacaaacaaacaaacaaacacccaacccataccctttagctatctctctcttccctcccacatcacatccccacagtcctaagcaatcactaatctactttctgtcgctaaaggtttccctattctggaatggaatcatataatatgtggtcttgtgtgtcttgctcttttcacttggcagaatgttttccaagttcatccatgtggtagcatgtgtcagtatttcgttcctttgtatggctgaacgatattccattgcgtgaatttagcacattttgttcatctgttcatcagtcgatggacactgggttgtttccactttttggccattatgaacagtgctgctataaacatttgtgcacaaggttttgtgcggacgtatgttctgctttagaagtttacagtttaattaggacccacttctaaaactggaagcaggctacccccactgagttttacaagcctaagacaggccatcagacaggtgtctgacttactacaacaggagtcctttcttcttctcattctgctactaagcctatcccaaagccaaattcatcaaatgctgaccccgccccccagcacattctttgtcctgatctctctcattctcttcttccagtcaacccagattcttgagacctata

SEQ ID NO: 317483 - DNA, 4001 bp, Homo sapiens
agtccaagctataaacattagcctactatagtaactatcttctgatacctgaagacaaggcccctgtctcccagcatctatgggagagttggggcctgacttccttaagtgccagtgagcaaacctgggtgtgtttcacatgacccaaccacccctttcccactttttgtaatttttcacttccctgactctactgagcgccaactcactaccttcattccccagttcccctttgaagcacttggtcacctctgtacaaatcacagttgagttctgttcatgctgaattctccctattgcaatagtacagtactgattaaaatctgtccttatgactacccagtgtctggctttatttttgacatgctctatcccgtcaatcaattccataactctatagtttccaaacacagatctaatcctataaccttccgatttccaatggaatggcttttcttactcttaagtattacaagactcaccaacatctggactttactcttttcctgactccacatatctatcatactgcagattacagttgagatttttacatttatttttgtcaacctttggttaaggacactggagagtacagttcacggtctgaattcttccttattttcctcacaactgaattaccaactctgattcttatgctggtgtacaacgtgtgttcaataattattaggctaataaatcaaacctgcagtagattccctactctcaaaattcaacctctactgcttgagatcttgtcacattaaaaaagaaaaattcaacctctattaccttatttattttactttttgagacaggatctcactctgtcgccaaggctggagtgcagtggcgcgatctccattcactgcaacctctgcctccaggctcaagcgatcctcgcacctcagcctcccgagtagctgggaccacaggcacgccccaccatgcccggatttttttttttttttttgtagagacaggggtctcactatgttgcccaggcacgagcgtgagctagaactcctgggttcaagcgatcctcccgcatcggcctcctcatggggttacaggtgtgagccaccgcgcctggctcctactctgattcttgtgctggttcatagtgtgggctcagtgaatataaatcaaacctgtgggagattcccagatctcaagattcaacctctattactttagatgatacgaaacgtaagtgagcctaaactttctcatccgtagcagtttcctgacagccagatccttgtgaggacggaaggagacaaaatccgccagagaagtgctggcgctgtagggtgggaggtccttccttaacgctcccaccataatttttggagatcacgtggccacttcccaaactggtgttcagatcagaatcttctttaaagttcaatcatcggggtcccactgcctccgcggcgaaaacagaatccggccgagcacggtggctcacgcctgtaaccccagcactttggaaggccgaggcgggcggaccacctgaggtcggaagttcgacaccagcctggccaacatggagaaacctcgtctctactaaaaatacaaaaattagctgggtgtggtggcgagcgcctgtaatcccagctactcaggaggctgagacaggagaatcgcttgaatccgggaggcggaggttgcagtgaggcgagattgcgccactgcactccagcgtgggtgacagagcgagactccgtctcagaaacaaaaaaaaggatccacagtctgagctcagtcgtggacaggtcgcgaccccgaggtttgggcacagctgatactcaggaagcccctgcccagttaagtaagcctcccgccaggccctactgcgcctttcctgcggccctcccagcttacctggagcagttggaccggcggctcaggcctgatgctgtgcaggacccatggaaccccgcggggcgcagagcggaaaccctcacacaaccctgggcgccttggttttcgagttttaggcatacaattgaccagcgcggtggttggctgctccaccggaagtgggcgggaaaggcctgagcatgctcaatgccgcagggtgcagggagcgtgagaagattctgaggagagcctagggcggttccctccgtggtggggtccctgatggcttcagtgggtcatttaaatcacaatggcaatcttttcagatttttcattcctatgagcaactttttttttttctttttttttgagacagggtctggtgcggtctcggctcactgtagtctcgaccatccgggctcaaacgatcctcccacttcacaggcgcgcgccaccacgcccagctgattgttgtattttttggtggagactgggtttcgccacgttccccgggctggtctcgaactcatgggctcaagcgatccgcctgcctcgctgtgagccaccgcgcccggccagggtggttagttttaaaatgcaagaggaataatcagctctttggatcagtttgcgtctctggttgagaggctgcgtagttaccaccctggagattaggccccaccctaccaactaagactcaccaaggtctcgtctgaggaattgatatttaaagtagattttaagggacgagtatgagtttgttggacaaacttgacggtaaaatcttcaaggctgaaggattagtccttgtgaggagcctcttaagtcttataacttggtaaatgagacagtgaaagaggctaatatttgcagaagaagtcatagaatcggcatagcacttttttatttatttatttatttttgagacggagtctcgctgtgttgcccaggctggagtgcagtggcacgatctcggctcactgcaagctctgcctcccgggttcacgctgttctcctgcctcagccccccgagtggctaggactacaggcgcccgacaccacgcccagctaattttttctattttttagtagagacggggtttcactctgttagccaggatggtctcgatctcctgacctcgtgatccacccgtctcggcctcccaaagtgctgggattacaggcgtgagccatcgcgcctggccggcgcacttttctgtttaaaatgtagggctacttggccaggcgcggtggttcacacatgcaatcccagcactttgggaggccaaggcgggcggatcagctgaggtcgggagttcgagaccaacctggctaaagtggcaaaaccccgtctctctaaaaatacaaaaaattagccgggcatggtggtgcatgcctgtaatcccagctactcgggaggctgaggcaggagaagagcttggacccgggaggcggaggttgcagtgagccaagatcgggtcactgcactccagcctgggcaatagagtgagactcagtctcaaaataaaaataaaaaataaataaataaaataacttagagctaccttcccagaaaaataccctcttgtgatgaagtctgagatttgatggaagagtgggaagtaggaacagggaacaataagtgaaatcttcaaatcttcacaccttagtgcagaagatgcaaacagagaggatgataaaggctgtggttgggaggacactgatctggagtctgaccaatgggatgaaggaaaggaaactctaaaggcttaaggctgaatggggccagattccaccataaaattaaaccaaaggctgggcgggtggctcacgcctgtaatcccagcactttggaagaccaaatggagaggattgcttgaggcccggagttcaagaccagcctgagtgacagagcgagactgactcaaaacagaaacagaaaagatggattgtattgtgctcctgctctggatggaggaccacgaatctgttctgcaaggacataaggagctcatggtcctctgtgtacccctgactagtgcacacagggcatctctgagcctctgctgggaacagaatatctcagtgagaatcaccttaggggtacaggtgagggagactcagtaaaaggcatg

SEQ ID NO: 317484 - DNA, 4001 bp, Homo sapiens
gcacaatgcactgcggaaagccacagggacctctgcccttgaaagcggggtattgtccaaggtttctccccatgtgatagtctgaaatatggcctcgtgggatgagaaagacctgactgtccccagcctgacacccgtaaagggtctgtgctgaggtgaattagtaaaagaggaaagcctcttgcagttgagatggaggaaggccacggtctgctgcctgcccctgggaactgaatgtcttggtataaaacctgattgtacctttgttcaattctgaaataggagaaaaaccgccctatggtgggaggcgagacatgtttgcagtaatgctgacttgttattctttactccgctgagatgtttgggtggagagaaacataaatctggcttacgtgcacgtccagtcatagtactttcccttgaacttaattatgacatagattctattgctcacatgtttgttgctgaccttctccttattataaccctgctctcctactacattcctttttgctgaaataatgaaaataataatcaataaaaactgagggaactcagaggccggtgccggtgcaggtccttggtatgctgagcgccggtcccctgggcccactgttgtttctctatactttgtctctgtcttatttcttttctcagtctctcgtcccacccgactagaaatacccacaggtgtggaggggcaggccaccccttcataaaggacacaagaggactcactccaggtatcattgtgccctcctttccccaagcatacacccaaagcagtcttctctactatttaaaatcaggacattaagtgaacagaacagctctgtaggcacagtcaccaccctagtttaaaccacttatgtctctctcctagatacacaatggtgcctccaatttctgaagtctgtagctaaactgaccttttcaaatacaaacagaatcctttcatatttcaactgaaaacattccactggtcctttattactttatggaagcaattctcaaatcttaccttgcattataatcacctggaggtcttggtaaaagattgcctgggccacatccccagtttctgactcagtagggctggttttttcctaagttcccagatgatgctgctggcctgcggactgtactttgtgaacctatgctttaaggaaaacaaagcaaaaagatccattaagatctagtccaagttttttgcctagctcccatcatgtcacatatcacagttatgtgattttacagctactctgcaattctttacctaactgtaaaaacccctcaccaggcagcaagcttcttggtggcaatacgtctctagcttgtttgaggaataaataaaacctgtggtagattccaagctctcagtttcaaccatcatcatactggctgattcttaacatgcctgcacctaaagcgcctcatctacaaagttgaaatgataattcgtacctgtaagacccttgtgaggattacaggatgcttacataggtcgagggtgcagacgacgtaggctggtgggttctcaactggcagctaccacttcgctcccttaactccccaacccccactcccaaacacgtacattaactctttgaagataacatagccacttcataaaccctaattcagatcataacatttaaagcttaattgatacaggctcaacacccccattctaactctacaatcctgaatttttcacaagagctacgccagacactaaggagatccagtcgtgggcaggcagcgacccggaggtttaggcacagagaatgttcaagaagcccctgtccagttaagcctcctggcgaggcccttctgggcctttcctgcggccttcccagctcacctggagcagacggatcagcaaatccggccaaagaatactcaggacccaccgagcccccgcgaggaaggactcataccccaaccccaccaagtgggctgcttcctgcctggggctcagcctgcgcggtggttggcagttgccccggaagtgggcgggaaggacctgcgcatgctctgtgaccctgggtgcagggattgtgtgaagattgagagctgggggcgccctcttccgtgatcagggccccgttggccccaactggcatttaattcccctggctgtcttttcggattcttatcactttttatgtatatgagtaaacttgagggtccaagtaagtctgcaagttggttttaaaagcttcaccagcacagcgtcccctcccagatggtgagggagtggagagctttgcagggtcaactgcttcccgtagcctggggtcgcagggtggagtcgttgagcactccctatgcttgaaagaggaatagaagcccctttggattagtttgcatctcagtgggtgagtgggtggatctctcccaccctgtgggattgtgccctaccctatgaactcaggtttacctgaggaagtgacatttcaggcggaatttgagggatgaagaggcattcgttggatcaattccacggtcaaagtcttcaaggctggaagaagagccaatgtggagcctctcaactttaaagaatttagtacaggccgggcatagtggctcacacctgtaatccaagcactttcagaggcagaggtgggaggatcgcttgaggccaggagttcaggacaagcctaggtaacattgccagaccctgcgtctacaaaatattttagaaatgatttttttttcttttaataagagacggaatctctctttcgcccaggctggagtgcagtggcgcgatcttggctctctgcaacctctgcctcccagtttcaagcaattctcctgcctctgtctcccgagtagctgggtctataggcgcacgccgccacgcctggctaattttttgttgttgtatttttagtagagacggggtttcatcgtgttgcccaggctggattcgaactcctgagatcaggcaatccgcccgcctcggcctcccaaaagtgccaggattacaggcgtgagccacctcacccagccagaaatgataattttatttttatttttattttttttttgagacggagtctcgctctgtggcccaggctggagtgcagttgcgtgatctcggctcactgcaagctccgcctcccgggttcacgccattctcctgcctcagcctccagagtagctgggactacaggtgcctgccaccacgcccagctaattttttgtatttttagtggagacggggtttcaccgtgttagccaggatggtgtcgatttcctgacctcgtgatccgcccgcctcggcctcccaaagtgctaggagtacaggcgtgagccaccgcgccctgcctagagatgataatttttaaaaacttggtacaaaaggaactgaaagaggtcatttggttggcactacaacgtgggaaattgcaagaagtataaaatatggaaaatggctttgtgaggctgatgagataggcgagaatgaatgctgcaaggccctttaggcaaaattgaggatattggtttttatcaaatgcaaagaaaagccagtgaagcattttaaacatgaagtactaagatttgaattgtggaataaagacccgtcgatgcctttaatatatcctagaaagggtgtatggtggacagttgaatagaggtgtgacctagacaaatcaaccgataaagcaaagtccttgttcgtaaaccttttgaaattccagagtctcctgaaaaagaaaggaaaagaaataccagtggcagcagcttcccccatattactttgcagtgaggtgagtgcatggtatttatttgttattttcgcccaggctggagtacaatggcgccattttggctcactgcaagctccgcctcgcgggttcagcctccctggttcaaacagttctcctgcctcagcctacagagtagctgggattacaggcgcgtgccacccacgcccggctaagtttttgtgctttcagtacagacgggggtttcactgtgttggcccggct

SEQ ID NO: 317485 - DNA, 4001 bp, Homo sapiens
cctgtaatcccagcactttgggagaccgagacaggtggattacctgaggtcgggagttcgagatcagcctggctaacatggtaaaaccccatctccacaaatatacaaaattagctgggcatggtggcacacgtctgtaatcccagctactcagaaggctgaggcaggagaatcacttgaacccgggaggtggaggttgcagtgagccgggatcgcgccactgcactccagcctgggcgacagagagagactccatctccaaaaaaaaaaaaaaaaaaacagatttcaaagtctattgggagaatcagatacatggttttaaaaaatatataatttgatatttagtcctttgctttgactgctggagagctcaaatccaagtccgtgaccaaccttgaggacttgtcaggtatcatttaaaccactattttgcttttatatctctgtctctttattttttttaatttgcattttcccctccatgtttttgagatatttctttttaaaatcgctttccgtctcatgttacatgtctataagtatcacttgtgttttaaataattctaccagagccatcatagaggaagccacagcgttgtctagttatgcaaaggaggctcctagagggggcgaattgcagctgagccttgagactcccacgaggacgctcagaagaaggcagcccaatgcaaggaaactgcatattttagaggtgagactggaaaaatttgtcttttttttttcctgatatttcactaaatttccctttagtcccccttatggggtcatatacaagcagcaaaagtcagacagacaccgacctggcacagtttcactctctccttctcatgggttagtacagcctgagcttcctttctccttacacgcaaaagattcaggatttcctggagtttctcctgcaatagaaacaaaccctttctggcaaatgagcagagtcccaggtcatgaaggggctttgaagaccagtaactgcgcagtcctaggcctctaaaacaaagggcaggctgggtgcggcgcctcacgcctgtaatcccagcactttgggaggccgaggcaggcggatcacctgaggtcaggagttcaagaccagcctggccaacatggtgaaaccccgtctctattaaaaatacaaaaaattagccgggcgtggtggtgggtgactgtagtcccagctactggggaggctgaggcaggagaatggcgtgaacctgggaggcggaggttgcagtgactgagatcgcactgctgcactccagcctgggcaacagagcaaaactctgtctcaaaaacaaaaaaagggaaaaaaaagggtgtaaactggacccacgccagtttgtgatgtggtgctcagatgggccctcgtgactgtcccccacagaggacgttaggaaacgtcaggaaagctaacggagttagctgcgatgagtcgtggggttcatgctgagcagctgtcttactctgtgatgctcctcagcctcgctggagagatgcactctgtttgcaccatggctctgggctacgaaggcgcttccaccctgctcgtcatcggagagcgccttggcagtggtgggcatcctcccgtagctgccctgctcatcctcgctctgcagcacctgggaccggagctgcctggcgatgctggccagcctccccagacgctcgtttgactggaaatgcgggccctccaaggtcctccagcactcaggacaagataaaggtgtgttatgttcctcccagctcctgaggagacacaccagacaaaagctgtgcccacactcggtggtcactgggctgctgaaatagtctaagcagatgaaacaggtgagttcctccctgaggttctccatcagatctgctgtagacattttctcgaggctggatatgcagccaggttacacctctgttctgggattagcaaagccctcactgccgtcctacagttttgagtaacacgcgggtgacctgttcctatgttgttatgacaagaaacccttatctcttctgtgcctgatttcaccagctgacatacactgtccaacacaaagccaattatgacttaatgtggaactcctgtatactgggctcctcaccaaccccaaactttgagacttatctctgtgaaaagcacacatgctagaggctgaggattctggcttctaacaggattaccattttgagaactggttattgtacataaacagcactgtggaaccatgtgagcatgtgggttttaggctggaagcttgggtgatttggtgtaaaccagtaaagagatttgagttttgatgatctctaataatatctgaattggaaatttggtccaaatcttttgggaactccactaataaaacctagttgagaactgagagaagaaaactgtaatacatagtccttttctcattagccccttttgttctgcttgaccaaagcctaagcttttgttcctttattgggtactgtgtacttttatttaattttattcatcccaacaaaatgagagctcttccactgaagtattccttggtgttaggcgcacgatgaattgccagagctgtttattgatcttccctgcacaccctagtactcacccatctgccatcttggaaagcatctaaaatgacattctaattggaagttgcctcaagaggctatcccactatggagcagatggaaagaattatattttagtataaatgtaattttgctcacttattttcacccattgaaaatttccaaactaggccccttcaaatccctgattatcagttcttactggacagaaatgaagtgtgcagacattttttcggacatatgaaaaagtaaatgcctagtgtggagactgtgcacagtgaactccgagattggtaacaaatgccacaaattcactgtgtcccctgctcgggagtcagctcctgtcctggcctgccttctgctcactgcatgccaggaagttgcacctcaaaagctcttcctcaaaggccagcgagtttgaccttcccacgaactcatcacgccatatttctgtctccgtcccctcactctccagcttggcagccttccacgagtcgggtccattactcaggctgttccgttcattggtttctgactttcaaggctccaactgctacttctttcccacttacctccaacaggatgttggatgttttcttatcttgaactttgggaaaaagaagttttctggctgagaatgttttttcctccaccttcctttctcctagtcaaaactcacctttctgaaatcattaattcaaaatgtttcaatcctatacatcccttgtaaagcatacgtgaattgctaggatgagaatttaagctatgaaaaaataagagcaaagagttatactactgtaaagaggaagagaggtggcatcagggtggcatcatgaaacctctaccaagatagcctccaggatactaacttgtcacagcttcagaatattgctatgagttagtcttgtaagagtcttaaaaaaaaaaagaaaaaaagtttggccaggcgcggttgctcacatctgtaatcccagcagtttgggaggccgaggtgggtggatcacttgaggtcaggagtttaagaccagcctggccaacatggtgaaactccgtctctactaaaaatatgaaaattaggccgggtgcagtggttcatgcctgtaatcccagcactttgggaggctgaggcaggcagatcacttgaggtcgggagttcgagaccagcctggccaacatggagaaactccgtctctactaaaaatacaaaattagccgggcatggtggcacatgcctgtaatcccagctagtcaggaggctgagacagaagaattgcttgaacccaggaggtggaggttgcagtgaggtgagatcacgccattgcactccagcctgggcaacaaaagcgaaactctgtctcaaaaaaaaaaaaaaaaaaagtaaaaatagctgggtgtggtgttgcacgcct

SEQ ID NO: 317486 - DNA, 4001 bp, Homo sapiens
ctcccaaagtgctgggattacaggcatgagccaccacgaccagcctgcttttactatcttaatgtctattttcatttggcagctagcgtgtttctatgaaaatggaagttaaatcatgtcagccttctgttcgaaaccttccagtggttttgaagcttgtatttcattgaaggctgccaccctaaatgactgaccgccttcttctgatctcatcacctacagcccccgtttccttacacagctccagccacatacacggcagcctccaggcctttcctctgcctagaatattcctccccaagaaaactgcatggcccaatcccccacctccttcagtgccaccttctgaataacaaggttctgatcactttatttacaagctcactccattgcttcctttctcacttaaaaaaaatttttttaaacacttcccaggtaacatactatatattaaacttattttgtttatatccactagaatgcaagttccacgaaagcagagctggttttttttgttttccattggtgagcccctagcaccttgcatagtccctggcaaacagtgggatctcagtatttgctgaacacatggtacttggaactgaaaaagaagggggatcggttgaaaaatccttacctagccaggcaattctcctccactatcttccctaagtaggcatttatttcctttaaaaattgagggagagaaaagacccagaatcggggataccttgcacagaataggattaagtatgaagatacaggctgaaattagaagtgaaatatgcctaacaggtggtgaaccctcaaatctgaatagctattctcaaattgctctttaaagggttttagaatttatgtggcaaccagaagtacaagagatgctcattctcctatgtcattgttataaacggtgtcgttaatctttttgatcattgcaaatagcattgcaaatgccattttactcaccatataatttgtatttctcttaccacgaacaaagttcaaattctttcaatgtatttaaaatatatttactttcttttctgcaaactcttatttgatcgttttttaaaattaaatttctagtcttttccttactgactttttttatttttattttttttgagatggagtcttgctctgtggcctaggctggagtccagtagtgtgatctcggctcactgcaacctctgcctcccagttcaagcgattctcctgcctcagcctcccgagtagctgggattacaggctcgtgcaaccacacccagctaatttttgtatttttagtagagatggggtttcaccatgttggccaggctggtctcaaactcctgacctcaagtgatccgccctcctcagcttcccaaagtgctgggattacaggcgtgagccaccacacccagcttcttactgactttaaagagctttttatacattaagatattagcacttttccttcctatagatttcacatttttcctgctttgtgatttgtcttttgactttgtttatgatacactattttctaacaacattactggtaatttccccccaagaatcaagataagcactcactgacctgaatcatcgccattctttcttgctcatcagtcaatatgcttttagctgcttcaagtttctccctcgatgtgttcaatatttcctggaataacttctatagagaaagcacagaattccaggtgagatcattgatttagaacagttggattcctgaccttaaacagccaacaactctgagtatatattttcttagcctttaggttgaaggttcaacgaacttatctaatattctgtaataaacatcaactaaggtaatggttttggaggaccagaatgtctgtccatttcatccatataggagttggccagagtgttttgggatttgcgtgagtgactcttaccctgtaattctcagcagcctcttgtatcccacacaccatgtgatgtttgtgctcctgggactggaagcatttgctgcagagtgtgatttggtcaacatcacagaacagccgtgttggttccaggtgtgtttcacaataggcatcttctgtgatgttgtgctgtaactgagggctgagccttttggacatcctggtaggggtccctagttgaagactggactgtatgcttctactgaggtatctccctgcactgtgaatgagaaaaaatggtggcttcctttgttttctggagcaggcacacacacttggcaacttcagagtccacgaagatccaaggaaataagtccacgcagacagagcgggtcggcgctctggactcctcaaatccaacaaatttctggcagctgcctgcttggggaaaagacagagttaggccagtgttctaagaccagcgggtttccctcaggtcttctgacaatcttgagcaataggctgaaaattaattacaaggaacagcactcacttacgagtcattcaggggaaaacagtgctctaaaggcatcgcgctaattactgaaggaacttcaggactagagtgaggtaacagagtgcgaaagaggttcgttgatagaattacagaaaaaaaccacaagtatctgaaaaagttattaaaatactttccctttgagagacagggtcttgctctgttgcccagtctagagtacagtggcgtgaccacggctcactgcagcctctggaactcccaggctccagcgatcctcccacctcagcttccggagtagctgggactacagctgggacaaaacacatgcaacagaaggaatggggaagcaaataagggaaaacagctcctctttttttttttttgagacggagtctcgctctgtcacccaggctggagtgcggtggcgcgatctcggctccctgcaagctccgcctcccgggttcccgccattctcctgcctcagcctcccgagtagctgggacttcaggcgcccgccacctcgcccggctaattttttgtatttttgtagtagagacggggtttcaccgtgttagccaggatggtctcgatctcctgacctcgtgatccacccgcctcggcctcccaaagtgctgggattccaggcgtgagccaccgcgcccggccgaaaacggctcttctaagaagccatcaattaaagagatttgcaaaacagtgaagccaaagccactcttctcaataattgtttccgaaataaaatttcaggagtgacgtgacgcgctgcccgcggtctggccgtgagcgccctcgctccttcctctttgactccatcttcgcgggggcggcagccggaaccgcggttcagtcaccaacatgcagttcttggtccgcgccccggagctacacgccctccaggtgaccggccaggagacggtctcccaggtcgcggctcaggcagcgccactggagggcttcgccccggaagatctatcgtgctcctggcaggcgcgtccctgcagggcgaggccaccctggaccagggcgaagtgggaggccccgactgcccgggaggccaagtccgtggttccccggcccgcgctgggaaagtgacaggtcagactcttgctaaggtggccaagcgagaagacaggccgggctgagccgcgggtgcggtaccaccggcgctttgtcgacgttgtgcccatctttggcaagaagaagggccccaatgtccttcttaagtcctttgtaattctggctttctctattaaaaaagccacttagctcgaaaacttttttctcagaaaaatgtttttgtttttattattttattaacttatttatttatttttgagaccgaatctctgtcgcccaggctggagcacagtggcacgatctcagctcactgcaacctccgcctcccgggttcaaccgactctcctgcctcagcctcccgagtagctgggactacaggcgcgtgaaaccacacccagctaattttttgtatttttagtagagacggggtttcaccgtgttggccacactgatctggaactcctgacctcaggtta

SEQ ID NO: 317487 - DNA, 4001 bp, Homo sapiens
ctactcgggaggctgaggcagaagaatcgcttgaacccgggaggcagaggttgcagtgtgccatgatcgcagcactgcactccaactagggcaacagagtaagactccgtctccaaaaaaaaaaaaaaattatatatatatatatgtgtgtgtgtgtgtgtgtgtgtgtgaaattttactcctgcataaaattttaaaaatttgtggggttcattcgcagacataggttattaagtgggcttacaaactatctcactttgtaaggcaaggacacatcctacatcaatgagcaccaaaagaaaaaaaaaagttttttaaaactgcattaagttatggattgggataaaataaataatcgtcgttaatttatgacagtctccttttcagaaaaatctcaacgaatgtgggaataatgcagattggaattaatgacttgacagcgatagcaaaggaatgccttttttttttttttttttttttttttttgagagggagtcttgctaggtcgcccaggctggagtgcagtggcgcaatctcggctcactgcaacctctgcctcccgggttcaagcgattctcctgcctcagcctcccgagtagctgggactacaggtgcgcgctaccacgcccagctaatttttgttatttttagtagagacggggtttcaccacgttggcctggatggtctccatctcttgacctcgtgatccacccgcctcggcttcccaaagtgctgggattacaggcatgagccactgcgcccggcctttcttgtttgtttgagacggagtttcgctcttgttgcccaggctggagtgcaatggcgcaatctcggctgattgcaacctccgccttctgggttcaagtagttctcctgcctcagcccccccagtagctgggattactggcatgcgccaccacgcccggctaattttgtattttcagtagagacggggtttcaccatgttggtcaggctggtcccgaactcctgacctcaggtgatccacccgccttgccctcccgaagtgcggggattacagacgtgagtcaccgcgcccggccaggaatgcccttttaaaagacatgcggactaaacgtggaggagcgaaaagccctttgttcacttcagttgtcaagccttttgggcagagggttgggaatggaaggggcagatgaaattctttcagaaagtgacaagtaatgtgttgccatcctcttcatatctgtagaaaaattcccaaatttaaagtatttcagtgaaatcaagtaacacttcgatctttataaaactgtcctcagctcacagcacctgcagcaacttcccctcgggctctctacatttcagagagttcagcgacgtcagccctttgcaggaaaaatgaggtaaggcagctttaaagaggtaaagcccacggtctctagccacgaagtggcagggccataacacgctttccggccctttagagtacagatttcccactgattctttgcaaactcacttttcacatactacgggccgatggcaaccccaaaacacacgccgacggaaagcgccccaccacggggcggagcctcgcccactatcccttctaggctcccagccagcaaacgcatttcagagacgggattaagctgtctctggcgaaccagggagcagctgggtaggccgcggggggcgcctgtcatcgacgtcatttccttcagcaagagcgccgcaggaaaccacttccacaccactgctcccctctcccccggaagcccttgttgctagtagggggctgcatggcacgcgcccctttgcgtccagagaataccatagtgcgggggagcgccaaccagtgccaggacacttaccgagctgaagagttgacagggaagtgaaatctcagaaagaaagcctttctgggttggcctggttacggctcacgcttccttccacagaaacttcaattcccagaggcaggggcggtagttacgcagtggaggctacggcggttgcgtcttacgtcatcgaactgcggccatttcgaacccgcaatggaagaaaggggaggggtttatgcggggcggggtctggagttagtgttttgggagtgggaggtagttacagtgatgtctgttttttcccgttcaagaattaagtgtgtacctgcagacgtgtattcattcatatattcttgtgagtattggatgaaggaattaagatagtcccactgttaaaaatgcaaaacaacgaagaaaggctcctaatttttctgtgttgaaaatgagagaaaaacatctcttgcctatattatttttaatttatacagaaaattaccatatcacatgattttacataactcaagtggaaaattaaattcaaaaagtgagtcagattcacaataaaatgcatttaaatttagaatctgtaaggcttttttatggctgaagtaaaacagccatagctttactctttattcattccttgagctatttttcctatgctgttttgcaaaacatcagatgacatttcattgtttataatacttgaccttatataatcttttgctatatatagatcatgtcaactgagagagaaatgaaatacaaccccgtagattgtcattttctatttagtttttttctcctctacttctaataggtgattattgcagaatttgaaggtaagaatgaggtttgcatcttgaatagaagactggcttctcatatagaaagaattttgaagtaaattatccttgaagatatttgaacatgtttaaaggcttcagtgaatagaaaattaaatccagaatttgagattctctaaaagagccgaaatttctttgactttagttacaaaactaaagtcactcttgccataagcccttaaattttacttgaaacactgtatcagctataacactgttgtgagtccctcttctgtttcttcctcatctcaaacctaaaagatctttgttaactgagcactggcaaaaaagtctggatccacttctgatctgttagtagggcatcttttttcagctgcctccatatgagggcaaagagtagctgagggaggattagtaattggatatgtagcccttcacatgtaggtcattaaattcaggctggcaaagtgatgtgccaaatctttccacagctgttcagttgctcctatgggatctgttttataaataattatacagttttttcagagttaatacctggcctccttagatattttaaacaaagttttaaagcaaaaaaaaccacttcatattctaataatgaagtcaataaattttcttttgacatagacatttaactttgtagtcatttggtgcaaaatttaaaatgattctattattaatccaaagtaagcaccaaaagagcaccagcaaaagtcaatttaacaaaaaattgaaacatatagaaagtttaagacggtgaaatcatgtgaaacaatattttcattgatttgtaaaatttatgtatttatttatttgacacatgtatcgagttctatgcgttttgtcttagtattggtgatacagaaatgacgaaatcatgctctctgtgcttaaggaatccttaatctaataggggagccagcagtaaataaataccatacaacatgtacttgagatgcttgtactttgaaagaagcaactaaatgctccttgaggcagaggacatagttttggagattaaataattttgtttcatcttggaaagtaagtaggagttgtacaggtgtcagaaaagtgaagaagtttaagatattgggaacagtgaaagcaaagacctaagcgtgtcatagttttgcacatgactgaaaagctgtggatagaatgaggaagaaggaggagataataaccctaagggcttctctaacttggacaactgtaggaatgcagtaacattaaccgggtcatttagggaatactggaagaaaaataggttttgaggccgggcgtggtggctcacgcctgtaatcccagcactttgggaggcctag

SEQ ID NO: 317488 - DNA, 4001 bp, Homo sapiens
cactatgtactagcgtgttcagattacctgttaagcaaaacagcattttattaggtatacttgctttctaattgttttagtttgggcaataatttataaaattccatggcagagtttttcattcctttctcacatgcagtgatgctcacagtacattttcattcattcaaccaagttcaacaaatgttcaagaacgtattttacagtaactataaaaatatttgtgtgaggtcgggcgcagtggctcatgcctgtaatcccaacactttgggaggctgaggtgggcggatcacctgaggtcaggagttcaagaccaacatggcgatacctcgtctctactaaaaatacaaaaattagccaggcgtggtagtggacgcctgtaattccagctactcgggaggctgaggcagaagaatcgcttgaacccgggaggcagaggttgcagtgtgccatgatcgcagcactgcactccaactagggcaacagagtaagactccgtctccaaaaaaaaaaaaaaattatatatatatatatgtgtgtgtgtgtgtgtgtgtgtgtgaaattttactcctgcataaaattttaaaaatttgtggggttcattcgcagacataggttattaagtgggcttacaaactatctcactttgtaaggcaaggacacatcctacatcaatgagcaccaaaagaaaaaaaaaagttttttaaaactgcattaagttatggattgggataaaataaataatcgtcgttaatttatgacagtctccttttcagaaaaatctcaacgaatgtgggaataatgcagattggaattaatgacttgacagcgatagcaaaggaatgccttttttttttttttttttttttttttttgagagggagtcttgctaggtcgcccaggctggagtgcagtggcgcaatctcggctcactgcaacctctgcctcccgggttcaagcgattctcctgcctcagcctcccgagtagctgggactacaggtgcgcgctaccacgcccagctaatttttgttatttttagtagagacggggtttcaccacgttggcctggatggtctccatctcttgacctcgtgatccacccgcctcggcttcccaaagtgctgggattacaggcatgagccactgcgcccggcctttcttgtttgtttgagacggagtttcgctcttgttgcccaggctggagtgcaatggcgcaatctcggctgattgcaacctccgccttctgggttcaagtagttctcctgcctcagcccccccagtagctgggattactggcatgcgccaccacgcccggctaattttgtattttcagtagagacggggtttcaccatgttggtcaggctggtcccgaactcctgacctcaggtgatccacccgccttgccctcccgaagtgcggggattacagacgtgagtcaccgcgcccggccaggaatgcccttttaaaagacatgcggactaaacgtggaggagcgaaaagccctttgttcacttcagttgtcaagccttttgggcagagggttgggaatggaaggggcagatgaaattctttcagaaagtgacaagtaatgtgttgccatcctcttcatatctgtagaaaaattcccaaatttaaagtatttcagtgaaatcaagtaacacttcgatctttataaaactgtcctcagctcacagcacctgcagcaacttcccctcgggctctctacatttcagagagttcagcgacgtcagccctttgcaggaaaaatgaggtaaggcagctttaaagaggtaaagcccacggtctctagccacgaagtggcagggccataacacgctttccggccctttagagtacagatttcccactgattctttgcaaactcacttttcacatactacgggccgatggcaaccccaaaacacacgccgacggaaagcgccccaccacggggcggagcctcgcccactatcccttctaggctcccagccagcaaacgcatttcagagacgggattaagctgtctctggcgaaccagggagcagctgggtaggccgcggggggcgcctgtcatcgacgtcatttccttcagcaagagcgccgcaggaaaccacttccacaccactgctcccctctcccccggaagcccttgttgctagtagggggctgcatggcacgcgcccctttgcgtccagagaataccatagtgcgggggagcgccaaccagtgccaggacacttaccgagctgaagagttgacagggaagtgaaatctcagaaagaaagcctttctgggttggcctggttacggctcacgcttccttccacagaaacttcaattcccagaggcaggggcggtagttacgcagtggaggctacggcggttgcgtcttacgtcatcgaactgcggccatttcgaacccgcaatggaagaaaggggaggggtttatgcggggcggggtctggagttagtgttttgggagtgggaggtagttacagtgatgtctgttttttcccgttcaagaattaagtgtgtacctgcagacgtgtattcattcatatattcttgtgagtattggatgaaggaattaagatagtcccactgttaaaaatgcaaaacaacgaagaaaggctcctaatttttctgtgttgaaaatgagagaaaaacatctcttgcctatattatttttaatttatacagaaaattaccatatcacatgattttacataactcaagtggaaaattaaattcaaaaagtgagtcagattcacaataaaatgcatttaaatttagaatctgtaaggcttttttatggctgaagtaaaacagccatagctttactctttattcattccttgagctatttttcctatgctgttttgcaaaacatcagatgacatttcattgtttataatacttgaccttatataatcttttgctatatatagatcatgtcaactgagagagaaatgaaatacaaccccgtagattgtcattttctatttagtttttttctcctctacttctaataggtgattattgcagaatttgaaggtaagaatgaggtttgcatcttgaatagaagactggcttctcatatagaaagaattttgaagtaaattatccttgaagatatttgaacatgtttaaaggcttcagtgaatagaaaattaaatccagaatttgagattctctaaaagagccgaaatttctttgactttagttacaaaactaaagtcactcttgccataagcccttaaattttacttgaaacactgtatcagctataacactgttgtgagtccctcttctgtttcttcctcatctcaaacctaaaagatctttgttaactgagcactggcaaaaaagtctggatccacttctgatctgttagtagggcatcttttttcagctgcctccatatgagggcaaagagtagctgagggaggattagtaattggatatgtagcccttcacatgtaggtcattaaattcaggctggcaaagtgatgtgccaaatctttccacagctgttcagttgctcctatgggatctgttttataaataattatacagttttttcagagttaatacctggcctccttagatattttaaacaaagttttaaagcaaaaaaaaccacttcatattctaataatgaagtcaataaattttcttttgacatagacatttaactttgtagtcatttggtgcaaaatttaaaatgattctattattaatccaaagtaagcaccaaaagagcaccagcaaaagtcaatttaacaaaaaattgaaacatatagaaagtttaagacggtgaaatcatgtgaaacaatattttcattgatttgtaaaatttatgtatttatttatttgacacatgtatcgagttctatgcgttttgtcttagtattggtgatacagaaatgacgaaatcatgctctctgtgcttaaggaatccttaatctaataggggagccagcagtaaataaataccat

SEQ ID NO: 317489 - DNA, 4001 bp, Homo sapiens
tatgagaagaattcaaccccattgctggctctgagatgtaggaagctgcatgaaagaaccagaaagaagcctccagcaactgacagccagcaagggaacaaggaccccagtcctacataaaaaattggattctaccaacgaactgaatgagcctgagaacagattccttcccagaacctccaaataagagcccagccggcaggctgtttgattttggcctcgtgagagagacccacagcggagaaaccagcagagccaatggggattcctaacctacagaactgagacaatcaattttttgtactgaccaatgaatttgcagtaatttgttacagtggcaatacgaaacacatgctgctgaataaagtttcaggtaagagtggctgaggctgaagtgtcaaggtcacgggcagtaaaaataaatgccagagatttaacgaacgctgaggactagtaggttcccatccatccagtctctatgctctttcacagttatttgtctcagcataaatagctctctttatgttggggaaaaggcttatggcatgcctgtataaactggccataaaaatatgagacaataagttgtggaaagccacaagaggcctctgaggaggaaagccttcttattgtcatgatgttcccatgctctgggcgagacctactgtcttacctataaacactgtgttcaaggagaaagacactcctttgaatcactacaatgtggtcagacatgcaggctcctagttaagcacgctcccactggttattctccgacaagttaaagataacgctgtttgagcacaaaggagattcatttaaaccgccactgctatagatgacatgtatgatgcactgtctccctttcaccctttcgccccgaacgtccgcttcttagatctaagtgattgtactcaatagtgtggagaccagagctcccaggctttggcagcctccattttgcaattggccccctggcccccaatctttatgcactcttaacctgtctcgtctcattccttcgtcgccaccggactttgagtaccctacgggtggtgttgaggctggtccccaacacttttacacctacagctttacctgctaaactcctaggtattacgcaatatccagctagtccttcactgtctctttgaagccttccagacaccaccccaatcaattatcccatcttctgtactaaggacacacatttctatgcgcccactcaaaaaactatgaaacacctaacaacctccctaggacatcgcagaggaactagtacccttaggactttttcattgacccgaggttctatgaatgcttttttatctaatcatatccgtccactatcaaaacactcttaccttgcacgactatttccctcctgggagttgtaagggggcaatgtgggctagttttcgggatgacggttctgagaaccacgtcgagctcacgctgcgcctctggctgcgatcccgccccggagctggtgaggaaggccagcaactccgaattgccacgggcgagactttgggagaaatcctcccaaagcgaatccagatctgcggcggggaagtcgccctcccttccttcagcatggccggggtgcccggagtccctcaggggcactgaggcggcttccctctgtgcctcctcttgctggcactggccctgggcctcctcaagttcgcaacatgccgtgccctgctcgggtcctgatagcgacctgggacccgggccccctccgggggaaccctggccgggtcccggaccccgctccttctgctccgagcctgcgctagtcccggggccgcgggcctccgcgcagggcagggcggcgctccagcgggcctccaggcgggcgccgcaaagccgtttgtttgccacctgcggcctctccagccacacttcgaccgcagcccagaagccctgtgggagaagcgcgcctgggtagctgatcccggtacggcccacctcagccatggcagccagcaggtgtacagccctggcagcggcgcgccgagatgacgcagcccggtggcgcggcgcgttgacgtcatggaggcggggtgctgggaccggaaatgagaatggcgccgctggagatcctttcctgcttttggtttccctggcaggggttgaactgtggagtgtgtgggtgaggaatttgacctgtgttttattcccttttgagagaattctgggcgtggtatagttacagaatcaaacatcagccagccagcgggtgtggaacgcattgtcctcagtactgattaccgataaaagtcagggagcctaagtttgtgaacgtaaaagatgagtcctcttatgaaagctaacttttctccacttgggttctggtttgcttttagtgctggcattacagccagtgccttcctaagtctgagtgcagccatggctgtttcataagaatgatgtaacgttgtcccatgagggatgaaagtcatctgtcacctactgtagcaggacaagccacagacaaaactcctcagacaccggattaaagaagaaagaggtttattcggccgggagcatcggcagacttgcgtcttaagagctgagctccccaaaaaagaaattcttggcctgtttaaaggcttacgactttaagggtccacgtgaaagggtcgtgataaattgagcaagcatgggaaacgtgactgggggctacatgaatcagctaacagaacagaaagttttgcaatgcttttttcatacaatgtctggaatttacagataacacaagtagtttaggtcgggggttgatgttattattattattttttttaactcctagggccacgtggtggtgccaaggttgtctggctatttatctgacttttgtttctttctaactttttgctttctctcttttcctcctgtcttatgaactaggcaaggtggcagggaggagggcagcaggagtagtagtggtctccttatcccttcctttgagaattttcacaaattagtgggagttctcgcttttatttttactttgagtctctttgggagacagagtgatagtgttttatgtaatacacttgcagtgagggttttaaattctcttatagctggaaactatcttttaaataaagacctaggatcaaacctgtgttaaaccagtacaggcacatgtgccaactttgtcatgtcctaagcaggttagtttttttactgggtcttaaaagcttttttcctagcaagcaacacagtatttcttaataataggagtttttaagagccaaatgcttgaacttggcatctgcttggggaaagagttaaagtaatcttgaggcattaaatcttttgcttctcaaggccattggtctctcatgttagcctttttataaacataacatgaagaaacgtctaggctgctggcaatgttttcagccagctgagcaaataggttgtttgtttgttttgctaaaggaggaggctcttgtaacttctggtttatgtgtttaaagaatgacttaaagactcggaattgttgctgggctggacgggtctgggtttcctgactaagtagtatgtgtacaatggggacaccttatataggtgtttcttctagcatggttatggggggtaacaataacaaaacaatatacagcatatttgtatccagcaaggacaaaagaggtccttacctgggaaaaagattgaatacagtgacagaacaataggaaaacagtattacaggaaaactattagtcttaagatttttaactacgtttacttgcttgacaagtcctcaagcttcggccatgcgtagactattcagctgccagtgcgtgactagagccgggcttgttgtttcttcaagcttcagccgtgtgtagactggtcagcctccggagtgaccagagcagggctgtcgtcctcagcaacagcttggtctcgtctccgaatcagccgggtaggaagatctgtgtcctgctggctggtctacttgtcctgagctgccagtgttagct

SEQ ID NO: 317490 - DNA, 4001 bp, Homo sapiens
ctgaattacgtaaagttagcaaacatatacaaaagatgttctattagcagtgagacagcaagcctacaatagaatttgccctagggttttgtgtaattgacctcaaatttcggaaggcaaagtgaataatctctgctccgccctactttctcagataagagttccggtgtttcatgtagtcaggatttaaggtttttaaaaaagaagaattttaaaaggaataaaaaaacagctacgttataaaaaccaatttggcaaaaggaaaaatggacaatgttttaaaaccttagggagacggggaagtgagctggtggcgctttcatcccaaaggatataccttccctccatttcctgggccgtttccattccacgcttatcttcagcaataactgaaccacatcgggatgcgtcgctcatttaaaatcagaactcttccctatgggatctactcccagccactgattgtgttcctgtgttctaccggcaggtccagcctgaccaggcgcagactctgcgcgcgcggagcagcgcgcgatcctggggatgcaggggtcatcccggaggtctcggcctcgggcggtgggcctctcgccggcagcagggggcgctgcagaacctcggtccccatcctggagaaccacctccccggctcagccggtctgcgccgcccgccaccatccgaccccaagttctctacctagttctgagcgttcttcctaaaaaagacagtaaaccctgcggcactcccagtgttacgtgacagaaaaaatacagagcatctcaccctgtgaaaccgatcaccctctttttatcttctctgcgtctcgcactgattaaaagctgtctccaagattggaaattaagaaaagttgctctttctcatgcattagcgcgccgaccgctccttcgtttagaaagagagagagggaaagaaagaaagagaaaaagagagcccgcgcgccggggcgcgagccgctgaccctgcaccgcctgggaaccgcagtcaaagttatcactaaagcggttccccggctgcccgatgcccactctctccctcaggggaccctatagggcttcggttccagttttaccccaaatgtgactgaaccacagagagacgaggcgcctgggcaaaccttcaacccacaccctgtatcgcactgtcccctccctactccccacttctctgcccccgcccccgacgtcccagagcgtcggaggggacccaagtccacgctgggacgcccgggaggagttcagggttcaagtgcgcgcctgggtctgtgcacatcttccccttcctcggcctccctgggtaagctcgggaccccggggtccgtcttccaaggggtgcccagccctggcagcagtcgtgcgagctcctcggctctaatacagggagtggctgctcgccaggatgcttgtctgaagtcagtgtgcccgcctgcgggctgttccgtgtgcttgagcctggacagagcccctgccacgcactcggcagcccctgtgtccctccaccgcgcgggaccgagggggcgagcctccggccgaggtctgtcccctccaaatcactccaaatcgaactgcctggccgtaccatgtgggtctcggaggtcccgggctcgacgtggagccgcccggcgcgcgccttcccgccccccgcccggcaccgccctccgaggcgcgggccgcggccgggcccggtactcacaggtccggcccgtgggagaagggcggcgggcagtagccgtgcggctcccgctgcgagggcgccgagcgcggctccagccccccgttgacgcccctccagccccggcggcggcgctgcggctccgcgccctcgtcctcgccctcgtcttcctcctcctccggcgccgggaaggtcacccttgcttgttctttgcacttcctgaccttggtggacatcgcgccggctgcggtccgagtgtgggggtgccggctgccggcctcctccgccttcgcggcagtgcagtcttcccgcggcgccccttcaccacctcccgcggcttccggggccccgggcggcccagggcgggaaggcaggagcggagagcgtcgcggcccgcgatccagcagttagaggctagcgccgaagccgagctgccgccgcccaccatcaaaccgtgggagcagctgccgcggccgtggctgcgacgaggaagcccggggccgagcggggctctggtgctgggagaggctctccagccccgcggcggcggcgatgcctcctcggcgcccgtctcctgtctccgacagcatcacttgctaggacagcatcgttactcagggagaaggagagggagggcgggagggggaagaggagggggagaatcaattccttatcagacagagctggagaggaaatcagacagaccgcaggtggggagtaaagaaagagaaacttcccctccccactctctttctcttccagaggatctagggccctttttgcatctacagaaacaagtttcctaaggaagggaaaaggaaatccactggcttgttaattttcctgcagccaactctccaaatttgtctcaaaaagcatcacttgttcgttgggttactcccggtaagacttggttgaacctacggaggtttaagtaccttcccctgagtgccttcgtactccatccagcctggtaatgttttaaacgtgcatgatgcttcagttcttttaatgactctcaaaggcgtctaataagatttatatactttccaaggaagatttttcagcgaaatgcagtcttctttttaaaacacactcacaaaaattgcattttagaattcaagaccagtcattcttttgggaggaaagaggtacagaatcttagcaggaatcttagggatcaaggagtctcttggtccttttaaataagaaacccttggcctagagagactgaaaaaggtactcatgataggtgggtagtgagaaaacttagattagatccagaagagtgtgttcttccagactttcccttgcttcaaatagacggctttctagcaagtccaactaggaaaaatcacaaaaatactggacacgctctgatgagataaaatttatttaactgtatccaattatactgtactttttagaggaacaattcttcccaaatttaagcaaaacacaagaaaatgtagctcctttgaatttaattcttaaaaagtaaataaaatattgtgtattaaattggcaagtctatatgttgaaagaagcaatagcatttatacatctaatataggaaaaacaaaaacaagtaaatattgtatagtgctttatgtttggaagtgcttttcagttgttagtacatatgcaagtgttaacggtttcacaatgtaggttagcagacctattcagtttcacctctggaatatctctaaagcaggactgcccttctccacccggtaccaccgcctcaattcaggctcccctgcttctccctgctatccagcctttctgcagcccacctctccccatactgtttcattctttgtactactggaaagaccatgcttaaagcaaagtctgatcacgacttttctctataaaaatctctggtggcttcccactactttcaggttaaaatccaagttttcaatctctcctcccatcctttttcatacacattctaactgcagttaccctgaacgctcagtcatcaactgacatgctagatactttcccatttctctgcctttgtctatggcattcctgtcactgaaatgtctctcttcattcatctgctacactgacttttccttaaagaactaggttagctgtggcctccagtctgacagccctcttgggtcccagtggattttccacaggctctggtccttacccacactgtgtataccacagtcttaccagtgatcacatcatactgaaattcactctgtatgtgcctgtttcctctaaactatgaatcccttgagggtgatgtgggatcttatttattttgagctattaggggctcatc

SEQ ID NO: 317491 - DNA, 4001 bp, Homo sapiens
ccactttcccaccattttcttgcaacaccggggcaaagtatattttctgtatcctgaattatattgctagttgcatttgtgtaaatctcactaactataaaaaccatattcagatgtgaaagaataatcactttttctgtgatctgacaccataacactaaactaaaaagattaacttagcatctagaaaataattcaaggaattgatgtctacaatcgtctttttagatgggaaatgggagacaagaagctgccaaaaacagtctaaataatattgatcggaactatgaaatacccagatttagtagctagaaccaatcaaaacgcataggaggaggtagcaactgattaaaaaataaaatgatctgtcattaatatataatttttatacaaataaataatactgcttgattgaaaataatatccagaaaaaaagttcacttattaaaaaaaatctcttaaagcaaatcactttgctgtcctcatatttctagattgaactgacatctacggctcaccactctgaatatacatttgtggaattcagggagaggcattttgtcatatcagtgaagtgactttaatagtattttttattggtcttttgacttttgattctaaagggatacacaaatgcttgggccaatgaacagtgcatccaaaactaacactatcgtggagatggaataggagcttgctctgtccagtccaccacacacctagtattgcaggacatccagacacggtatactccctcaggggaaataaagcaaacatattacttatgtgctaccatgcaactaactacaaaacaggaggaaggatttggaagacaaaaagtcacacccaaaccctccttttagcaaaaaggggagaaatcttgagttttatttaatgcttacccaacacagagcggcaccataattatagctctctgatccagaatactggatccccaaagcgaatttgtcacagcaccatcattgagagggagaaagaaaacattagatgaggtctgaatgacgttctcagtccctcgtgatttcacattcactgggcaaaaccgaatgtggagcgaacggtggcagagcaggccaggcagcagcggggaagttgggtgagcacacagagcagccggggtagagcgcaaagcttaccttgaactccttctctatgttggccagcttggccagctcgttgctgagctctagggccgtaagcaccgggtcctcgctggacaatgagaggtaagccgggctggccagccccttgtaggcattgatcctcgagcgtgagtggctgaaggagtcgtgcctctgcttctccatgcagtccccgcacttgcagaaatagtcgtgcggccgctcgatcctggcacccttcatcagcagcatgtgcaccacttcgtatttctggcagtgcgccgccaggatgatgggggtgatgtccggcgagaagcgcgtgccgtcctcgtcgtaagcgtagaagtcgtcgtcctgcagctcctgctcacaggggctcagagtgagacgcttgctggccgcgaagccagggtggttgaggatggcctctacgatgcgcacgtagcccttgctgatggcgagcagcagggcgtcgccaatgcgcgccaggttctccttcttgagcagcagctcggtcacctccaggtgctcgttgcccacagccagctgcagcgcgttctggcccatgtagtccacgcagttgacgttcagcgtcttggactcctccagcatcttgcgcaccactgggatgttgccgtactcggcggcgtcgaggaagcgctcctcctcggcggtgaggctggtgccgcggtcattgaacatgaaggccgggcccctgacagcctggcgccggcccttctcccgcatcactgtcatgcgtctcagggatgggcttccctccatggacctaatcagtagcaacgataaaacaactgtagaatattagggcacattccttcctttcacatgtcagggccctttctggaatacacactacccactgcaaacctctggctgcaggggtcggctcagttgctagcgataccgttgctaactactcgcctgaaagtgacacctgtgatctaaccctggctgctagatcccagaaggaagccggcagcccttcagaacaaaagctcctattctctagaaaatgatattcagatggaataataataaaaatttccatatacccatgccttccttgtgaccctagtaaagatggaactcatcgtaccttccgctcttaaaagtcttggacattgaggcttgcaggtacttgacattcaagtactaggcttgaagactaagagaagttaattttttaaagaatgaggccaaaacactcctgccaagtcattgcatccttttaactaaataaaatcattgaccctcagccccctacaaaagcacaggatttaggccaagtatcatgttgcaggatcttagtttcatctttttctctttattttaaaatttttgtttatttaaatacttttttagagacagggtctctgtggcccaagctagagtgcagtggcaagatcacaggtgcagccctgaacccttaggctcaagcaatcctccacctcagcctcccaagtagctaggactacaggcacatgccacttgcccccacaccctccaccttatgcgtttctcttaaggggattcacccatccccaagttataggatttatcttttcaaagatgcagacaagatttagcaattataaaatttgagcatcaacctagattgattttattgaaaacaaccgtgcctttgtaataagaattatttaattactagtattatatatttgcctcttggaactgaaacgacaaggtttgattatggtttaaaaatcactagaattactttgtgagtaaagcaactgggcactaattgtacatccagatcaatgcgcactgaaatcctaacacaaccacattagttgagatttatttagctgcattatcaaagttatgtcaattgatgtgtacagtgatttgagttcacatcttaatttctgtgatgttaggtaaataatttcatttccttgtgcatccttacgccaggtagaaaatcgaattttatgaagttctcagattttcctcatgaataaaaagctttttcggaaattcagagtctctgaaaaacaatgctaaataaacacttttaacatcgtgactatctataatctttcaataatctgtacaatattttggtggctattaaaatgttgcacaaatattgtataaatctgtatcttaccttacccacttccaatgttcaagataacttccttttaaaaatctgtgatttttggtgggatgaattgtaccaaaaagtaccagataaagcttccacattactgacttttgaagcaaataagtcaaagttaaaagtgaacggctagaaaagaaaatgctttatttctagaatatatattccagaaatacctcctaccattgaaaaaactgtattcgtggagtcaggagttgaaaattaactagagaggacactggcctccctgggtgcctggggtggatgactaaattgggaagcttccctggcaagaggaatcagaggcacctaccagtgtccattctgttttcagctctgagggccccaaacagagagaggagcacagaagccactggcttctcccagatagggactaaggcaaatgtggccgggcaagcctgactctatagaggtatggcaactaaaggggtccccagagaggcttgttgacttatgcaaggacacagtgctgtgactggcacccaattctaatggctcaactagtgtcaagtgatcaacttttaaaaattaaataaacatatttgttttatatacacatatgtgtttgtagcaatttctagaaatcaacacatgaagattttgaagttatatctggactgggactaagaagtcatacaggaagggggactttcactttttacttttcactt

SEQ ID NO: 317492 - DNA, 4001 bp, Homo sapiens
ggatatgacatccattcatgtgtcccctcattatctttattagtcctgaagacagatgacatgctgacacggaaagtggtctccaatcccttgcatttcccctcacaaaacatacatgaccaatgcaaggtattataatagaaaacagaaaataaaataacctggtaagagtgcggtacaaaaaaagaatatgaagagccgtattgacaactattctcacagatgtatatacgtacagcaaacagcccaaattaaaggagaattcaaataaatacattccgtgttcagactgctgtggataattattgatcctgcagttggagcattgtttacctcacactgaacagcaacttagagaaccccctacccagacagccaccatctttactttctatggaaatgcgggtgcccactgaggaagaggatgagatgggatgagaaggggaagaaaaataacatggtctttgaaccaacgttttccccttgtcctggagaactctttgtctggctgctgaacacgtttgccagatcaaggaaaagaatcaaaacaaacaaacaaacaaaaagagtaggcgtcccagcctaattacaataggttcccaacacattgcagtcccaagcagagcatcatttgaatcttgtgttaaagcatttgctctctcggttccccaataaaacatgcctcgcacaccttctcctttgcatttctacaaaggttcccccaaacggcccgctctgtgtcactcctttaaaaatgaggacgtggggcaggaacacactgaaatatatgttgacggtgacttattatcctgacgatgatatatacatacaaataaatccctctaccccgcacccccactgaccagtccattacgcacagggagcgctttccagctgaagaggagagcgtgcaggaaacgttatttacgtgcaattacaggaccatataccacggcatctgcatcctacacaaagcccgagatggtgcaagaagatacacgctgagcatggcacagaccagccgcggcaacacggagccaagccctcgtccaatcagatcgttgttagaaggtggacctcagggtcggccgtgcccgattagccttccctattatgacaccacgctctgcccaacatctatatcccaccgagagcaaatccaattcgtgtggttgctcatttctcaaactgccgaaccctttcttttatctgcatccctgctattcgttcctcaaaaagccaccagaaggcctcggtgccccctttccgcctcgatttctcttttcacctcttcccattcctcgaaaggattaaatgtttatctctccaacgcgcaagctggaaaggcggaaggcgaatgcctctatgctgctccggcaagcgcctgcggggctgcgaaaagtaaaggcaacgaacaacgtgggggaaatcgtcgcgaatcgatcggccacaatagttggaatcccaggagcgctccaacttacccaaaatatgacattgaagccaaatatgaagtatttgatgcaacaactgacttcaggacccttgtagtgcttcccggacatcctctgggttcatgaagacacttgccccggcagcccgagtttggagctccgaagcaccgttgctcggagcagcccggcggggagcaggagctcagggacaccgcacggggccgcggcgctggcggcctgggctcagccgcgcggggaccgaccggcggagagcggctcccgcacctccagcccctcgcgcgccgaggccgccggagccggggtggccgcgagaaagcagggaagccgcgcgctgcaagctcaagcctcgccgacgctagccccgaacacaaagcgagcgcccgcgtccgtgcgccaggcggtcggtccgtcggttcgtccccgggcttcgggcaaaggcggccgcggcagatgctggtggagacgccgctcgcttgctcgcccgcccgttcgcgcgcgccctcccacccctcgctccgcccgcctctcgctccgcccgcccggccggctgctcctccgcccgcgccgcccgcagctccgcccgccgcccaagccttggctaggcgcgcgcgcgcacggggtcgggcgctcccgggcggcggtggcaccacgtagccgcctccttccaccgctcgctttatccccgccccttctcgggccaaccccaagcgccgctgaccccgaacgtcgctgcggggtaggtagggggtgggagggtggaggaccgcaggcgagagggagaaggaagggcgcccggggagcaggctggcagagtgaccgggattgatgagcggcgcagctctggagggacgcgggcgagagggtcgctcctcggggagagggctgggtgagtgaggacctgcgagccacccccgacaccccttccagggtagccacactggcgccccctcctccacaacaggcttatgtggctagagaagatgcgatgccactggacagggaaggaaagtcgtcgtggacttcgctgaatggaaaagggggtagttggggaaggtggagaaaagagccacgggaagtgggaggaaaggatgaagggatgggacgttgaaaaggaaagcttcctgaatccctgtgtgactctaacccaacctccccacctaccggagaaatgggttttatcctagaaatggggacgaggaaaaagagatggctcaagggagtcctggcccgggatgcgatcctcgccctagggtctattgcaaccacacaaacccggacagcgcacgctcccccctaccccgacagaatagtgcctaagaaacctgcttgcctcctaactctaggaaggaatccacaacggattccagggaggtcttctggggaatctgaattgggtttttggatcacgaaccattaagcttttgaactctggggaagaatagaacaggtggctggaaattgttttagaaccctacctgagcaggtgtgctcattagttgcttatccgccctcctcctggagcactttcataggtgttggcaaagcaggtaccagtatttcacggaaggagaaggaagaaccgcccaggactgtgtataaatgtctatgggaatatttttaaggattcaaaaggctagaaggaggtgagatcaaaaaatttttccagcaccacccagtgcaacccgatcctggacacagaaatctaaaagatgatacttaaatacttgagtttgagagcctctagttataaggtttcctacgtaacaacctctcacttttctcaaaaactggctagttgacaaccggcagtcaagttttggctagtcaagaagctactttttcctgcaataaaccacatttagagatagtactgggcttcagcaggattgaggctatattgaggtcgcaagtatgaacgaggtacccacagagatgggagggccaggagatcctactcattcagtacctcagaagctatgacacgggataacagtagcttcagccctttggatgaaataatcctcactccctcaaaagtgctctctacccactcaaaacacaggccatactaccaccaatctggtagacttcaaaagtaaggtctttcagcagcagatttccttgttaacaggaaggtactgacaagctttacctaagcctattggagctatgttgtaattctgtatataaatagaacagtcgctgcaggaatactggatgagtcagaagaaaggtctgtcctaagctgatgtgacacatttcaaaaggaccagaaattagatgcaattgatgactgagttgatctctaagtggatttatctttgaaataaaaatcagtggatatcccatatacccgaccccacaccctcccccattgtcaacatccccaaccaaagtagcacatttgctacaaatagtgaacctacattgccagatcattatcacccaaagtccatagtttacattagggttcactcttggggctgtatattctatagggttggacaaatatagaataacatgaac

SEQ ID NO: 317493 - DNA, 4001 bp, Homo sapiens
ccaatttagactcaacaatgaagaatgggactagtgctatgaggtgactgacccaggcctgtagcataaatggagcatatcaccactagttatggcacctccttagggttctcccagatcaacatctcaggggaaaacacacaagatggtgtggctgcaggaagggaaattgctcaggttcaggtgagtaagaaagaagaagaatgaaagatacctctttggctgctaccaaatgagcttagccccaggagctcaggctgaatcagcctgttaggaggacccacaggaacctccgccagtgctagcaagtgggcagtgctacagtgtggcatcatcgggtgctgagacaaagatcaaaaggccgcctgaagccattccactgttggtattcagaagaaatttggtgtactctttgatctgctggttggctcttgtatcacagctacaatctctaagtttggcccccacatgcaaagacaaatgaaaatggagaaatacaggatgaaaggtttgagagtgctaggtcaggctgaatgtgtcccatggtgtgagcttaaatttttggcccccaagtaaaattcttcaaagagtaactctcctgccctctatccccagagatgcctttatcaggaaacacaaaggagggagacctactactatgtaaatggaggctacttggagaatgactatgtctgaggctgaccagtgtctgcagggttcagtcactttggagtaaaaactgagattagagaaataaagccagtaaaccacagtaagcaagtttattatacatcatcacgagttcaaaacaagtaggattttactaaaaatcattcataagaattaaaacttttcatattatccaagctcttttactatgaaagtttaatgaaaactacagaagaaatatcactaattatgctccctaagtaaaaaaaaaaacataattaagtttataaagagtcagtaataatgtttattctcggtatcataatttttggacacttctggcactctctcatgggtagataggttgtttagtaaaataaatagaaaacacacatttcctaccagctgacattgatggctaaatcacaaaatcaagcaggaaatgagtttgaaggcaagccatatttcacgtgacttacatttgcagattactgctgatggtctctccaggcttatagacttcagcctgaaaatcaggaagcaaagaataatagcaaagaagaaaaatttaaaatcattcagtagtgtaactcctctccccgctccaagtcatggaataagattcactcttacaacaaatacttcctaccatctaagtttagatgaacttttaaagaaaatccccaagtatagatcctatgagagaaactaatcactaaatcagtgaaatgccaaaacatctgaaatatgtatatgtattgatgtatttcaatacaaatgtgacattagggataaccatttgttctctcaaatttacgagatacagttatctttgccaaaaacggagagcatctcagttccctttctgttcccacctagttctcaacaggactaaaggacttatcctatgcctagtttttcactcccctcagagggtcaggtgaactggggagcaagaggaactggcgcctttccctacttctctttcaattcgtttattgaggtaagtggcgagggcctggactgaggaagcttgagaaagactgatggaggaagggctggctgtaggggtcagggaaggggctgcctgaagaacagcctgcctctccaaggagctgaggaagtccggtcccaacctcgcccctgccgtcacgaacctcggtgcactggcccagggaaacaactccagttttccgttccgccgaagtcagtcccccaccggcggcaggtgctgggcgttggcgctgccccctcctctctcagtgattccgaagcctggctccgccggagcggagacaggggacgccgagagcgtctccacggaaacagagaggcgaggcatgacggccgggggtggagttaggctaaaccgggcctcgggattggggcagctcccagactcttcgggcttgggggcggagtctggcgaggggtggagcttactgacggccgggcggggcccccagatagctgaggcttttcaagcagggctgctttcagaagttagctcgcttttaggcattttcacgtaacccaagaggctcgaatttgccactttcatttctttcgtggccttgcattctcaatgctttttcttcatttctcttttgtccacaggattgatgggaaaacgctgagctaggcattcatgatccccgtgacctgaagccaatttatccatctagctaagtcattcattctcctcttcctcagcctctcttgcagtcagaacccaccacaaatgccttttcctgtcatgtccccacagacaattcaattttgaattgtggttcgctaaatactcaaggtctctttcagagaatctccctgcatctgtccttatttgttttgcatttttacctgaaactcagggttttatatttacactaaataaatatcatcgtattaatctcggcccatcattccatctcttctctcagacatgagtgcaaggaagtgaaattccttgctcattccctcatatatatatggggcaagagagtgaggcttgccacttgttacttctaaaatacagaagtgctggaaagttaggctattgttccttgtctactgacacacattgtaggagaacgagccagcgatattgctcacacgaatcattctattaaccataaatcgattctatttagagtacaagcatatcaaccataaccacactttcattctaacatctcatttgctgtaacaaattactaaattatttccaagtatgtttacattatacattcaatgagcactgtgactatctgtaattgggctccaccccatcccccacaccagtaagactctcattctattctcatgagtttattttccagtttcagcatcaccttaacacactccactgtgacctgtgtgaattcttttccagtccttgctgctttttctgacttagagtctgtttgtgaattccatgcaccttcctttctcacaggaggctgtcttagttggctttctaggtagttccttcctgcttctttggacttacttctcctacttgctgttttttcactagaagttctttgactaactctctttctccttctgtttagcatagaattccttcagttagagaactttgtttgcaagtgacagaaaacacaaacgggcttaagcaaaaaaggaaactgatgaaaaccaaaggatgccagattcagctgcaactttatctagaaactcaggcctttctgaaagttttgaggattccagaatacctcttcctttcactacacagaattaatttctcctcctctcgcctcctttctcttagacctaccttgattttatcagtataactttgcatggtgtttggcttatgggaaccaaacttgcctgaaagattgtgagtaccttgaaagcagagactttgttttattgttttctgaattcccttgtaccgtatgcaaggattagtatacagtatgtgctcaaaaatattttttgaattaacagaatgacagaatagagtggtttttcaaacagattcttccttgtgtaattcttctcattgcttcctcaatcttctccacctagaattctagggggaaggtcaggtgacacaactgatagtttgaatgctattactgacataacaacctctaaagtttcctcttccagtcttgctctggagaaatgattttaggttaggtcagctccctaaagaagcaagagacaattttctaatggaagccaatccatcttaactgctccccataattgttctcaaagtgtttttgatatctcaatcatcaatttctacagtaaaattattctgaatcattcttgttttactaaacacatccccaagtaac

SEQ ID NO: 317494 - DNA, 4001 bp, Homo sapiens
ttaaaatcagacagtattttccttccttatctgcaaaataaggccctctgagtcttagaggtaaattaataagtatttccaaaactgcacatgggactgaatagtcttccaaagcaactcccaaaataaagttcttaaagcacctctcaggtttattgtttctttatattttgttgcaaggtgggcaaaaagggagtggcctgggctaaagttctagttctgatttcgtccagcatttgtggatcacagttggcagctttatatgtatacaaatatacacatacacacactccctttgagagcttatttatacatataaactcatttatatatgtgtgtatgtgtgtgtgtatatatatttaaggcaaaaggaagagcacttaaatcccgagtctggcaagtctcatgcttggccgcgtgtggtggctcatgcctgtaatcccagcactttgggaggctgaggcaaatcacttgaggtcaggagtttgagaccaacctggccaacatggtgaaaccctgtctctactacaaatagaaaaactagccaggcatggtggcatgcgcctgtagtcccagctactcgggaggctgaggcaggagaaccacttgaacccaggaggtggaggttgcagtgagctgagatcgtgccactgcactccagcctgggtgacagagcaagactctgtctaaaaaaaaaaaaaaagtctcatacttaaatcctgcgtctgacaaccatatgagtttctggcaagatttaaactttcaaaggcacaattttcttattggctagataagaataacaattttcaccttgccagtttgtagtgaagatttcagataatgaatataaaggaactggtatagaccatggcccatagtaggtgctcaataaatacctttataaagaaacaaacacattgcaattctgatatgacggctgccttcttatttagaagactattctgcttggtttttttttttattctaatttctttggatttataagcatcccccacagctctttcaaaccaaggatcttcacagataacagtgtctagggaatctttctctgttctcctaaaacaagcacttatttttaatgatggtcttatattctataaaaatattaaaataacatcttcatatgtagtattatatatgagggaaagagacatttgagccagtgttcacacttgaccatgttcacacttttaaccaggtagagactcgtgactttgactcttattttggcctttactcaggctctgactgcagataagaatcagttttgcctaaatttcaattgcttgggaaaggtcctcgataacggaagtctacatagaattgtgaataaatacccctgtgaaaataaaggttaagtctatatgtttacttgataaagcagataatttcagagtataaacacagttgtgttttgacttctcttccttttgccttaaatatagatatttatttgtgtgtgtgtgtatgtgtgtgtatttatatatatataaagttgcccactgtgatccaccactgctggagcaaatccagaactagaacttggtctcctggccttcagcccagagctcattacagtctcattctaaaaacaagtacttcatactgattgcatttctacacacacatatgcagatttctggacactctttctgtttttctttcatttatgttctcaatgctgaacctttattagaattacatcatcactgtggttctttaaataagaaacaaaactctgtcacaacatctgaggaaattatcttttaatgtccccaagctctatgccttggaaaaaaaaaacttcctctgctgttcaagaataacaggccccagaacaagccccaaaaataaatgacaaagcccatcttactcacaggaggaaaggatcatggtagccccttctgcggggagcacacaacagtcttcagttcttctgcggtgctctactcacaaaaacacatctttcaactgaaatcatagttcgctcaagatgtttctcacgggcagagttaaccccacctattttcctgttctgaaaacctcagaagagtataaatgacaaccaatggcatatataagaaagctcagtaatctccatcccaatctctgagggtatctgctattagtctctcatccccaaaggtgtgggtgactcgcaaacatcattttcaagaaatcacaaaattttggtaaaaggcacctttaaaattatcaaatcaaactgccctctctggactgggaaggaaatgaaggcacagacagaataagggacttgcccaaggccacaccgtgagtggcagaaacaattagattctaggctctggaatattgagtttagaatgttccatcctcccactcagcagacactttatttgggggaagtcaatctagtaataaccctaaaatgtgattgggggatggctgagaaatataaaaacaccaacaatacaaaacacacttgggagtttcacttcatcccactggaaagcataaccatgtgtcaactaattaacagagcaactttaatgaagacacagcatattctaatcgcccttccaatttcctggtttagattaaggtctccttagcattctgggtgatgactgttatttttacttcaccttttgcctttgttatgctttcgtataaaactttttttctaagtcttagtgaaaaatatttaaagatttttgaaggaaatgttgacaaatgttgccaggtgctatctatcttgttttcccataaaaagcatacactgaccattaggacagggactctatcttctcctcactctctttcataccacctagtacttcccgtagctcctcaaggtgaaaagggaagtatgggatgggaggagggaaggtcaggaaggaaggagaaaaggctgacagtgatagtaaggtagagtgtgccaggaccgactccttcaatgagctacaagtcagttaaaagttgtgcatggttagcaaccaaaatgcccatcaatgataggctggataaagaaaatgtggtacatatacaccgtggaatattatgcagctatacagaatgaaatcatgtcctttgcagggacatggatggaactggaagccgttatccttagcaaagtaatgcaggaacagaaaaccaaacaccacatgttctcacttataagtgggaactgaaccatgaaacacatggacacagggaggggaacaacacatactggggcctgttggggagggcagatgaggggagagcatcaggaaaaatagctaatgcatgccaggctaatatcaggaaatatatatatcaggctaatatcaggaaaaatagctaatgcatacctaggtgatgagtttttgataggtgcagcaaaccaccatggcacacgttcacctatgtaacaaaactgcacatcctgcacatgtaccctggaatgtaaaaaaaaagttgtgcctgtttttgtgatgggggtacagttaaacaggtagacaagaaggaatgtggcagattgtgataaggctcgggataagcagtttactttcttccattatgaggggcacaggaaaagaataaacacagccttcagtggatggactgcctggtgcacagactctagactgaccaggatgaaatgaaatggttctccagggtcagagtgaaggcgctgcccagagcagccagcctgtgtgttcacccaatgctccagagcagaccatcgtggcctgcagaggagacgcaactcctgaagggaaggcgctgtgtcttcctcggctagttaccccaccaacagcaagaataacgtgttgggcaataaacggtctctggatgactgatacagtttcttttcgctggcgctcacgtgaccgagatagtttcttttccttggcgctcacaaggcaaaaaggaaggccctaattccgttgatgtcttagtagagcttctaagggtgagaaatccacacacacagtcttgacagcagggtctcctga

SEQ ID NO: 317495 - DNA, 4001 bp, Homo sapiens
aaccagtctggagcatttggagctgaaccactgtgagagctgagatcaatatactggcagaagtggaggccattcctagttctgagaagctctagttgtcaattaaaagattctaaaaacaatgcgatggcatcaaattcaggcttggaatccaactttctagtcctagcattgataaataagccaaagaatttgtaaacaaaggtaattaaaatgttatcatttatctcaccaaacactggcacatatcaaatgataccagcttctagctaattaaacggatagctattaaaaaaactgattccaattaccaaggcaaatcagaagatagctgtgttctaagagatcacctacctaataaaaaacacacacatacacaatataccctgtttgggcattgtaacaaaatataaaaattaacaaaatttgtttcttttctttttttttgagacagggtctctctctgtcacccagactggagtgcagtggcacgatctcggctcactgcagcctcgatctctctagactcaagcgatcctctcatcttagcctcccgagtagctgggactacaggcgtgcatcacctacgcccagctaatttttttgtattttgtagagacgcggtttcgccatgttgcccaggctagtctaagaactcctgagctcaagcgacccgcctgcttcgacctcccaaagcgctgggattgcaagcgtttgagccactgcgcccggccaaagttttttattatctactttcctatcattttatccctagtacactttcacttgctgttttccttgcatggcgggggcaataggcctggtgggtaaatctgaataaaaacgagaacagctgcagtctaactagctctgccacttaatggcgtgactggcccttttcagaaagttgtgcctcactggaatgtttcaaaaatatgtaaaaataatatgatctataagacaatcaaaaacgcttcaaataaggcgcgggttatattacataatatccctccactctggcagtgttggcaatggcagacaacaccatgaaactgaaagcatcccttcagtctgaaactggcgaaaaggctacaggtttacaaagtctcacatcagctgaaaataatacatccatcaattctatctttggcatggtgtattctgacagtggtggatagaatgtaaccacttgctttattaattatgagatgattgaaagaggaactactaaccaagaaattggtaaaggcctagcacaaatattttccccctaattttacaggggcgggaaagacctgaagaacttcaaaaccaagtgggaaataagaatgggtaacttgtgtatttttttttcctggctttttttttttccttcttccgaagtcaacaaaggcctcagggtgtccagattgctactgattcattcttaccaagttccttctggtaatagttttcaaaagaggatctcagtggaggtgcacagtggcgctcctagctttctttttacggaaaggaggaaaggtgcttggcaccagtcggggaagctcacgccaagtgaccgagaccagaactcgctctcgaccggagccccccaagtctggtgacttggaggaaggaggatcccgaatcccagccagaactgagaaagccctcaaaggtgcggaaaggggacttttccctcaggaaagccggcaacagcagaggccctagcccacgtcgccacacccactccgcgcgcgcccctcgcctcccagggccggctctgctcggccccgcggcctctcgggcgcccccagcccgccggaaagaaagaagcagaaacccggagcctgggtcccacccgcgacccctcaccttcgcccttctcgtcctctcacctgccagtcccccaggaagaacaggacgcctcttccccctgatgggcggccacaggctcggatccttccattgccgcctgagacaccgccgccggctactggaaggtaggaaggggcgggaccgtgggggggtcaaggggcgggcggagacgtcatcagagggggcgggcctggggaagctaggagcccggcagcgccttcccgtcaaccctaggggcgtcctggtttccggtttgggtgtggccgcatggcgtgctgtggtgcaggtggccgaagggggcgttactgttgcgactggcatccgcatccggcagatgtagatggaaccaaagtccagaagttacgcgtcacccttgctctacagccaaacatgcaggactctagtaacccgcgaaatgatgggatagcgttgcaaatccttaaaagagtcttaacggtaagaagaggaaacagctttattttataaataaactgaaggctgctaatagctccagattgtcagtgaggggataccacttaaagatgttatacatttaataaataattttgggagtccactacatgtgaggcgctgcctcagatttaatagaatcatgtgacttttagtgccatagatgtcgttagatcatccagtttggtcccttaaatttgtgggtaagggaaaggaacttccggtcagtgcaagtgacttggtcaaggttatagagctagtcactgttagattaccagaacacatatctaaaaagttctcatataattctttttcatttacttccgtgtcacctttcttagaaagcaaaaatgagttggacacaataacattaggatttgtctttcactaaataacactgtatatttgaataaacatctgcaggatttttaaaattagcatatactttgggtattatgtaattttctgtgatgtatcatatttttaattagaaatttttcctctcatatggagatgagggtccaggcaaaactgtattatccttcgtgccctctattctcttcaaaattgcacatcttaaaatacctggaagctttatgttgctcacctatagcattatccgtgttcctcaatccagttgtgaaccttttccacattaaaatgttcttgatctgtgttctattctttcaaggctctgctctagcactaagataatgctacaggactgaagataatgaaaaagattgaagaaagcagaaacagaacaaaaatcagattatttcaaagtttctttccttgtaaaggttaaaacagagcatacttccttattatgcccactaggttaactagaatctcctgtttttttaaaaaaaactggctcattttttcaaaatccactttaattacatggtgcttagcacaagcaactccattctggtttgatctgatggggcctagtgtagaaggctaggccaaaacaatggcctgccattacccacgcttcttcatattttaacatccatgaatagaggatgaatttttaaaaaataaatacagaaaacgatgcatcttaaaattgagggcatgttagatttgataaaatatggtgtgaattatttcaggcatgtaacaagcaaccagatttaacagattttaatgttttgtcacatatgtaaaatgggaaagaaaactaggcgatcacagctttttgacagtgaggctttatgtcataagaaagtagaatgacatattgaggaaacttaagggaaaaatatgtaggccaaagattttacattcagcaaaactaatatacaaaaggtacaaactgttatcaacaattgatatatcaatttggtgagactagtgttttcatgagcccctccttaataattaattggagaaagtgtctgacaatcagaattattacagaaacattgatctaaggattgactcggtttctttacagcaaatcataatctgttgcatttattagcttttgtgtttcttgtagtttattctttattactaattctcctgagttctgtcacctcatttctgaggtttttctaattcagaatcaagttcttccatatcttttatcatttctctaatgtcatttagctagtttcaaaataataaattgttttgtagtgcatctttcaggcatgttttta

SEQ ID NO: 317496 - DNA, 4001 bp, Homo sapiens
aaatattaacgaggaatacagatatatcataatacttgaaatgtgggaccttcagacaagaataaattcgaaataggtacgtaacacaagcataccatactgacatcaatggctacttgaccccatatttctagaagaggtgcctaaaccgaagagcattccagttcagagctgtccactcactaaaattgttggatgtggaatgtttgaaagttgcctcatgtgattttaacattaacagctgaaaaaccaaaccacatgcacacgtcaaagtttctgtaagttgaatcaataatgttcacataaacactggtttttccaatatgccaagtttttatgttgtgtctatattacataaatcttcaaaatatttacaaaaggagacaacctggttaactaagagtactaaactagaaatcaaagttcttaaacaaaaacgatttttaaaaattataaattgtgatattaaaatagcagtaataactaggagtgtcatgtgccaagagcctgttcaaatttgcacattaatccatttaatcgtcaaaacaaatctaggaacttaaaatttgttttgttcactgctgccaccccaatgtctaaaacagtgcctggtacatattaggcacacagtcatttattgttcatattacaacagatacccttcttatagaggcacataaacttgcccagagctagaattctaactggagcatttctgctccaatgtttacactcttaaccactgttatattgtctctctaaagcttttaaatcatttaagtggtgtcacagcagctgggtatgacctgtaagagaaaaaaaatcagaggccttcctttaacgtgttctgttccacatgcacaaaaagctatggatctggtactattccacattttagtggcctgaactaattccaacagaaaagatttttatttgtactgaatgttatgctctttgtgtaaaccacactgtaacatacaactaggcttctccaatatgttcctggcctttaaagtggtcacaaaaagaggtaattatttcaaaataatttttactttaatccttaactcctaaaaagcgtttcttcctcttttctttcatttcacaaagatttaaatttgtatttcgcataacccaaaatgacgatgttatgaaggcccaaaacaaaattcacgatttcatatcaatacatactaagagtgaagatttaaaccttcctctttcatgaaacaccaatcttgccaaataaactccagtcataattaaatacaggcaaatgtagtatcaggtctattttagtaaaggcaaattcttgccattcctctcagaactctttttaaaaaagtaatctattaaaaccaaagtttctaacactcaccgacactccacaatttttctagtaaggctgaatttattccatgacatttttttcaagttagctgtaaacactccaccctcttcgattgtgcaacaaccaaacacatcacacaaatacaagtcacaaaaaagggaaatacagtttaagagtttgaatttaggtaagttttgagcagaggatcttagagcagtgcacaacgcgatataaaagttaacatttaacaaatcatattaattcacattattacgaaaggagatgccggaaagagcctgaaccagttaaagcagccgccatcttaaaatgcgggatagaagttagagcaagaaaatgagactaaaccaccggaggtggaggttccgctcactcccagagctccgaaaaatcctagttttttttcaacttaaatcgataatatactatcaaaccacatttcaagtaacgaaacaagggtgttattaaatagaatgaggcaaaaataggtacattagctttcccttactgccatcgcaccccttatccacccccactctccagccaaaaggaaaagggagcttccagaatgccttttacatcagttcccggtgtccctcggataaatagcttcgggtgaaaagctgcaactacaaaatacaggaagtggcaacactgtgtcattccatctcctcccaaacccacttattcggtgtaacctgcccagagtcgactaagagtttctactagactcactgactgaccttcaatacgcaagacttcttctacccgaccctcagtcaagttcgggactcgccagattttttttctctcctccgagttttctttcttacccctagaaggcctagataaccttgatctcacaactaaactaagttttcaagcaccaagaataggaagcgccatgacatctgctggagcgtctctccgcaattcggacccccaaaaaaactccttcttaagcagcaaaaaaataaaataataaaggcgccttaagtcactctcctccacccctaatttgcaccgattccactgaagcactcaggataacacctcacttgccacaagtgttctccgtttcctagctttaaacttcatttcttcaagaagtatatctgcgttctccatccccccatggaagaagtgatccaagaggtattttcagaattatgcttccttcccacccccacgctttcctcttggcccgagccttccttttctcctaccaccccatgcccttgtccccgcgggttaccttattaatccgtttcagcgccatagtgtgtgcttgtcgtctggctcctcactctctcggtgtatgctcaaaggtccggccaaaactcttgattatcccggcggcggggcaggattgtctcgtctcacaccagctctgccagacacaggcgccttttgcaaaaacggagcagatcagcactcgcacaggccccgaagagcccctgatgaatccaggtcccttaagacagccgcgatccggggtgggtggggtggcgtggcaaagccaccaacagcctctgtaccgtgctttcggcccgaagtgggggcgagggtgacgggaagagcggaggtggtggctacaagtttaacttcccggcctctagaaaggaagagacccgggtgggagaggaagaggcgtaggagaaaggggtgggtgcggggcagggtccggagcccagcagaggaggagccggggcctagtcggcgctataccggcgtcactagggcaaagaaaggcaaggggggagggggaagcataagactccggacggacgccgggctgctttcggtttctgtccaaaggtgcggccgggaaaaggaaggaaataaaggaagggagacttgatgtgtattgctatcctcgcagcgagctattctgtgtcacccctgacgccaccgtacactcactccgccttccagcgcgctcccgcgcgcgcccgcccagccacctccaccacgcgcccgcgctgtccctgaggctccggcttaggcgcgaggacgcgcccattccccctcctcctccagcaggagaggccgcggcttccccaaccttcccaccctaacccaccgcacccaataggctggccgctcaagccgcccaggtcccgcactgcccctcttacccggccggccactgggccggcctcccttccctgccctagccgtccacacccacgcgtacagaggggccggggcctccctcaagctgcggcctcggcctcctccccgcgcggcagctggtgcctccccggccctacggggctcacgcgcacgacacagccacaagatgtccgctctgacggaactactgccagctgccacgctccgcccctccccctcctcctgcctcttcaccgccgcggatcagtccgccaacgccgccgtcccgagcacaagaccgatgtgaggccgaagccagacggcttgcttcccacgtccggggccgagtgaatacgtgtcaagcccttttccttcttctcggaacagcaccttcttactaaacagatcggagattggaccaggagggcgggggagggaggaggatcatgagctggggggagggtgaacgagtggcggaaacccttaggctcagagaagcatcgagaaccggaaggag

SEQ ID NO: 317497 - DNA, 4001 bp, Homo sapiens
tttctactagactcactgactgaccttcaatacgcaagacttcttctacccgaccctcagtcaagttcgggactcgccagattttttttctctcctccgagttttctttcttacccctagaaggcctagataaccttgatctcacaactaaactaagttttcaagcaccaagaataggaagcgccatgacatctgctggagcgtctctccgcaattcggacccccaaaaaaactccttcttaagcagcaaaaaaataaaataataaaggcgccttaagtcactctcctccacccctaatttgcaccgattccactgaagcactcaggataacacctcacttgccacaagtgttctccgtttcctagctttaaacttcatttcttcaagaagtatatctgcgttctccatccccccatggaagaagtgatccaagaggtattttcagaattatgcttccttcccacccccacgctttcctcttggcccgagccttccttttctcctaccaccccatgcccttgtccccgcgggttaccttattaatccgtttcagcgccatagtgtgtgcttgtcgtctggctcctcactctctcggtgtatgctcaaaggtccggccaaaactcttgattatcccggcggcggggcaggattgtctcgtctcacaccagctctgccagacacaggcgccttttgcaaaaacggagcagatcagcactcgcacaggccccgaagagcccctgatgaatccaggtcccttaagacagccgcgatccggggtgggtggggtggcgtggcaaagccaccaacagcctctgtaccgtgctttcggcccgaagtgggggcgagggtgacgggaagagcggaggtggtggctacaagtttaacttcccggcctctagaaaggaagagacccgggtgggagaggaagaggcgtaggagaaaggggtgggtgcggggcagggtccggagcccagcagaggaggagccggggcctagtcggcgctataccggcgtcactagggcaaagaaaggcaaggggggagggggaagcataagactccggacggacgccgggctgctttcggtttctgtccaaaggtgcggccgggaaaaggaaggaaataaaggaagggagacttgatgtgtattgctatcctcgcagcgagctattctgtgtcacccctgacgccaccgtacactcactccgccttccagcgcgctcccgcgcgcgcccgcccagccacctccaccacgcgcccgcgctgtccctgaggctccggcttaggcgcgaggacgcgcccattccccctcctcctccagcaggagaggccgcggcttccccaaccttcccaccctaacccaccgcacccaataggctggccgctcaagccgcccaggtcccgcactgcccctcttacccggccggccactgggccggcctcccttccctgccctagccgtccacacccacgcgtacagaggggccggggcctccctcaagctgcggcctcggcctcctccccgcgcggcagctggtgcctccccggccctacggggctcacgcgcacgacacagccacaagatgtccgctctgacggaactactgccagctgccacgctccgcccctccccctcctcctgcctcttcaccgccgcggatcagtccgccaacgccgccgtcccgagcacaagaccgatgtgaggccgaagccagacggcttgcttcccacgtccggggccgagtgaatacgtgtcaagcccttttccttcttctcggaacagcaccttcttactaaacagatcggagattggaccaggagggcgggggagggaggaggatcatgagctggggggagggtgaacgagtggcggaaacccttaggctcagagaagcatcgagaaccggaaggagaccatgggaggaaggtaaaggaagcagccgctgcgcgatccagccccacgcccctccccacagcgtcccccagtttcctcacttggtatcgaggagacgactctcgcgagaacttcgtggctggctaaccgaagcggtagctctgcaatgacttaagagcagttttgtgcgcttttcctgacggggttccgcctccaaaatgcataagttctcgcgagacgcagtaaggcaccggctcgaactggggcgggccactgccaggaaagcaacgcccctgaatgcttatgccggtggttggtagaggaaatggaattccccagactggtaagagcgcgcgcagacacagccttgtctcacgcgcccaatcaggagcgtgtggtgggaggtgccaaggattaattaccagatacctttagtctagctcgggccgggattttgaggtttccggtggagcaggtgagcagtatttactcgcctgccctcctgggctggttatgctgtgggaggaggcgcccctcgagatgggaatagtagttttaaatagacccaggttggccgctcatcagcgctcccacgtgctgaagtctagtgcacgtctgaccctaagggagcaatactgagaacagcagggagcaggctgagtcaagctcaattgagtggatggggctaggacagagagagttaggggcagggttttcactggtctccgtaatcagtcgctgccgtccgccaaggtgtagatgtgggaacaagcttaaattctcaaactttagcttctgttgctgtgtttcagttcttgagccagaaagtgttgagactaattagttaattaggtagagtttagagtcagaaaaacaatacaatacttcctgaaatatccaagttgggaggtgggatttacctcagtaggattggcctgttttagtcaagggtttaaagtatggagacggcagttatgctctctagtgtatccttcaggcaaaagaaagaccttaatttttatgaggaatttaaaagtgggtaagcactgaccagcttaaggttttttaacattccttaatgaccccagttaccgaagtggagatcttcaattacttggaaaaataaacttgttttaaaaatacacttaatttgaaaactgttgcagaaagttttacctaataaaaacttaacacgtcaacaatgatgaatataagtagtctaatgtatactgttcaagtgaccatgtagtgtcactagtgaagcagtgcttctcaaactagtgtccataggaaccacctggggttttgttgaaaatgcgactttgatttggtagggcagtggtggagcctgagagcctacatttctaactagctcccaggtgatacagatttttctcgtctgaaccaccccgtgagtagcaaagcactgaagtgcttacctcatggcctaactgctcatgaggctcacctcagtaacacctctggcccctccctcctccctgaataatctgtgttctctctcatagctagccagatatactaaaagcacaggactaggcatgaagatggagggaggaacccagattagttattgcttcccatttgcttgatattggcctggttagttatcttctaaccccgtttcttcaccgctaaagtaagtaataatgactgtcctttctcacagggtgattgtgtggttaaagtgtcataatatatgtgaaaggacactggagactctacagtgctgtataaatgtcagttattaaagtaaccagtcagacattaactggccatagtgtgaaacaaatgtatagtagtaatagtggccacgcctgtaatcccagcactttgggaggctgagacgggtggatcatatgagatcaggagttcgagaccagcctggccaaaacagtgaaaccccatctctactaaaaatacaaaaaattagctgggcgtagtggcgggcgcctgtaatcccagctgcttgggaggctgaggccggagaatcgcttgagcctggaaggcggaggttgcggtgggccaagatcactgcgacagagtgagaccctgtctcaaaaaaaaacaagaacaaaaaacaaaacta

SEQ ID NO: 317498 - DNA, 4001 bp, Homo sapiens
tagagcaagaaaatgagactaaaccaccggaggtggaggttccgctcactcccagagctccgaaaaatcctagttttttttcaacttaaatcgataatatactatcaaaccacatttcaagtaacgaaacaagggtgttattaaatagaatgaggcaaaaataggtacattagctttcccttactgccatcgcaccccttatccacccccactctccagccaaaaggaaaagggagcttccagaatgccttttacatcagttcccggtgtccctcggataaatagcttcgggtgaaaagctgcaactacaaaatacaggaagtggcaacactgtgtcattccatctcctcccaaacccacttattcggtgtaacctgcccagagtcgactaagagtttctactagactcactgactgaccttcaatacgcaagacttcttctacccgaccctcagtcaagttcgggactcgccagattttttttctctcctccgagttttctttcttacccctagaaggcctagataaccttgatctcacaactaaactaagttttcaagcaccaagaataggaagcgccatgacatctgctggagcgtctctccgcaattcggacccccaaaaaaactccttcttaagcagcaaaaaaataaaataataaaggcgccttaagtcactctcctccacccctaatttgcaccgattccactgaagcactcaggataacacctcacttgccacaagtgttctccgtttcctagctttaaacttcatttcttcaagaagtatatctgcgttctccatccccccatggaagaagtgatccaagaggtattttcagaattatgcttccttcccacccccacgctttcctcttggcccgagccttccttttctcctaccaccccatgcccttgtccccgcgggttaccttattaatccgtttcagcgccatagtgtgtgcttgtcgtctggctcctcactctctcggtgtatgctcaaaggtccggccaaaactcttgattatcccggcggcggggcaggattgtctcgtctcacaccagctctgccagacacaggcgccttttgcaaaaacggagcagatcagcactcgcacaggccccgaagagcccctgatgaatccaggtcccttaagacagccgcgatccggggtgggtggggtggcgtggcaaagccaccaacagcctctgtaccgtgctttcggcccgaagtgggggcgagggtgacgggaagagcggaggtggtggctacaagtttaacttcccggcctctagaaaggaagagacccgggtgggagaggaagaggcgtaggagaaaggggtgggtgcggggcagggtccggagcccagcagaggaggagccggggcctagtcggcgctataccggcgtcactagggcaaagaaaggcaaggggggagggggaagcataagactccggacggacgccgggctgctttcggtttctgtccaaaggtgcggccgggaaaaggaaggaaataaaggaagggagacttgatgtgtattgctatcctcgcagcgagctattctgtgtcacccctgacgccaccgtacactcactccgccttccagcgcgctcccgcgcgcgcccgcccagccacctccaccacgcgcccgcgctgtccctgaggctccggcttaggcgcgaggacgcgcccattccccctcctcctccagcaggagaggccgcggcttccccaaccttcccaccctaacccaccgcacccaataggctggccgctcaagccgcccaggtcccgcactgcccctcttacccggccggccactgggccggcctcccttccctgccctagccgtccacacccacgcgtacagaggggccggggcctccctcaagctgcggcctcggcctcctccccgcgcggcagctggtgcctccccggccctacggggctcacgcgcacgacacagccacaagatgtccgctctgacggaactactgccagctgccacgctccgcccctccccctcctcctgcctcttcaccgccgcggatcagtccgccaacgccgccgtcccgagcacaagaccgatgtgaggccgaagccagacggcttgcttcccacgtccggggccgagtgaatacgtgtcaagcccttttccttcttctcggaacagcaccttcttactaaacagatcggagattggaccaggagggcgggggagggaggaggatcatgagctggggggagggtgaacgagtggcggaaacccttaggctcagagaagcatcgagaaccggaaggagaccatgggaggaaggtaaaggaagcagccgctgcgcgatccagccccacgcccctccccacagcgtcccccagtttcctcacttggtatcgaggagacgactctcgcgagaacttcgtggctggctaaccgaagcggtagctctgcaatgacttaagagcagttttgtgcgcttttcctgacggggttccgcctccaaaatgcataagttctcgcgagacgcagtaaggcaccggctcgaactggggcgggccactgccaggaaagcaacgcccctgaatgcttatgccggtggttggtagaggaaatggaattccccagactggtaagagcgcgcgcagacacagccttgtctcacgcgcccaatcaggagcgtgtggtgggaggtgccaaggattaattaccagatacctttagtctagctcgggccgggattttgaggtttccggtggagcaggtgagcagtatttactcgcctgccctcctgggctggttatgctgtgggaggaggcgcccctcgagatgggaatagtagttttaaatagacccaggttggccgctcatcagcgctcccacgtgctgaagtctagtgcacgtctgaccctaagggagcaatactgagaacagcagggagcaggctgagtcaagctcaattgagtggatggggctaggacagagagagttaggggcagggttttcactggtctccgtaatcagtcgctgccgtccgccaaggtgtagatgtgggaacaagcttaaattctcaaactttagcttctgttgctgtgtttcagttcttgagccagaaagtgttgagactaattagttaattaggtagagtttagagtcagaaaaacaatacaatacttcctgaaatatccaagttgggaggtgggatttacctcagtaggattggcctgttttagtcaagggtttaaagtatggagacggcagttatgctctctagtgtatccttcaggcaaaagaaagaccttaatttttatgaggaatttaaaagtgggtaagcactgaccagcttaaggttttttaacattccttaatgaccccagttaccgaagtggagatcttcaattacttggaaaaataaacttgttttaaaaatacacttaatttgaaaactgttgcagaaagttttacctaataaaaacttaacacgtcaacaatgatgaatataagtagtctaatgtatactgttcaagtgaccatgtagtgtcactagtgaagcagtgcttctcaaactagtgtccataggaaccacctggggttttgttgaaaatgcgactttgatttggtagggcagtggtggagcctgagagcctacatttctaactagctcccaggtgatacagatttttctcgtctgaaccaccccgtgagtagcaaagcactgaagtgcttacctcatggcctaactgctcatgaggctcacctcagtaacacctctggcccctccctcctccctgaataatctgtgttctctctcatagctagccagatatactaaaagcacaggactaggcatgaagatggagggaggaacccagattagttattgcttcccatttgcttgatattggcctggttagttatcttctaaccccgtttcttcaccgctaaagtaagtaataatgactgtcctttctcacagggtgattgtgtggttaaagtgtcat

SEQ ID NO: 317499 - DNA, 4001 bp, Homo sapiens
ctccttcttaagcagcaaaaaaataaaataataaaggcgccttaagtcactctcctccacccctaatttgcaccgattccactgaagcactcaggataacacctcacttgccacaagtgttctccgtttcctagctttaaacttcatttcttcaagaagtatatctgcgttctccatccccccatggaagaagtgatccaagaggtattttcagaattatgcttccttcccacccccacgctttcctcttggcccgagccttccttttctcctaccaccccatgcccttgtccccgcgggttaccttattaatccgtttcagcgccatagtgtgtgcttgtcgtctggctcctcactctctcggtgtatgctcaaaggtccggccaaaactcttgattatcccggcggcggggcaggattgtctcgtctcacaccagctctgccagacacaggcgccttttgcaaaaacggagcagatcagcactcgcacaggccccgaagagcccctgatgaatccaggtcccttaagacagccgcgatccggggtgggtggggtggcgtggcaaagccaccaacagcctctgtaccgtgctttcggcccgaagtgggggcgagggtgacgggaagagcggaggtggtggctacaagtttaacttcccggcctctagaaaggaagagacccgggtgggagaggaagaggcgtaggagaaaggggtgggtgcggggcagggtccggagcccagcagaggaggagccggggcctagtcggcgctataccggcgtcactagggcaaagaaaggcaaggggggagggggaagcataagactccggacggacgccgggctgctttcggtttctgtccaaaggtgcggccgggaaaaggaaggaaataaaggaagggagacttgatgtgtattgctatcctcgcagcgagctattctgtgtcacccctgacgccaccgtacactcactccgccttccagcgcgctcccgcgcgcgcccgcccagccacctccaccacgcgcccgcgctgtccctgaggctccggcttaggcgcgaggacgcgcccattccccctcctcctccagcaggagaggccgcggcttccccaaccttcccaccctaacccaccgcacccaataggctggccgctcaagccgcccaggtcccgcactgcccctcttacccggccggccactgggccggcctcccttccctgccctagccgtccacacccacgcgtacagaggggccggggcctccctcaagctgcggcctcggcctcctccccgcgcggcagctggtgcctccccggccctacggggctcacgcgcacgacacagccacaagatgtccgctctgacggaactactgccagctgccacgctccgcccctccccctcctcctgcctcttcaccgccgcggatcagtccgccaacgccgccgtcccgagcacaagaccgatgtgaggccgaagccagacggcttgcttcccacgtccggggccgagtgaatacgtgtcaagcccttttccttcttctcggaacagcaccttcttactaaacagatcggagattggaccaggagggcgggggagggaggaggatcatgagctggggggagggtgaacgagtggcggaaacccttaggctcagagaagcatcgagaaccggaaggagaccatgggaggaaggtaaaggaagcagccgctgcgcgatccagccccacgcccctccccacagcgtcccccagtttcctcacttggtatcgaggagacgactctcgcgagaacttcgtggctggctaaccgaagcggtagctctgcaatgacttaagagcagttttgtgcgcttttcctgacggggttccgcctccaaaatgcataagttctcgcgagacgcagtaaggcaccggctcgaactggggcgggccactgccaggaaagcaacgcccctgaatgcttatgccggtggttggtagaggaaatggaattccccagactggtaagagcgcgcgcagacacagccttgtctcacgcgcccaatcaggagcgtgtggtgggaggtgccaaggattaattaccagatacctttagtctagctcgggccgggattttgaggtttccggtggagcaggtgagcagtatttactcgcctgccctcctgggctggttatgctgtgggaggaggcgcccctcgagatgggaatagtagttttaaatagacccaggttggccgctcatcagcgctcccacgtgctgaagtctagtgcacgtctgaccctaagggagcaatactgagaacagcagggagcaggctgagtcaagctcaattgagtggatggggctaggacagagagagttaggggcagggttttcactggtctccgtaatcagtcgctgccgtccgccaaggtgtagatgtgggaacaagcttaaattctcaaactttagcttctgttgctgtgtttcagttcttgagccagaaagtgttgagactaattagttaattaggtagagtttagagtcagaaaaacaatacaatacttcctgaaatatccaagttgggaggtgggatttacctcagtaggattggcctgttttagtcaagggtttaaagtatggagacggcagttatgctctctagtgtatccttcaggcaaaagaaagaccttaatttttatgaggaatttaaaagtgggtaagcactgaccagcttaaggttttttaacattccttaatgaccccagttaccgaagtggagatcttcaattacttggaaaaataaacttgttttaaaaatacacttaatttgaaaactgttgcagaaagttttacctaataaaaacttaacacgtcaacaatgatgaatataagtagtctaatgtatactgttcaagtgaccatgtagtgtcactagtgaagcagtgcttctcaaactagtgtccataggaaccacctggggttttgttgaaaatgcgactttgatttggtagggcagtggtggagcctgagagcctacatttctaactagctcccaggtgatacagatttttctcgtctgaaccaccccgtgagtagcaaagcactgaagtgcttacctcatggcctaactgctcatgaggctcacctcagtaacacctctggcccctccctcctccctgaataatctgtgttctctctcatagctagccagatatactaaaagcacaggactaggcatgaagatggagggaggaacccagattagttattgcttcccatttgcttgatattggcctggttagttatcttctaaccccgtttcttcaccgctaaagtaagtaataatgactgtcctttctcacagggtgattgtgtggttaaagtgtcataatatatgtgaaaggacactggagactctacagtgctgtataaatgtcagttattaaagtaaccagtcagacattaactggccatagtgtgaaacaaatgtatagtagtaatagtggccacgcctgtaatcccagcactttgggaggctgagacgggtggatcatatgagatcaggagttcgagaccagcctggccaaaacagtgaaaccccatctctactaaaaatacaaaaaattagctgggcgtagtggcgggcgcctgtaatcccagctgcttgggaggctgaggccggagaatcgcttgagcctggaaggcggaggttgcggtgggccaagatcactgcgacagagtgagaccctgtctcaaaaaaaaacaagaacaaaaaacaaaactaatatatatggagttctagattatccatgcttataaaggcaagtgattgtgtaatcacaaactcattattgttaggcagtgaagtaaattcattggttgattgggctttctgtttacaagtttgtatttgcataagtggacttacatttctgcttatattttgccatggttaaaatcaaaagaaacatagcctagaagcattttgatgccttaggataaagcaggctaagatt

SEQ ID NO: 317500 - DNA, 4001 bp, Homo sapiens
cacagagattaaagataacagttaacagaatagtccagaggacaaggatattcaagttccatcatcttcaggataaaaaagctccagggtttacctccaaactctctctaaaggaaatcccatcaaccttttaaacatcactttgtatacaccatcttctatactgccctagctcaaaaacatgaacctgtatctaaacgtgtttgtagaatttccattgtaagttttactttaacaattttgaacaattataatgatagaaaattatttaatctagattttggtcaactctattactgatattcttttttagtgaaggacaatcacaaacactaaatttatacagtccagagaatgaaagattgctttaaaaaattccttccttttctcactgtaaaataaaaataccaaggggaaaaatggaaagtatttattataactggctgttacactgtcatacacaatgaaatactggaccattagcagttcgttattatatgttgttaagtgtagaactgtaaataatgaggcatattattaagatatcacacacattatccaatcagcaagtgcacaacttcggacattttgacttcagccaaaatatgaaacaaagtcatagcaagaaagttatttcaagggagtgaaattttctcctcttacccttcaaatcttttagagatattaataaaaacaactatccagcctgggcgatataatgggactccatctacatacacacaaaaatttttaaaattcgttgggtgtggcagcacacgcctgtaaacccagctacttggaaggctgaggcagaaggatcccttaagccggagttagagtctgcggtgagctatgatctgaccactgcactacagcctgggcgatagagcgaaaccttgtaacaacaacaacaacaacaaaattaaaaccttcaagatcaagcttgcccaacaggatggctttgaatgccactcaatgcaaatctgtaaactttcttaaaactttatgaaaaaaaatttttttttagctcattagctaccattagtgttagtgtatttatgtgtggcccaagacaattcttcttccagtgtggcctagggaagccataaggaccccctgcgctagacttcagcagaagccttgtaacataaagaaaaccatacataaggctttagattcttttttttttttttttttgtgacggagtcttgctctgtctcccaggctagagtgcagtggcacattctcggctcactgcaacctccgcctccctggttcaagcgattctcctgcctcagtctcccgagtagctgggacaggcacctgccaccgcgcccggctaatttttctatttttagtagagacggggtttcaccatcttgacctggctggcctcgaactcctgacctcgtgatccacccgcctcggcctccctaagtgctgggattacagacgtgagccaccgcgcccggccagctttggattcttttaccactttcccgaaggaaaaggaactgaaaatatctaaggaaggactactacgaatcttctctgagtggcaaaaaccagaggtttttggagctagggctgcagttaagttgccaaggggcagagatgtaaacagttcctggtttagttaaaatattttaatttttatttttttaagcctggcctttgggtgaaggagtaaaattaggcactggggtctgggtagggggaggatactcatgggcgagtatgcaaccctagggccacagcacccaaactgtaggggaagaggcggggcgagaggggacgaagtagagacagcaagagactcacttttgaaaggcactttcggttagaaagcattctcacatgcttatctcatcgcacacagtatcctttctgctggtctccagcatctacagacgttaaaggcccaagaggagggccaccttcacacgagattccgaggagggcctcgctacccgccagttcccgcgcctcggcagtccgccgcgagcgtacgtcactcgcccgccgccaatcggcgcccggcaggtcacctctcctcccagggcccgccgccccgcccgccgcccaggccgaggccgccagtgcccgccggccgcttccgctcccggcgcaggcgcggcagcttggccagagcggagggggctcgggagaggagtggacgccgctggccaggatggtgctggagagcgtggcccgtatcgtgaaggtgcagctccctgcatatctgaagcggctcccagtccctgaaagcattaccgggttcgctaggctcacaggtaatcctcccccatcagccagtccccatccttgcacgttcgccaagcgggggaaggaggcgtaaaaatcctagggccaaggggcgggacggagctcggcgcctggcacgtgatccccgcgcgcagaggaaggtgggcgcgcgccgacgcagctgcctggggaacgcctgtgaggcagtctccgggtgcttgatgccccagggtcttttgtcctcggagttgtctccggtgtcattccgtggcaagataccaggtttttgcagagaaggtgctgagttgggaacaggccagtctctttcatctcctgtcctgctcatcgctctctgtagcgtacttgtttattttaaagcgggctaagtcgtcgttatctaaggcctcatgtaacaggcagccccagctaccggctgggttgtaccctcagcatgtgggtgggagtgtgtgggagagaaatatagacttacacgtaacacgtatatgaccgttttatttagtaacgaaattaggagataacctccattccctcaggttagaattgacctatcataggtggcatttgaggtcatctccgtttctacggtcccggggcccgctgcggtaacttaagttggaagaaagataccttacccaagaaagtattcgaaggccggtatgaggagtgaaatcttagaaaatgaaatttagtgaatatatgtaacgttctatacttaaggaccctcacttaacccacacaactcatgaggatttcacatctaaaggatgaaaatctccagaatgcagtcaacacttgggagattgtgttgagttatgagcatttcattgtaagggggatatttctaaacggaactcagaccgagtaggatggtgaaggaatcagcaagtattgaactcctatgtcctaggttatcagggagtgcaaacatgaattaagataattctgaggtaaatagggttgcttcgccgggaacgttctaaagatctgtagtacctgacctaaaatacagcaatcgcacagctgtctggtagaagaaaaataagatttgtgtagactaaaatatagaactgataacaaattaaccaaattagtgaaggttattgggaggtgaatttcagtctaaggaagatttttttttaaattaaagaatgctttccccaaacaaatgtggtgcttcagtgatagcccctctcaaagatgaaaaaaacaaacaaaaagactctggtggtgggtggtcgatagatttagaagggataaactagatgacaaattctcttccaaatctagagattcattgaattatggtcagacagacgctctgttgagtggattgtgagattttaatattttttaaatattaagagttttagtagaaaacatgcaattgaatagaaagcatggtaacaataataaacattaaaaaggaacattaaacatcagaagcaatgcaaaagtaaaataaaatgaaaaacgtttcacatcaagtgtttataaacatcagatcttttgatcctaccagtttactctgacagaattgcagcaattccataaaattttggctttccccacttcttttacttaagtactttacatattttaatataatcctcattttttccctaacaactaaatacttattttagttttaacatcacaatgggcctaaccattcattcccttacaactggaaattagaaatgtttctattttttaaa

SEQ ID NO: 317501 - DNA, 4001 bp, Homo sapiens
ctcagaactctttttaaaaaagtaatctattaaaaccaaagtttctaacactcaccgacactccacaatttttctagtaaggctgaatttattccatgacatttttttcaagttagctgtaaacactccaccctcttcgattgtgcaacaaccaaacacatcacacaaatacaagtcacaaaaaagggaaatacagtttaagagtttgaatttaggtaagttttgagcagaggatcttagagcagtgcacaacgcgatataaaagttaacatttaacaaatcatattaattcacattattacgaaaggagatgccggaaagagcctgaaccagttaaagcagccgccatcttaaaatgcgggatagaagttagagcaagaaaatgagactaaaccaccggaggtggaggttccgctcactcccagagctccgaaaaatcctagttttttttcaacttaaatcgataatatactatcaaaccacatttcaagtaacgaaacaagggtgttattaaatagaatgaggcaaaaataggtacattagctttcccttactgccatcgcaccccttatccacccccactctccagccaaaaggaaaagggagcttccagaatgccttttacatcagttcccggtgtccctcggataaatagcttcgggtgaaaagctgcaactacaaaatacaggaagtggcaacactgtgtcattccatctcctcccaaacccacttattcggtgtaacctgcccagagtcgactaagagtttctactagactcactgactgaccttcaatacgcaagacttcttctacccgaccctcagtcaagttcgggactcgccagattttttttctctcctccgagttttctttcttacccctagaaggcctagataaccttgatctcacaactaaactaagttttcaagcaccaagaataggaagcgccatgacatctgctggagcgtctctccgcaattcggacccccaaaaaaactccttcttaagcagcaaaaaaataaaataataaaggcgccttaagtcactctcctccacccctaatttgcaccgattccactgaagcactcaggataacacctcacttgccacaagtgttctccgtttcctagctttaaacttcatttcttcaagaagtatatctgcgttctccatccccccatggaagaagtgatccaagaggtattttcagaattatgcttccttcccacccccacgctttcctcttggcccgagccttccttttctcctaccaccccatgcccttgtccccgcgggttaccttattaatccgtttcagcgccatagtgtgtgcttgtcgtctggctcctcactctctcggtgtatgctcaaaggtccggccaaaactcttgattatcccggcggcggggcaggattgtctcgtctcacaccagctctgccagacacaggcgccttttgcaaaaacggagcagatcagcactcgcacaggccccgaagagcccctgatgaatccaggtcccttaagacagccgcgatccggggtgggtggggtggcgtggcaaagccaccaacagcctctgtaccgtgctttcggcccgaagtgggggcgagggtgacgggaagagcggaggtggtggctacaagtttaacttcccggcctctagaaaggaagagacccgggtgggagaggaagaggcgtaggagaaaggggtgggtgcggggcagggtccggagcccagcagaggaggagccggggcctagtcggcgctataccggcgtcactagggcaaagaaaggcaaggggggagggggaagcataagactccggacggacgccgggctgctttcggtttctgtccaaaggtgcggccgggaaaaggaaggaaataaaggaagggagacttgatgtgtattgctatcctcgcagcgagctattctgtgtcacccctgacgccaccgtacactcactccgccttccagcgcgctcccgcgcgcgcccgcccagccacctccaccacgcgcccgcgctgtccctgaggctccggcttaggcgcgaggacgcgcccattccccctcctcctccagcaggagaggccgcggcttccccaaccttcccaccctaacccaccgcacccaataggctggccgctcaagccgcccaggtcccgcactgcccctcttacccggccggccactgggccggcctcccttccctgccctagccgtccacacccacgcgtacagaggggccggggcctccctcaagctgcggcctcggcctcctccccgcgcggcagctggtgcctccccggccctacggggctcacgcgcacgacacagccacaagatgtccgctctgacggaactactgccagctgccacgctccgcccctccccctcctcctgcctcttcaccgccgcggatcagtccgccaacgccgccgtcccgagcacaagaccgatgtgaggccgaagccagacggcttgcttcccacgtccggggccgagtgaatacgtgtcaagcccttttccttcttctcggaacagcaccttcttactaaacagatcggagattggaccaggagggcgggggagggaggaggatcatgagctggggggagggtgaacgagtggcggaaacccttaggctcagagaagcatcgagaaccggaaggagaccatgggaggaaggtaaaggaagcagccgctgcgcgatccagccccacgcccctccccacagcgtcccccagtttcctcacttggtatcgaggagacgactctcgcgagaacttcgtggctggctaaccgaagcggtagctctgcaatgacttaagagcagttttgtgcgcttttcctgacggggttccgcctccaaaatgcataagttctcgcgagacgcagtaaggcaccggctcgaactggggcgggccactgccaggaaagcaacgcccctgaatgcttatgccggtggttggtagaggaaatggaattccccagactggtaagagcgcgcgcagacacagccttgtctcacgcgcccaatcaggagcgtgtggtgggaggtgccaaggattaattaccagatacctttagtctagctcgggccgggattttgaggtttccggtggagcaggtgagcagtatttactcgcctgccctcctgggctggttatgctgtgggaggaggcgcccctcgagatgggaatagtagttttaaatagacccaggttggccgctcatcagcgctcccacgtgctgaagtctagtgcacgtctgaccctaagggagcaatactgagaacagcagggagcaggctgagtcaagctcaattgagtggatggggctaggacagagagagttaggggcagggttttcactggtctccgtaatcagtcgctgccgtccgccaaggtgtagatgtgggaacaagcttaaattctcaaactttagcttctgttgctgtgtttcagttcttgagccagaaagtgttgagactaattagttaattaggtagagtttagagtcagaaaaacaatacaatacttcctgaaatatccaagttgggaggtgggatttacctcagtaggattggcctgttttagtcaagggtttaaagtatggagacggcagttatgctctctagtgtatccttcaggcaaaagaaagaccttaatttttatgaggaatttaaaagtgggtaagcactgaccagcttaaggttttttaacattccttaatgaccccagttaccgaagtggagatcttcaattacttggaaaaataaacttgttttaaaaatacacttaatttgaaaactgttgcagaaagttttacctaataaaaacttaacacgtcaacaatgatgaatataagtagtctaatgtatactgttcaagtgaccatgtagtgtcactagtgaagcagtgcttctcaaactagtgtccataggaaccacctggggttttgttgaaaatgcgactttgatttggtagggcagtgg

SEQ ID NO: 317502 - DNA, 4001 bp, Homo sapiens
tttcagttgttggcaacaacaactgctttcattaggagtatatatgtcaactaacctggaatacattttcatattaaataagttaaaattgctgtttcattgtatcagtacagacacttatgactctatttctgcattgtaccacaaaatacaaagtcatccttccattcagagttttggcatatgaacaaacatagaggtcagagttcatacacatgctctgtaaaaccgaccatgacttatatactactttcaataagtctgttgtcatttttgaattttaaataattttttctccatgtatactcatcacatacttagaatgctgaatttcacaaattattattgacactattaaagtactaactgtaaaagaaaaacacaaatagcaatgatatattcaataatggtatgtgaatcttgaaaataatcattttctgtattactttttgtttaattcatgtggggaagacaatctggcattcttgttgatcttggtatgagaaactgtactaatacttgcataattttgagtcaaattactagagcactgtgaatatcttacataaataaacgtagtacaaatgtatctaaattctgcaggacttaagagcaacgggaggcaacttttttgaaaatctgttaagtcgtgataaatctcaataaggagatgaaacaatgtattaatctggtgaaatttcacatttttaataggtctgcttttcaaaagtaagaatcaagttaactatgagggacatcataatgaagtttcgtggcacaacacgagtcacagaggcactgtcttaagacagtctctctgatctgtaacttgtaaacaatattttgaaataagctactcatacattccattatttgtttcctaactaaaaatatttacatgtctttaatacaccaaacaccttgcctttgcccactcaaaagattgagatgtcaataaagatgaggcctaggaatttgggggttaagtggaaaagagataattatcttatttggaattaacttgctaactcaggtgaaaattcccttacccctgccaccaaataagacagtattctattatgtctccctttgactcctaacacccaactaagaaggactaactctgaatgtccttcctttttaatcaatacctaaggactcactgctccttccccaagaaaagaacagtgaaggcctgacaggcaataaccccgaataccctcaaaagtgtgggccttcgagcagcactgctcttgggatccagttaccacctttccccttcccccaacccacttcccgggttttctcaggctcggcctgctccctccccaccccacagccacatttccagctgcggccaccgcctcgggttctcttgtgagcttccatccctccgaggagttgccccctgtccatcacctccccaaaccatgttccaccccagaccacccgcccgcgagaccgtccatcctagcgctctgggaggggaggggaaggcggcggaaggaggaggggaacactgctgcttcctcacaggcagaagggcggccgcaaggaggaccacccagggactaccggggatatcggggtcgcagctgggaggaccctcccgccccaggcagaggtgggggatatccgggagttcatttctgacctcctcgctcttcagcacctccttgaactcccgcttgattcgctgcaccgcgatgttggccatgtctccgcccgcagctgattcgtacccgcctcctccgccaccgctacgaccaccgccaccgccgccacctcttcctccaccgcctcctccctcggcgattcagacctgagcacacgaacactgccactaccaccccggccgccgcgctcgcctcagtgtggaatcacctccgcgcccggccaccaaaatggcgccgggtcggcgcatgcgcacgacgttgacccggccgggcggcgcagccgctcccgttggagcccccatacgcccgagccacgagctcgcgtctcggctggggctgcggccgcgtggctccgccctgccggcgtctggggccgcgagggtgcggcttccaagctggccggccctagccggcccccccggcccttcccggcgcctccgctcctgtttaaacccgggtgctgtggtctgggcttccagcgctggcctctgaccgaaggttcgggcgcaaccgaacgggtttccgacgccgcactcggctggaacgccgccctgactcagctagacccggaacccggaggctgaacgccgtgtctagcgcaggaaaacgctctcccggatctcggtccggcccattttcagttggtgtagccccagaaaatctactgcagtcgtttttgttctgcaacatttatagtaccacgattattcccatcatctcaggtagcacagattattgaattaaggctggttattgttggatcagattgggtttgagacaggtactcggtggagaggcctgagggtgggtttagaagccagatgttgctctttgacctatttaataccgagcttgacacacacacacaatctctctctctctctctctctctctctcacacacacacacacacacacacacacacactcctatgcccatccctagagtgtagggtgggcctaagactgcgcttctaacaagtctcccagttgctgctgctgttggtgctggttccgggaccacattatgagaaccactgaactgaatgaagcatgtgaaaattcacatatattaaagtgaaaattggagaaatggaaacaattacagtacccttcaggggactcggggtgggggagggggagccttatttctgtaaacctaggcctcaaaggtgcctggtgatagtaggcactcaataaatattgaatgagtaaatgagtacagataagactaaaacgtttttgctggcgcggcggatcgcttgaggtcaggagtccgagaccagtctggccaacatggtgaaaccccatctctactaaaaatacaaaaatcagccaggtgtggtggcaggcacctgtaatcccagctattctggaggctgaggcaggaacatcgcttgaacctgggggtcggaggttgcagtgagcgagatcgcgccactgcactccagcctgggccacagtgcaagattctgtctcaaacaaaacaaaacaaaacaaaaagtataaaatattttaagtggaaagtaagtttgaaagtggtttctgggccaggtgcggtggctcacgcctgtaatcccagcactttgggaggcggaggcgggcggatcacgaggtcaggagatcaagaccatcctggctaacacggtgaaaccccgtctctactaaaaaaatataaaaaaaatagctgggcgtggtggcgggcgcctgtagtcccagctactcgggaggctgaggcaggagaatggcgtgaacccgggaggcggagcttgcagcgagcgagattgcgccactgcactccagtctgggcaacggagcgagactccgtctcaaaaaaaaacaaaaaacaaacaaacaaaagaaagtggtttctggtcgggcgcggtggctcacgcctgtaatcccagcactttggaaggccgagggggagcagatcacttgagcccaggagtttgagaccaacctgggccctatggtgaaatcctgtctctaaagataataatttttaaaaaagaaagtggtttctaaggtgcatagtaataatggtttggtactgagaagcattttgaatagaacattttggaataagtaataagggtgtcatttcagaagtttatacttcatgcactttcttcacctagccaatcagtaaaatatctattataaaaatatcacaaatacatggttttaccaaaagtaattaaaattgtggtggcaaacatggaaatagccaatggaggcgaatcagtgggggcacaaggcaaaagagaatttcttaaactcccgccccaggaaccaagaggagattttaaaattccagttctct

SEQ ID NO: 317503 - DNA, 4001 bp, Homo sapiens
tccaacaatttggcatcttccttttagcccaagtaaaagactttagcaataaaaacatgtcagtgagatcatcttattagctgtaaataagtgtttttacccacaatacttagcttacttactaggaggaaggcttggaacttcccatactcttgattttggctacagatgcttccagaacacctagccttaggacggtgcttcagttaacctcactctttagagtgatgccccaagttttgctaaagctaatttcagtcactcccacatcagcggtcaagtgacagcaataggagataagacaatgccatgcgctaatgactgggattccatacatcacaagactgcaaatatcctagctatcctttaaaaaaaaaaatctgacgctgtctttcagatacatctatccatgcacacttgtaggaggaaaatcatttcaagggaaatgcaaaggtgctttcaaaactgagctaataaccccctatttcagttagctacaaggtcagagatgaacaaggataagtgaagaggaaggaggttcccacacagaaaccatacacaaaatgattaagctttaagaaatacattcaagaggctaaaaaccaagtgtgcaagtggtgggagtggagaagagagaagaaccccttaagaccatcagaaacccaagtaatggaggcggagaattagcgaacctaattgtttccctgcgatttaggtcagcccttccccctccattctacagctaggtgggagtctgagaagcaaacaatgagttgacaggttatagcccttaaagggaaaccagcagccattccccggaaccggaggctcgaaaaagcccaagttcgagggaactcatgagtaggatgaatgatttccctggataacgggatagatggaactgagatactgcctctcttccaaatttaaggcaattgtggacggatgggcaagaaggcgacaggcaccgctggaacaggagcccagggagtaggtaccacgaaaatgcaggctcctcccttccttgtaggcgcgccccgcatcacctacaggggagggggcggggcggggagcccccgaggactcaagctggggagcggcgtgcactgccggcggccggcgcatcctgggccccacgccctacctgggccgtgaggggaaacagcagcagcagcgcgcaggcaggcgctggcaccgagcccagagactcctcttccagccccagcacgtccacgaagcgccactggccggcgacccccagccgggacagcacctgcggagaggagacaaggcggccaggcgcacggggacacgcgggtcgcgggcacctgccagggggcggggccaggaggcgcgcgccctccgcgcccgcacccgagcctgggaggagccccagtcccgccctgccacccccacccgggccggcgcaatgacacagcacaaagcgcggcccacacgtggcgcccgcgaagcccgtgcagccgagtctgtgctgcccgcgccacgccctcgggagctccgcctggcgctcgctcgccacggggcgcagccccctccgtctccccgtgaccggtttcgtagagtcacccgctaaatgcaggggcccaggaaaggcgcccagcccacgccccagcccggccgtctccggtgctcgcagcgggcggcttggtccctgccagcagccggaaccggtgggcgcccccgcctcggcgctcgcgggggagggggccagagacggcgcgagacgccactcactttgttcagcatctgaaaggcaaatgcaaagaaaaaggcaaaaccgaaccgatcagcgactcggctccccctccctcggcctcgcgctctccgggtagcggtgcacctggcgctcacctcggggttgatctccatcggcttgagctgcatcttcgcggagcgcccggcagaaatagcctagggaagacgaaaaacagctagcggagccgcccaggctgcagctataaagcgccggccagacgcactgtgaggcctgtgcagggggagcaggggcagaaccaagcgagggggaaacggacggtcgcggccagatgggtacgaaccccccgtgcgcagcgcggagtggtacggccgggcccccaaaccttgcagtctcactcgccggtgagataatctggtggttgtggagacgggatttgttggtgggtgttccttgagtgtatggagcagtccttttgatggagtctttaattttgggcgaagtttctggaaacccatcctttcaccatcccaattactctaaagctcgagtctctgaagcatttgagaaaaagcacaaattcaacaggtatatatttaatacgaatgaatgtaaatgtgtgccccccgccccaaatctctcagcagtttgcgtttaaccttagacaattcctcctccatgttaagtcagaccagtaccgaggttcgtttttaagtgactacctagaataaaacagaatctggtagataacagatactgcattaggaatgctgatgtaatgtgactcccgcggaagaaatggttggtcctgggagagcagtagaaagctgggggatgtgagggtaatacaagacacaaagaaggcaggcgattggagacttgagaaaacagatccagggaaaagatgggtatgattttgagcgagaggctgtaaaaggaaaagcatttttaaaagaatgggaagctttgaaaaataaaatgtctgagttcaccgcagaatactcccaatgaagaagaaagggaatggcaaccaaggaaaccactgttctctaatgatctcaggtgatctctaatgatctctagtcaaaagatggagagagaaagcatttgctgaagaatgaattttaaaagggaccaaaatctataagaattgtgccaggaaagctaagctgcagaacaaagtgggcttgcagaaatacttaggtagcgaaggaagcaagaaggttgagtattttttaaaaataggcaccgaagagaataatgatgatggtaaaagaatagaccttctatttaggaagttgaggttaacagatgacagagggaagggagggaatcaacattttttgagttattgtttttggggatcctttgcatgtgtctctcatttaatccttagaggagccgtgaagagactcatattagtgcaattttacagatcagaatcccaggcctagagaagttaatttgcttacggtcacaattgaaaagtaaaactgagaagtaaaccctgctaaactgggctccaagagcccattctttatctaagattccacaacattctacttctattttctttccatttttgccattagaaaatgaccttcacacacaaaaatgagagagaaaaaaattagtaagaggagcttaatgggtgaatcttatggtatgtaaattttccctcaataaggttgttaaagaaaaaaagaggtgaaggtcaagacaagtgactaggttatattgaatgagttcttgcctttagacaaagacaaattacatttccaatttacttcatttattcattcactcaacaaatattaagaacctactgtgtgctgggtgccgagcttggaaagtttggaattaggcatacaaagatgaacacaataaacatggaaatttccctcatgccgtttttttgtttgtttgttttgtttgttttgttttgagacggagtctcgctctgtcgcccaagctggagtgcagtggcgcgatctcggctcactgcaagctccgcctccccggttcacgccattctcctgcctcagcctccggagtagctgggactacaggcgcccgccaccacacccggctaattttttttgtatttttagtagagacggggtttcaccgtgttagccaggatggtctcatctgctgacctcgtgatccgcccgtctcggcctcccaaagtgctgggattacaggcgtgagccaccgcgcctggccccctcgtgctgtttttatcagtcataagagttgtatgaaa

SEQ ID NO: 317504 - DNA, 4001 bp, Homo sapiens
gatattcggctaacactttttactcacagcagtgttgtgcggtttgaatgatgggcagaatcatatgagaagtgcagaaggcagtagagaacagggttaggagcctggagtccgaggccagactgcctgggtttgaaccctggctctgccccctcccagctgtgtgaccttgggcaagtgatgaatctgctctgtgttcagttttcccatctgccaagggataatggtactaatacccttccagttataatgtatctgaagcacttagaacaatgtctggttcatagttaagccctcaaataaatgctacctaaagtgacaggaattcttagagtgcactggcactcaggaaatatgtttccttttctttttcccctaaacaaactccctgcagcattcgtccactttttctgctctggtctttcctggacctgatgaggaacctcttaagaggaaatatgtcttttcctgtcctttcaactctcttcacaaagtctggctttctttgcttcaaacagaaggctttgaactttgttgcatacacaaatgatgagggaagcttgtggaaagacactctggtctctagcctgaggattcagactcagaggaccatggtagtcctcgtttggatttctgacaagctccatagatgtttctgatatacttccctctttggagaactttaagttaaacatttttctgtagcccacccatattctccagatggagatccaaactgggcacaaaacttccatgactgggtgacctttacaagtatatatctgcatctaaaaaatcgattttgcatacttttttctatgaacaatgagctaatgtttggggaagggagagttcaaatatgaatgttttctcgccaatttgttatgaaaaccactcctctgtgtgttacactttttggaacagagcggagcccaaggcttttctgcccctcccaggaacgctcacggcttactttctttccctgcggtgaggaactcctggaccgtgtcgtagaggccgatcctgagagaggcggagctgatttgccgctgaagccccgcaggcagcccgctgtagagtttcatccgcccttctgtttttaccacagcggtgattgttcccaggacacctttatacctaataacactggacgtcgggcattcaccttggacctggaaataagaaaggtgcagaacagaagggagcgaaattgagttcactcttaagccaagatttccccctgtgttcctattttccgtttcttttctcagcaacattcctcttccatccacctccctctaccgtgtgtgtgtgtgtgtgtgtgtgtgtgtgtgtgtgtgtgtgtgtgtgttcgctcacgcgcagatggagggaggctggctacaatgcacattttgaatatccccctccccaggaactctccagaacccctagggcagtaggataggacagaacccccgaagaatcaaagaaaggaaaaagcacctgactagtaaactcaggagaggccaatattctcagctcttaaaatactaagtgcaccctaaattttgggagaatttggtagtagtcatggtcaacccattctctgtggccctggtggttcttcagctaatcccagaaaaagttccagtttcccatcctaaagcaccagccctgggacaaggccagactgctttggaaggtcacctaccctacctagaaacagtggttacaccaaagcagagaataaatggaatgcacgcaacagcgtcccctctgtcctgagaccccttgtcttacccctctgcctagctacctggagccggactttggccgtgtccagcgggaaggtgatcacgtccgccaagcacgccgctattccagctgagaagagctggacccccagggtcgggtgtacgtccgaggctgtcaggccccccatcttcactcagagactggagatgcagaggaaaagggctccagccccgaaggtggaggaagttcctttcccttgctcttcacgcctgtccgccgggcagcaaacccgatttctgttttttgaaccgaccgccgggcagcggcggtgcagaggcggcggctgcagacggagcgcggtgttgggggccgagtccccgcgtcccctcctacccaccctcgcgccagcaggaccctctgcgttccggtcttccgctgggacttatatagctgggccgctcccgggctgggccgcgcgaggtctcagaagacccgggcgtgggacctgccgggggcgtgtccgggagcaccgggtccctcccattcccattctcgctcggtgcctcgggagccctgcttcgctccccgaaagccctgggccggccgctggttgtctgcgccccgcacaccgcacgtcggagggagggcgcaccgcggcggtcagcacccgcgcccccgcacgtgcctcaccttctgtcaccctttggctgcacaccttcggctggggctttcggaaaccagcacgatatcagagccttggtgaaaggttctgcctagctggagctctcccagaaggaagagcggggcactcttccattcctccaactccccagacatcttgcaggcaccttgcggccttctctgcttccctttcctctcctttaaacttctcatcctccttcctccggattccttctcttcccactaccaaattcagacttggaagaatcccacacaggaaccaagagcactctgaacttgtcaaaaagagcgtttcgtttcatcactttttgagagaagatgtcaaacgagacaatagacacactagaaagcaaatagtacattgctaaagcaccgtacaaaatgagataccacctgttccttctaattagatttcttagagggtgcagtggaaaggacagggcaggttgcttggctccaggtgcagctctccagcttaccaactctgtgaacctgggaaagtcatctgtactccagcttttattttcaacagtgtaaaatgtggttccagagctagcccaggtctgaaatctccctgctaacttacctataatgatgtaatatgtgttggttgtgtggcctttcctagttcgatctttgtgcaaattttattttcaatgtttattcttgtgaaaacttaagaaaacaaaaaacttttaaaaaaaacagtgggaaataataggaaactggagaaagagggaaatggacaaggtcaggtcccagctttcagaacctctcagttaagccaaagatggatttgatattaccagaatccacgtccagctatttagggcctctggtactcaaccctgacttaagccccccaaaagagtcagtggaagtcagagtcatctcctccaggagcaggagaaataagacatgaataaagaataatctccaaaccctctataagtaaaggttgtgtactgtgcaagaagccagtcctaaggcacttccaagggaggtcaggcttgcagagcttccctgaaaaaggcaatgttgacctgacgggtagcctctgaaaaaaaatagaaaggagaaggagccagcgaggtttctcctctgcaaacacttgttgaaataaagatcaactgaggcaaataagtggcatgcatacaggcaaagatgttggggaaagcaagtcgcgtatatagaatgcattctgttggcctgactgactgggaaattgggtgatggggaagaaagagagaggtagggcaagaagttggtgagggatgaggctgtagaagccaaatgagaagcagagcctgcaaatccattatgagtgtagcttcatgttatcacctgtgtagtgctttacagactatgaagtgctctcacataaatgtcagatttaatttgatagacaatacagctttatgaatgattagatgtggagtcaaagattactctatgtttaagaacatgggttgcaagctcagtgacagtaccaatgattgtcatgaggcagttggtaaggggggtgattttaggggtaagaagattaaaccaatttttaaagt

SEQ ID NO: 317505 - DNA, 4001 bp, Homo sapiens
aacatttactgagctcttcaaatgtaaaacacaggcagggtgcagtggctcacgcctgtaatcccaacactttgggaggcagaggcaggaggatcactttgagcccaggagttagagaccagactgggcaacataggaagacccccatctctaccaaaaaaaaaaaaaaaaattagctgagtgtggtggtctgcacctgtagtccagctactcgggaggttaaggtgggaggactgcttgggccggggaggtcaatgctacagtgagccatgatcacaccactgcactccagcctaagcaacagagcaagatcttgtctccaaaaaacaaaataaaataaaacaaaaacatgtaaaaggcactatgctaaacatacatacttactccaatcctcagaacagtattaaataggtaccaatacagtttttctcattttacaaatcctttgtcacatttctataagggtcactgtttttatttattctaaaattgtaatcttttgaaagatcatataccctttgtcccaattctacttctgagaatttattctaaggaaacaatcaagaaagttcaggacaaatttagcttcatgttgtccatttattctaccgttgttcatcacagaaaaataaatggaaaccacttaaatagctattaataagaaatcagttaaataaagaatactaccaaacaaactagtatgtacccatttaaataaaaaatatttaaagatactgaagataaaagttagacaggaaagaacaaattttaactctgctacttactgtacaattttacacaatttaacttatcacttaagtctgtttctcttctgtaaaactggaaaaatacacaacttcccagggttgttatgaagattccacaagacatcattcataaaagcactagtcttcctagacttccgaattagctgagatactctctgaagaaataatactgaggctgagatctgaagggtgagtgaaggtgcaatagcccattccaggcagggccatcgatgagtgaagatctgcttaaaagaccacttaggtgactaccccagatggatagatctcaaggccaaggatggtaagagtggcgacagtgacaacagacagacatttagaagtagcatctataggacttgattattgactgcatgtcggggagttgagaagagggagatgtcaaggatgatttccaggttttgggcaggcacaacaggatgtatggtggtgccatctacagagttgggggttcctggaggaagagcaggtgtgggctgtggggaagtggaaatgctcagtttggaacttgctgagcttgaaatacatatgagctatccaagtggaggcacggttagcagatttgtgggtctggagctcagaagaaaggtctaacttagagataaaattttaggagaacgcatagggtgtaaagcgtccctgaagagcaccaccatttaggatagggattggagaaccttgctgagcaatgagacaggagagaaaccaggggagggaaataccacgggaactaggggaatataatatccgaagaaagttgcgcctgtcccaggttaagcccttcttgcaaggcttcaaaaacgccgaagtctctcaaaatactttcacacagagaagtagcagggggtgcgtgtccaaggtggccgaggcggggtgcacacttgtgtagggcactttccccccggcccagcgcggagacaggcgaactggagagccgccctgcccacgcagctcgcagctgccatcttggaccccggcaggaccagctcctttcaggcgctgtgaagcccgctcgtggcggctgccaaagtccggggaaaaacacaggggtcggtgacgagcagagatactcaccatgtccgcgacgtggcggtgacacgggcgctgacgcctgcccaaaagttccgggggccggccctgaagtggtgtcaccgcacggcccaggggcggggcccgggcggaccaactacaactcccgacatgctcggcggcatgacgtcacggagcgtaccacaccgcagtccctcgcggacggcgaggcggggcgggtagccgaagacttatgtttggtaaattctattagttaagtcttttctgtcctacagaagctcacacatccttctgtgtgttcttcgatgcggattcgaatctcctcgtatcctcccacagcgtgcttggaatggattctcccgtacccggggcaacacatcacacaataaacgccagctgtggtggaacgtgcagaggcgctgcgcagcccaggcgtgtcgcgcgcttgggaaccctcgccgctcccgcagcgcagttaacgtggacaagctggggcaacctggacgagctggggcaacctgatctcggctgtcggagtgggtgtcctcaagaaaggtgacttggtcctcgcggacgccaggtgttgccccttagatacctgccacctcccagcctccgtttcctctctgggaaacagactcctcatcacctcctccagttttctgccccttcttcacctctcctgacgctccatccgtaccttttgcaagggaacgtgccataattcggctatgctctattttcttgtctaatagattgtaagctccttgcgggcagcatctatgccttcttaaatctgtttctagtttctaccagcaagcttgccccgaaggggattgcagaatatctgttaaataagtgaatgaataattttgtaaatgttgctcaataagagttaagtagtggcgggccgggcgcggtggctgacgcctgtaatcccagcactttgggaggccaaggcagacgcatcacctgcgctcacgagttcgaggccagcctgggcaaaatggtgaaacccctgtctctactaaaaataccaaaaaaaaaaaaaaaaaaaaaaaaaaaaaaaaaaaatagccgggcatggtggcgggtgcttgtagtcccagctactcgggaggctgagacaggagaatcgcttgaacccgggaggcggaggctgcagagagccaagacagctccactgcactcctagcctgggcaacagagagagactccgtctcaaaaaaaaaaaaaaattaataagaaaaaagttaagtgatgggaaagttctaggcaagaatttcttccctccctcctccctggctcgcttgtgtgccgggagctgcgcagatgcggggataccgtgagagggaggaacctgtctcagctcctgcccttgtgccgtggagctttgaaatataaggtaaatgaaagtactaaatcttgactgaagtttggttttaaagcatctctgattaatggaagaggtaggatgtggggaagggcgttgtatttagttatgtttcagtttaaaatgaatcttcacttgcccctttggtgttacgtattagcaatgattcatgctcaggtgagccagtttcaggcaggcttgcagagaggcactcaaacagcttgctttaaatttaaggtaaaaggccgggcgcggtggctcacgcctgaaatcccagcactttaggaggccgaggcaggtgaatcacttgaggtcaggagtttgagaccagcctgaccaacatggtgaaaccccgtttctactaaaaatacaaaaatcagccgggcgtggtggcaggtgcccgtagtcccagctacctgggaggctgcggcaggagaattccttgaacccaggaggcggaggttgcagtgagctgagatagcgcctctgcattccagcctgggcgacagagcgagactccatcttaataagcaaagaaataaataaatttaaggtaaaaggttcttaccagccgggcgcggtggcccactcctgtaatcccagcactttgggaagccgaggcaggtggatcacctgaggtcaggagttcaagaccagcctggccaacatggtgaaaccccgtctctactaaaaaatacaaagttagctgggcgtggtggcagacgcctgtaatcccagctacttgggaggct

SEQ ID NO: 317506 - DNA, 4001 bp, Homo sapiens
caggttcatgccattctcctgcctcagcctcccgagtagctgggactacaggcgcccgccactacgcccggctaatttttttttgtatttttagtagagacgggatttcaccatgttagccaggatggtctcgatctcctgacctcgtgatccgcccgtctcggcctcccaaagtgctgggattacaggcgtgagccaccacgcccggcccccattttctatttctacttttatgtaccctctggccctctattctgctgtcagagacataggagtgtttccttattaaatgggttattttgaaatgagtttttacctctgtattttgggagagtcacaacaaaccaaaccgttccaaaactactcttcatgtaaaatttcataaattcaaataaacattccaacccagaaggggtcactaacaaataacaaatgccctactacaatctaaacggaatataatccttctagccccagctctctacagcatattttgcataggtacccaggagctaacgatgggcattatagttggatacatcagcttcacacattttaatcatttccagaaattaaacagtaaaagatgcctgaccagagaaaaatatttaatcagtaagaaagccggtattaattttatgtctaagggttatcatgtaaagctgtggaagtaaacaagaaggaagatggattatgcttatccagttatagattttgttagaaaaaggagtacagcaacgggagaagaaatgagatcttttcaatcagggttgtctaccccttaccttaaactggatcctggccactaataagcacatctcagagcagacagtcagctctttcatttccagaacccccctgaagaaagactactgttctccatttcttaagggatttgaagaaactcaaaggctcactgtgtctttgaggtctgtcgatagacagctactgctctgtatgcccatgaatagatccctaccagcgaacccctcttttctctatactagaattcctaaccctactaagttatcttcctatatatttataggacgtataatttttcaagatctcacacaaacatggtctcccgaggcacccaggaaaggccttccccgacatcaaacagagcaattctgtggtgtagggggccaacaatggattccaggacatcccggacagatatcacggcagtcttagtattttgctctcaagagggctttctggcttcgtttctctttggtttcttaagaggggcggcatgagaaaagcaggagcccctcaggtgagcagactcttaaacacaaacaaaagactacgactctgcggccaaaatgaggtccccaacgagagaaccgcttcctgtggtgggcgttcggctttggaggcggcagggaaatctcatccaagtcaggaaagtgggtaaaggcagaaagagaaggggctggaagactcacgagtcttgaataagaagcccagacgaccacatccccaggacagcagttccaaaatgcggttcccgccctaagccccaaagagacgaaggtcgtgagacgggaagcccgggacccagcgcagcgagcgaccgggagcagcgcgcacaccccagccccgctccctccacatcccgcccagacctgggagcatcccgcccgggcggcggggccagcctgggagcggcgcttacccacttcccagcagcaagcgcagggaccgctcctatcccgatcgttcggacagcaccttcctacgggccgcgccgccgcagcttctccacccgcgccccgctcgatctgagctccctctcggcgcacgcccctccctcaggctgccacgcgttacactctgagtcccgggcctgagcccgtatttaaaggcttttgcctgcgaaggcggaggcttcattcccccgcagccaggccctcctggattctgccctcagctgcttcctagctccccctcccgctacacaaggcccagggccaggtccctatttccttcacggctcaggggcggggagactggggctggtcctggctgggagggcctgccccgcccctggcctagctgggcaaatccgctttggccagctcagcggctccgcccctaccgcgagcggcgctgggcggggctgcgtgcgtggcgtgtccgctggaccaggggacgggggcgcgccgcaggtgtaggagctttgcgcgcctacctggcggtcgtgggtcgaggaggggtcaagaattgttgtctagcagccctctccccgctgccctgtcctggccgaggcaaaggccgcgtgcgctccgcgtctgccaggctttagggctgcgcggacactgggtgggtggtgggccgaggcgaccggaaggtcctggccgcctttccggtctcctcagcaccctggagcgccgccctcgggtttcggtctcctggatctgcgggtcggtctcggcgggcggattactcctcgcccacaacctcgaggccccggggtcaaccgcgccctccgggccggcaacccagggtttagtcagattcctcctgacccaccgcttctgggaaagaggcgcctcccgtcaggaggatgctgagttcctcatgactggaccagtgagtgtccactccctggtccctggcgagagaggcgggacccccacgccctcctggcgctctttgcagagatgttcctcaggcccaatccgggatttgggatgtctgtgcgtgctgtggagcagagagtttgcaacatgtaagtgccgtgcgtgaggaagagtaaaattaacctatggagcctgctcatttttaatgtggagggcagttccgttcctttctttcgccgcttcgaggtcattttaacactcaaatctaacatataagaaaaaaagccaggcataatcatggccttttatttccctcattaaggattacatcaggtgacataagccattttaacatacatcatgaagaaagtgattagtaatttataaaggcacattaaaataccatataaattacggttttcttgataggatcatgatggtgactttaagaaagtggttgaatgtggatgaaacagtttgctgtggattgtagcacgtgtggcaggatatgtaggcttgttggttggttgttttgagacggagtctccctcttgtcgccgaggctggagtgcagtggtgcgatctcggctcacctcaacctcctccttccagattcaaacgattctcctgcctcagcctcccgagtagctgggattacaggcgcccacaaccatgcccggctaatttttatatttttaatagagaccgggttttgctatgttgaccaggctggtctcaaactcctgacctcaggtgatccgcccgtctcggcctcccaaagtgctgggattacaggtgtgagccactgtgcctggccagtatatgtaggctttctgcattctatgcagttcagttcattcatccaacaaatatttaatgcctgttgtgtgtcagacgttatcctaaagactgaagatgcaaaagggattaagactcaattcctttggccaggcacggtggtttacgcctgtaatcccagcactttgggaggccatagcgggcggatcacctgaggtcaggagttccagaccagcctggccaacatggtgaaaccccggctccactaaaaatacaaaaagttagccgggtgaggcggtgggcacctgtaatcccagctgctcaggaggctccctgttgcagtgagccgagatcacaccactgccctgcagcctggggaacagaacgagacactgtctcagaaaaataaccaaacaaaaaagactcatttccttcttgcaaagctcacaggttgggtagaagagatatgtaaacaagtaattgcactagatatgacaagtacatctttttgaacatacatagatttaagttatctaatacagtttgctttgtaataaaaaccacttatcttagtcccttcattttgaattcaacatttttctatttagtatt

SEQ ID NO: 317507 - DNA, 4001 bp, Homo sapiens
ctgaatttgtgtttgtaattactctgatcttaaaatcactgaaaagctaatctgcccttgccagaaaaattttgaaagaaacacattgtatgcctgtatcaaaacatcacaaatatgtcataaatatatacctatatatactatgtgcacataaaattaaaaataaaaataaactgtgtaatatgattactatatttgtgaaagctcatgaattcagagaaaaaaactaacgtatttcagaagaagctagcatactcaaatattttcatcttagagaatgataataaaatatatactttgcttaattgtgttacaggtaattagataggcattaggaatgtcaggtgacagttccatgattatcacactgcctctctaaaaatgagaattttgcagccagtagtgccagggagagacaagctctttatgatccacagctgttaacattaaagtgttaattgaatgcagatgccagagaggagcgactgcctgggcacgtgcattaagagacaaaatgttgaagtgtgaccatccaaggacactttaccaaaaaagggaagaaagcctcagatgagcatatatacaacttcctaaacagactgtgcatgctcatttcccaagggtaagaagggcactgcacatgtgggcagcccaccctaagggaagaatcatggaaaagaggcgagcctataaagtcctaggatcgaggttaaacggggcacttcaggtgcccacttgagtctcttccaagtacgttttcctttctttcctgttctaaagcctttaaaataaacttccgctcctgctctgaaactcccgtcagtctcatctgcctgatgccccccagtcaaattcttacttctgaggaggcaagaattgaagttgcttcagacctgtaaggattcgccactgataactcagatgccttctactggttaacaactgcatacaaaaggagttagcatggcattcacattaacacaattggttattgcttttacaacagcattttctttagaaaaactttatgtccttttttttttttttttttgagaccaagttttgctcttgttgtccaagctggagtgcaagggcataatctcgggtcactgcaacctccatttcccgggttcaagctattctcctgcctcagcctcccgagtagctgggattataggcgaccaccaccacacctgtctaatttttgtatatttagtagagacggggtttcacctggtcttgaacttctgaccagaggtgatccaccctcctcggcctcccaaagtgctgggattacaggggtgagccaccgcgcctggccattattttctttttttaataaataaaattgattttgcataaaacttatttgatttatagcataaaacatttgacttatatttaaagtaaatagattttaaaataaatatttaaaaatccattaaacaatattaagaaaataaaatacccactaaagatgacatctcacatcctctcattcatgtgttgtcttaaggaccacagtggtcacttgtgtacattattcttgtcttcaccatatatcagtataaagtttcttatttgtcactttatgtgtcatctaatgaaggaacaaacaactctccactggtaggaacaaaaggcatgagaagaatccctaaagaggactttgagttcacacttagacaaaactctcaacttactgctctgtccacacagttccctcgatatctgtaaaattattttgaagtataaaatctgggagaaaaatccatcaaattataaagtagaactaataatgctttcatgggtaagcaatgaaacaaaccaaaaggtaaaccagcgttttaaagattgatatttctttaagaagagaatggaaaataaattaaaatatacattttatattgattatcatgaagttttctagtttcttacctgaagtttcctggaggaactttaacagcactcatttgacattaggaagaagccgaatgtaaataaatcctaggtggataagcataatataatgagtaatatgatcttaaatggaaaaaagattatgtaaagttgtttatacttaacattttccacccactacactgtgaagcagattaaccttttgtcaaaggtgtaaccttctgttggttccctagcaactatttgccctgaattttgcatttactatcatggtctctgcccctaccccaactaaccaagtatgccaggatatatctaaaataagattgacaataattagtaatcttgagattgttatgaataagtatgagcaattaatatccctcaaacttatgaaacaaacaattattatattattatgaaaaaagttttaaaaattaaaatgtctttatttttatttatatatatatattttcctgattcatgatgatgaaagtgggtggtttgattgatctttgccataaataaagaagatagtaatttagataatgaaataacttttttagagttgcacaccttcattatgcaccatccttggggaataaaattactgctgtttctttgtgcaaatattttgaagtagcaaaaaataacttagtatgttttttggcatagcatcccaaatatgtcatatttagtaataactaagtactgagatagaacatcaccacttgttgtttttgctgataagcaaacttatggaaatgtggaaataaatttcatacagctgataagtatggcatagtccggcagagacacactttgtatgataacattgaagaggaaataaagaagaacagtggaggccccaagcaagtctttaagttcaagtcagcttggattgcatacatctgactacaaatattcatcaattcatggagtgcaagttcaatcttgataaaagagaagtaatgtgtgtgtttcatacaatgatttctccattttgaatagctaatgtaattaacttctcagctaaataaaatgagtcttcatgcaaatatttcaacatgagccctcaaatagaaacttttctgagtctttacacttgcagtaatatatcttttgccttcacacttggaacacagcatgggtgttaattaatatttttaattcctgtagttttcactcaaatctatttgatcatactctattatctttttataatcccagtcacaaatacacacacacacacacacacacacacacacattccttttaagccaaataattgataactaatttttttttaaaaaagcttcttttctgtttggttctctgtactgtaaaatttatatcaaatatattaactgtaatataaaagtttttttgcttgtccaagatttttacttgctacaggtggttaaatttctatctaggacagaatgagcaaagccagtaactgaaaatattgaacagcatgattcccaactagacaaaagagagactcgaaataagaaaaatttataatgaacactggacacagtaggcctgaagactccctatgattccaatatatttctaggtgtaaaagattactgttattctactcaccctcccatgaagactaacaggcttcatgggactaactctataacaagaaaatattttaaattggtgaagcttttcttggaaatgactcattttacccaattcaatgacaacaattttcaccacttataattaatgagaaatactgaataaagtatcatcaacttcaaggttaaccaataaacttctttgtaaaacaaccatatttcataccatgtatgataataatttttatcaatgtttaaaaagcattttgaaaaattcatgtcaaatgttttcttttcattttaatttctgagttatttttcctatgtgtatcagttgtgtattgctgtgaaaaaagtcacttcaaatttagtagcttcaaccaacaatcattttatttgctaccaattttttgggtgagaagtttgtgctgggctcagttggacagttctactgatttccctgtatatacctcatgcagcaaaagt

SEQ ID NO: 317508 - DNA, 4001 bp, Homo sapiens
agatggtcctgaattgcttattagattaaaatgtttttagaatgacatacaggagactttgaaatattcattgaattaattcactcattcttgcggttccgacgtcattagcatcttcctccatgtctccctaccttacacttgaaccttcagaaatactaaattatcagaaatatccatcgcacctgtgctgttttgtcttcaactttgagcacacttttccttccccattcttaccttgcagaaaaactcacattcagtattttaaaatatccttatgcattatctgaactctgaagtttttcagaataactcactctgtctgtcgcataatacctaactcctctacattttgtattttgtatatatttccatatttacataattcacataataaatattccttttaatgtctgatttatctgtttgtgaaatccttgaatccatggactttattttagtcttcctatctaaaagagtgcttagtaaagagtaagaaatctataattaatgaagaataaatgataaaattcaaaagcataaaaaatgggcaaggcctgtttgatttttagacaaatatgtgtataaatgtatcaacatgatcaatataggcttttattctagtaccattgattatattgtattcatcaggtaaacaccatatcacacttaagcaaattaaataagcttagcatggataaatcaccctgatcaatggttgtagttcacaccttacaattaaaggtgataaagccttaatgtattttgtttctttatgagccttaatatttattaagtgatgatcagagattatccacatatatgtatgttcttaaacgtgcatattaatgtctgtattaataataagcttgtggaaagtttaacattttccggctttctccacacatcactgcagtttctaggcaatttctattttgagcataattatctacatgagatccagcccaacttttaaattgaagtatttgtcactatattttatccataaaagaactgaattgatatatttaagtccatgcaattagaaaacaacacactgtacttctgaagtacaatgtcttttatcttcttttctgctatcaagtgatagtaatatatagtacatcaatacttggaattaaaaaagaatagacatagggaaataaagaagaggctctacaaaggtctgtttgttcaaattcaagtaataaaaacaaaatttgttacatacctaaagctttactatagtatgaatcccatgatttccaaagagtttcaaacatgtagtcctgtaggtggtaggagatgaaatttcttattctgtcagtgaaagacatttggtcggtgagttctgataaaacagcaggaacataggaaggagggtatggtaccttcccacagtgcttttccactgttgaggctggagaaaacctcaaggagtacataaatggaattccaagttttaaagctactatatcgccacaaggaaatactggatcagacaccaggacttcaaacttgcttttctttagctttgccatcagctgttggtttttaagaacgccatcacagatctcctgagacaccatgtggaagtccttgattactttggccatctcctgatagaatctccaaatggttgaaggagatggtctattttccagccatgtcaaaacgaagtccttaattactccttctattctttctttgccaaagggcaccttatatatttcaaatgtcagagatgggttagaggttggtgtgatgaaaagtgcaccagaggcaactaggacagtcacattatgctcctttttaatgagctcatctataattatcttaacatttagccaatgactaccttccattggccaaatcaaaacattcccaccaagagtggttcctatgagacttatctgaagggagaacagcagaaggttgtttaacatgatgtggcttgatgcagaagatttgatgagatgtgaagcaaatgtttttctctgcttttaaagaaaaaaaggaaagacaaaattatttctcaattttgaggcaaaccattaatatccttaaaagccttctttctagaaagtgatactagtcatagtagctccatattttaggatatttacagatttatgggtaatgtgtcttacttctcaaatctgttgttttaattttagtgttttagttatgattcctgctgtctaatcctccttttgaacttgatactccaacccttttttgtgtgtttcataattgttacatttttactattaaattggataaagcttctgtacatctcaactctacattcaggcctaggtattgaaacctcagataggaccaaaactcattcagaaatttaaagatgttaatgctgtaagtttttaaatttttaatgcatgaatataattccatttatcacaattaaacattataataacagttacaatatataagattgtcaaataatatgtataaatatattactataaatatttataaattcaaatatttataaattcaaataatacttataaataatatgtataacacatatagtattatattactactttagtaatatgtttacaaaaatagtttgttaatcctcaagaaaatattataaataaatgaataaaataaaatatgtgcaagagattataggtaatgctagtagtgaataggagctatttaagagaattactaagtcaagcatacatctaccaaaagtgctgttcaaaaactatctagcctgcatgaaaaacagctacttgacatctagattcagccttcaacaactgctagcgtttattaagtccttgttatgtcagacattacgcaaactctttaacacgttaatttcatttcttccttattttaaaaattatccaattatggatcttttataattactcccacatcaaagaaaaagaaaccactgcccaaagagattgaataatttgccatgttcctacagcaaaataagaaaatattacttattgggtacaatggaaatacagtgtacactacttgagtgatgggtatactaaaacctcagatttcaccactacacaatgtacccaaacaggacaactgcacttgaacccctaaatctataaaaataagaataaataaaagataggaactgctggtagcagtcttaaggatctctgactcccacagcctattgtattaaccactgggatagattgccacatcaaaatgtatcacgtccccttaccaactaaggaatccatatgaatagcagcctgccaaaagcatgctaacacaatacaaaattgtgtaacgcacattggataatatcggatcaagtaattcaagtaaagcgatctctgtgaaaatattatgtttgtatgcatatgtctgtgaataagcagagtgatccttttcatgttaataaatcttctgaaattataaattctatatttttagtaatatcataaaaatgtctcttctaagctctcccatcaccaaagataatctgtatggaaacatcaactgtttcattaaaacaattacttttataaagtactgttcaaagtttaacagagtaatcataaaattccttgagtgtatttccattgaagtttctctgcagaagatgttatggtgtgcacaaaatttttgcctttctggtgtcagtctggttcatagtgacttggcaagaaactttaaaataattgtcatgattcactaggatgtcatgattcactgatgttattttcttctatttatttattggcagggaatcaggtccagttttagacaactaaaatatagtattttattcaggtgctattgagagaggagaaagcaagaaaccagttaggcagatagttagaacaaggtccgttggtaaaattctttttaacaaaagggcagcctgaagctgcacaaccttcaagcacagataaacaggcaaggtcgaccctaaaacacccttgtcttttgtaaccagcaaaagacatatacatatacat

SEQ ID NO: 317509 - DNA, 4001 bp, Homo sapiens
aactatctgttcttcttactttattattacatagcatatatcacaggctaaatttatatatttattttatttattggttgtctcctctcatgagaatgtaagttccatgagatagagaatttgatctgttttgcttattgttgtattcctaccacttagacaagttgtaggaactaggttggcattcaacaaatacttttttttacacaaagtaaacaagagagaatgaaggaagaaaagtaaaaaaggaaggaaggcaagaaggaaggcaggcaggcaggcaggcaggaaggaaggaaggaaagaaggaaggaaaaaaaggaaggaaaaaaggaaggcaagaaggaaggcaggcaggaaggaaggaaggaaggaaggaaagaaggaaggaaaaaaaggaaggaaaaaaggaacgaccaaggggagtgagggagaaaggaaagaaagtcaaaaggtatgtaaaaaagtctttcacattacctctgtgagaaagtaccagtggtagcatcatctgttaattcctgctattgattagtgtcccgagtactaagagatctggaggcaaaatcatcaagagagaaggaaataaaaatataaagggaggctcataaaagccaggaaaaataagtaatataaacaaccaatcaggactggccttgatggttaacattattgtgtttgattctcataaggaatgtttcatgcaaggaaacatgaggctggccacaggatagagagaaattaatttgagagatggtgtccaactacccagagatgtgtaaagatagagagacagtgagaaccagggtagagtgtaaactccagttttctattgcctgattctatgcttttcaaagctttctgcagacaaagaaaataatgaaggacaaaggaggcatggtaaatcatgtatcacctcgaaaatatttgccagggtatttttcagtagtgttataatgtatcctaatatgggcactttcatttatattttgaaattgatttatacattgaaaagctattacctaaatggacacaaagttgtttgcattaagagacaatagcatacatattaataccaccatttcattgttaaggatttattcaaagagaataatcagggaattgtttgtacagagatataagaagtccattatcttcagctcagcatatgcagtggaatggaaatcgtttgccatatgacaataagaataaataagggatgtggagtcattaaaaagagaaaattttagacttacctaaaattttgctatagtatgaattccattctccccagtaggactgaaatatatagtcttgcagagaataagatatggtatttttaatcctttcaccaaaggtcatctggtcagtgagctctgataaggctgccggtacataggagactggtgctgggattttcccacagtgtctctccactgttgatgctggagagaacctcaatgtgtacataaatggaattcctaatttcagagcaacaagatcaccacagattgttactgggtctgctaccaacacatcaaaaccacctttctgaagtcttgccatcaactttgggttctttagtacaccatcacagagttgtatgttaatttgaaagaaagtgtctagaagttttcctagttctttgtagaaagcccatattgtgagaggagttggtctatggtcaatccacagcattatcatatgctcaattaaggaatctatattgctcttcttgtaggaaacaggtatcacttcaaaattcacaggagaatcgggattggagttgatgaatagagttgctgatgaagccagtacagtcacattgtgatttctttgaatcaactcttctagaataatcttaatatttaaccaatggctaccatctgtaggccaaattaacacattcccacttagaacaacttcagtcagagtcaaattaaaaaccagcatctggacaaacttcttaggcatggtaaaatcccttatggaaaccatcctactgtagatccttcaagatgaaaaaaaaatcttcaaagtatatttaggtcaatttttaaataaagtaatatttagtgcgatggttacactcagtcgtaggtcaattgatctttagattaaaaggtaaataatataattcaaattcctatatgcactaacatcattatttcagtaacagaaataaaatctggttctttttaaagaaaaggaagcacggggttataaacctaccatctacatattctgtgataataactatgatttataaaatacatctttaatatatttttcactaaattgaataaacaactttcagaggaagtttgctcaaacatttcaaggtgttttagattatatggattatagggtaaaatactatgcatttgatatagaatagctttcttctccataaagccaactgattgttgtctcctatgcctttgttacagggaatttttcagtttcttccatatgacacagatcaagaagatatggcctggaactccaaagaatcacagactttgttattcagagaagttaggtagacactggagttcaatagacccagattcaaatattgtccttttataagatttctgacaccgggtaattattcagaccctcccattctcagttttctcaaagaaaaatgagaggtgagacattaatttgttatattactttgtggattaacaatagtatctgtaaagctacttttcaatcttcttggtacagagtaagagcgtagtaatgttagcggtttaataaatttgtccaaagattgattaggaaatcagtaggccagctacagaatgactggctagacttggatatagtgagatcagatatggatatagtgttgcaattcttagtgaatcccaaactgagcaatagcaattatgtaacaatgctgttttgaaatcattacaggctaccattaaaaagagaaataagaacaaatagagtgattaaaaggataaaaatcaaaaattaagattagaaaataagtgacagattttaagtttatactcaattgcccttaaattatgtaatttcaggcccttgagtaacaaaagaactgggaggacagagaacaggaaagacaagagagagaagtgatggttttagaatttttgcatttgtgtcctctcaagaataagcctcaatttgaatatagtggcagtaccttaaaaattaattagatttttgaaacaaggcagccagagaagagtgtaaataatcttaatggtcttcaaaataagcccagtaaaaggggtttaaaaatcttcataaagaaatctgttgctgtcaaactttcaataaaaagtaaagaaagcaaaacattatagaaaacatgaacaaaagtctatctataaaatacttagatttgttcaaatattgagttacatgtaagaaaaatataataattaattagggattactcacaaatgtagctgcaatagcacataaaagcttatcaaaatatgctccaaaatctcaatacatatagatatccctaaattacccagagtaagggaaaaaatgatgatattagtcaacttccacttttacgtaatatctgcagggcaataaaatatttacctaatttagtgaagaacaataaaatgtatataacgcttttaatttgagttgattatccttaaaacaacattttgtttagtaaaatgtatacaatcctattagtctgaattgataatcctcatagcaacattttggtatgaaagattttcttttccactgaagacatgcccttgcctgaaagtcttctcttccgaagtgctccctgaatattgcacctgatggctaggattcaactctgctggctcttttttcattgtctccccaaggccaaaaaaagcctggaaaccagctttcatactgttttggggatgagtgattcagttttatttgagtttcttgatttgtatttacctaattctctaaaagcttaaatttagatgtacttttagtttttcttt

SEQ ID NO: 317510 - DNA, 4001 bp, Homo sapiens
actcacaatagataattctataaaatatataataatcaataatttagtaagttggagctacataataaatatagttattaaatgaatttcttatatatcaagctgctccatgatttttaaagaattgttggggaatttctgaatgcatggccagaacccacttttgtttattggaaaatgctctttcacccctttgataacacttttgttttattttaaatttcaatcttgtcagggggcttttactataatcctattttaccaaaatttgccagtgacctctatatagctgtacccctttaaattaatatctgaatgtagacttgaggccaagagatttgtattgtttacctagatccataaagcctggtaggctatctgcagctaggcacagcttactgaatggaaaattatttaaagcaaatcaatacatgtaaattcaaatcatgtctaaggctaaggacatttgaactgggatcctctgaatattagttctgtgaaacagtctatgcataagaattcgttggaatacattaaacaatattttagtgtcgaatataattgtaccttttttcatgtttctacataattctcaaacatatttggataaaaacatgtcttgcattgaccagctctgatcacaactatatgaaaattgcaaagcaaaacaactttttatcagtaaagcaaggaaataaaaataagtcaagtaggtgtatatcagtaaagtaaaaattctactatcttatgccccacaagaccgtaagtcttttaactttttataatattttttcaagtttttgtgaagtaatcacctaagaaattaaagaattctagaaaatgttcaatttaatgactcttgaaaaattaattcaaagaagaccttctgaagattttcttaaatacatgatgagagagaaaataatgattagcattttatttcaatagaaattctataaaattcagactaacaatcagtgattctcaaaaatatgtgatgttgatttgcgctatttggaggaaatacaaaatataatctcttagttattgatgatcatttttaagtatattactggtattaagaaagtaggttatcttacgcttagaacaaatacactttctttatgaaaaacagctacaacattttctaaaaaaactcattgacctgcatatatatgtcatagacaatgtatgacaatttttaaaaatatttcttttgataactaaattaaaaataaaacaaaagtgtcttacctaatgccttactataaaactcttcccaaaaatgatagtcgtaatcctgaatccagaagtggaacaaaactgaaagcattgaattttttactctttccagaaaggtcattctgtctgttagtcctgtcataggcacaggtacataggaaagtggagctggaagtttcccacagcttcgctccatattgcctcctacagaaattctaagtgtgagcacaaaagggactgcaagcaactcagccatcaggtctccacagggaatcacagggtctataagcattacatcgtagttggtttcctgtagcttcttcataagcgtctgattgtagataaagctctcacacatcatttttaaagttcctcttatttcaacaaaaaaatcatttaattttataactgattgccaggttgataagcctggcaagacattcagagctaggtcaacaaatatttcattttcttctgttctgtcctgtggcatatggaccacctcaaatttcaatgcagaaggcttcctgtagtcaattaacgaaggctttgagtgagtcaatactgttacctcatggcctctcactatgagctcttctagaatgaccttgacattaagccaatggctcatgtcacagggccacaccaggactttcccacagaatccacagccaacacagaagagctgcaggagcagaaataccaaagctgacttgtcagacctcatgatggcagttccctcacacactgatctgcaatggttttgtagttactaagcaaggagttgaaatgacaatataagcacagaagttaaaaattaatattttaagagtaaagttcactggtggttgccagtttaacatgtactgaaggtatcaaaaaaatgcaatgtatcagggaaaagttgttccaaccctctagaacttagaaataaaatacataaatatacttttattacctggattgatgataaagaaaaaaatttttcaagtctttagatttaataattcatgtgcagaaacatgcacacaatcacacttacattcattccacactaagtccaaggcatcagatggtttaggacagcacatgtttcacatcccttgctcacaaggacaatacaaaggtttactgagaatatacttagagagtttgggtaactattttgactaattttatataataagtacaaagtgttcagtatttcagaggggaaaatgcacaattgctttaatatgaaataataaaagctttaataaggcatttgacttaggaggtgagatgaaagctttgataggatttactgttgccaaaggaagcatttcacaatcgatagaagcatacaaaagtataggatatttgaaaatcattccagtgagtagtggtcacagagaaagttcagagcaggacgttacagaagaaagttagtttgaaattggagaacataattttaaataaaaaattatgagtttgaatcataatttataggcaaataattatttactcaagttttaaaggatagtcacaagatcaaccttttctttagcaagaaactcttgcatctcaacacagagtggtatgtaaaggtaagagtttaaaacagggaaaacgataaaaattatatattagttactgagacatgtcaacctaatagaatgaaacataaattgttaatagttaaatgcaagaaattaatttaaaatttgaatttactgataatatctgagataggaaaaaatgtgtaggagaaaagacatggttgtggtttctgtcttaataagcagaagtttgataatgacattaggtaaaatattatgcacaaaacttagagcagttttcagaatcaatatcatctaactgggttatttttcctgtagttactgttcaaattttcaacaactgtatgtagatgtgaacaaaaaataaaattttaggaatccccaaccatctaaacggacccttactctcagcaaagagcatttcaaagttaatctcaaaaactagttgaggcaatgatgagaagtggggtggtgggataggatatgcctcattataccctcccccctttctgaattcaggaaaaactcactagcactaccatcaacgcagactttaaaaccaatagaacagactcactaattttgataagaaacatttacaatctattctctctgaagcctgttgcttgacagctttatctgcatgataacaccttggtattaacagccctttatcttaacccagacattcttgtctgttaattctataacttagacaacaatataactcaaccaattgccaatagaaaatccttgaatttgcctatgacctggaagccccactcccagttgtcctgcctatccagaccaagtcaatatataacctacatgtatggattgatgtctaatgtcactctaaattgcattaaaactgtgtagcctgagcaccatgatgacatgttcttagggtctctggagggataaatcacaggccattactgactcatatttggctcagaataaacctctttaaatattttaaagtgttcgactcttttcatcaataacaacttgacacttgaacatgtggggcctcagacaaaactcaggacaccataaaacttgcctgaacttgaagctaaggtagcaacagaggcccactgaatgcctctccaattttgagcttcttctccagtggaactggtatgtcctcttgagtcctggatctcctttcggtatatagtccttgatttattctga

SEQ ID NO: 317511 - DNA, 4001 bp, Homo sapiens
taagataattactttatgtaattttctgaaaggggttagaataatgcaggcaaaaatgttggtaaagtttgtgtgctttgaaaaatatgtacatatattcatatataggaataatttattttttatgtattctatattttgcccttgtttatttataagaaaggcaaagtagtgggagaattatgaggttaagctacatctctaatgtcatgtcagtatactcacaattattaaaataagtcatagagaattaaacatcaatttattttctctttaaagcttcaatagtagcctctagatatttaaacaaatctttgagctccataatcaattaattctacagtaaccatagaaacaattttctaacaaatagtctagtttacacaactcattaagctaatccttttatctttggttcttcaagttaactgtggactattttgtgagtatggctgaaatcattgtaccaactactcatttggatccaagctaagatcttaataatattaagtaaaaatatttgtaaattatagctagaaatttttgagaaattattgaaatagagatctgtactcgaccataatcagtctcgtatttttaaataaagagacatagtttcaaataaactatatagatataacaaccttcacacttcaacaagatgattggactttaaataaaagatttccaattatttagtgaaggagtatagaaacatttgaaacttcaaattacccttattgatttttgcatctgagatatagacattatctctctctactgtgaagacaacctcctggtaacatgggaacatcttttaatttctaaataagacaactgagatttagaaggaaaaatttctgcagttatatagatagttgtagaaaaatgtgtaattactcattctaaatctatgcattcggttagatgttacttgacggatcttgctgtttttaagatctgaaacattctatagtaaaacagatatataattgcttaaagtcttaggtgtactaatatataggtttatgatttcctggggtgttctgtatgagtgatggtcacagcgttttcactgaccctataatttaagcttttctataatatttgtgagattggtagatcatcttgtattttcatttcataaattcatttaccaaaaactccacttccctgactttatggctttatgcaagttgtgcttcaaagacacaaataagttagagcttcatgttactaattgaaaaaaatcttacctaaaacttcactgtaaaactgatcccacttcttcatattaaatatttggaaccaaaagtcaaaataaagcacatagagcatattttttaccctctccatgaaagtcatttgatcacttaattttgacataacaacaggtacgtaggaaggagggaaaataaatcctccactgtgcctttcaaatgagtagccaggactgaagctgtgactgtacacaaagggtatgttaaatagctcagccagcagctcaccacagggtaaataagcatctgcaaaaacgatgtcaaatcttgactcttgtagttttttcataagtttcttatttgaaactacatctttacagaagtttctaattatgtcattaattgcccacaggatttcttgttcttgtgaaaaaggtaaccaaaatgtatctttttgaatttctgacaatctcttaaccaattgcatgatgatattctcaaattcagttttagttaaagatgtaggataaacttcaagtttaagagtggatgagtcgttgggatcaaaaagaatggaagctgaagatgccagtacagtcacctcatgacctctctgaacaagttctttcaggattgtcttcatattcatccaaaggctgtattctgcggcccataccagcacctttccacaactcccagagctaaagtaaaaactgagttgtatcagcagaactgtagtccatttcagagccatccttgtgcaatgtgataattcttttccagtcactgtttctttctcatacttatatacagagataaatcaatcaagttaaaacataactccttcaattcaaagtaaatacattatatgagcatcctgagtacatggatggcaaggagacaaagttcgattacttcatatttactcaaggatgtttgatgtttcttttatgtttatatttggtgtcatccacctaagtttaatgaccttgcaaatatcgtgttttatataatgtattttataatagtgtcaagaacagtggcaagtgagagagtcctgcaggccccttgacacagaatgagagatgaagtaattatacaatgcaaatagaatttttgaatatcttggttcaaggaatattttgtaaaactttgttgaagtataattcacataccatatgattcatgaatgattatttaaaattaaatatttcctagtaaattcacagacttgtgcatccaacatagcaatcagttttatctaaaaaaaaaaaaaatcctgtatattaactgtcatctccccacctgaatttctgcacccacactgtactgggcaaccagtaatctaatttctgcctctacaaatatgcctattcaggatctttttaaaaataaatgaaactatataatatgtggtcttttgtggctggctacttttatttagtttaatgtttttaaaggaccatccatagaatagtgtatataaggatttcatttttattgctttttatcagatgctacttataagcagaaattatttattcatttttcagtggatggacattgattttcttccacttttggccattataaatagcgttcacatttttattgccaaatagtatcagatgctacttataaacacaatttatttattcattcatttatcagtgtacggacattgtttttcttccacttttggccattatgaatagcgttgattaacattgatgtacatgctttctgtagacatgtttttatttttcttgggtatatgcctagaaaggcaattattgaattatgtggtaaatatatgtgtaaacttttgaggaattgctagactttttcacagtgggtgaataattttctattctcaccaacaatgtatgagagtttcagtgtctccaccaacttgccaaacctcatctttcaaataacaaaaaaggttattttctattttaattcattaacacactctaacagacacaaagaaaggaaagtttccttccacatattggagggaaaagggaataaattaaccactaacttacctaatacttcactgtaaaactgatcacacttctttttgttaaaattatcaaatgcaaagttaaaatgaagaaaatgcaaaagatttttcatctttctgtaaatgtattttggtactaagttctgacatgacaacagctacatcagaaggaggtaatgaaagtcctccacagagttcttggtacatactgccagttgtaaatggatgatagtagaccaaatgtataacaaatgtttaacagattaagctgttcagatagcagctcactaatgagaaatgacatctgcaagaatgacataaattctggaatcttgttgttccttataagtttcttgttcaaaacagcatactcacagagcttttgaacagtatcagaacattcataatatgtgttttttgtatctttgaatcatatgccaaaatgtactctttggaaacttgtatgtccatatcttgatcaatttcataaaaatgaaatcaagttcattctcagtaaaagatgtgggataaacctcaaatttaacagcaaattgttggaatcaatgaggatggaagctgaaggtgacaagcacagttacctcttggtgtttctgagcaagttcatcaagtatcattattaaattgatataaagactgtatttcactggccacaccagcacattctcacaggactcagagctagaatacaactgtcagcataagaaacaaaaaagcccatttcttagacaact

SEQ ID NO: 317512 - DNA, 4001 bp, Homo sapiens
taaagaaaagaaaaagtggatgacataagataattactttatgtaattttctgaaaggagttagaataatgtaggcaaaaatgtaggtaaagtttgtatgctttgaaaaatatatacatataggaataatttattttttatgtattctatattttgcccatgtttatttataagaaaggcaaagtggtgggagaattgtgaggttaagctacatctctaatgtcatgtcagtatactcacaattattaaaataagtcatagagaattaaacatcaatttattttctctttaaaactttaatagtagcctctagatatttaaaaaaatctttgagctccataatcaattaattctactgtaaccataaaaaaattttctaactaatagtctagtttacacaaatcattaagctaatccttttatctttggttcttcaagttaaccgtggactattttgagtatggctgaaatcattgtaccaactactcatttggattcaagctaacttcttaataatattaagtaaagatatttataaattatagctagaaatttttgagaaattattgaaacaaatctgtactcaaccttaatctgtctcatatttttaaataaagagacacagtttcaaataaactatatagataagacaactttcacacttcaacgagatgattggactttaaataaatgatttccaattctttagtgaaggagtatagaaacatttgaaacttcaaattaccctcattgatttttgcatctgagatatagacattatctctctctactgtgaagacaacctcctgataacatgggaacatcttttaatttctaaataagacaactgaggtttacaaggaaaattttttgcagttatatagatagttgtagaaagatgtgtaattactcattctaaatctatgcatttggttagatgttacttgatggatcttgctgtttttaaggtctgaaacattctatgataaaacagatgtgtaattgcttaaagtcttaggtgtactaatatataggtatatgatttcctggggtgttgtgtatgagtgatggtcacagcattttcactgaccctataatttaagcttttctataatatttgtgagattgatagaccatcttgtattttcatttcataaattcacttaccaaaaactccacttccttgactttatggctttgtacaagttctgcttcaaagacacaaagaagttagagcttcatgttactgattgaaaaaattcttacctaaaacttcactgtaaaagtgatcccacttcttcatatcaaatatttggtaccaaaagtcaaaataaagcacatagagcacattttttaccctctccatgaaagtcatttgatcacttaattttgacataacaacaggtacgtaggaaggagggaaaataaatcctccactgtgcctttcaaatgagtagccaggagtgaagctgtgactgtacacaaagggtatgttaaatagcgcagccagcagctcaccacagggtaaataagcatctgcaaaaacgatgtcaaatcttgactcttgtagttttttcataagtttcttatttgaaactacatctttacagaagtttctaattatgttattatatgcccacatgatttcttgttcttgtgaaaaatataaccaaaatgtatcttttggaatgttgcatcgtgatattctccaactcagttttagttaaagatgtaggataaacttcgagtttaagagtggatgagtcattgggatcaaaaagaatggaagctgaagatgccagtacagtcacctcatgacctctctgaacaagttctttcaggattgtcttcatattcatccaagggctgtactctgcggcccacaccagcacctttccacaactcccagagctaaagtaacaactgagttgtatcagcagaagaactgaagtttgagttcctttcagagccatcctggtgcaatgtgataattcttttccagtcactgtttctttctcatacttatatacagagaaaaatcaatcaagttaaaacataactccttcaattcaaagtaaatacattatatgagcatcctgagtacatggatggcaaggagacaaagttcgattacttcatatttactcaagaatgtttgatgtttcttttatgtttatatttgctgtcatccacctaagtttaatgaccttgcaagtatcctgttttatataatgtattttgtaatagtgtcaagaacagtggcaagtgagagagtcctgcaggccccttgacacagaataagagatgaagtaattatacaatgcaaatagaatttttgaatatcgtggttcaaggaatatcttgtaaaactttgttgaagtataattcacttaccatatgattcatcaattattatataaaattaaatatttccaagtaagttcacagacttgtgcatccaacataacaatcagttttatctaaaaaaagtcctgtatattaaatatcatctccccacctgaatttctgcatccaccctgcactgggcaaccaataatctaatttctgcctctacaaatatgcttattcaggatctttttaaaaataaatgaaactatataatatgtggtcttttgtggctggcttcttctatttagtttaatgtttttaaaggaccatccatagaatagtgtatataaggatttcatttttatttccaaatagtatcagatgctacttataaccacaaattatttattcattcatcagtggatggacattgattttcttgcacttttggccattatgcatagcgttgatatttttattgccaaatagtatcagatgctacttataaacacaatttatttattcatttatcagtggatggacattgattttcttccacttttggccgttatgaatagcattgattaacattgatgtacatgctttctttgggcatgtttttatttttcttgggtatatgtctagaaaggcaattattgaattgtgtggtaaatatatgtgtaaccttttgaggaattgctggactttttcacagtgggtgaataattttctattctcaaccaacaatgtttgagggtttcagtgtctccaccaacttgccaaaccttgtctttcaaataacaaaaaaggttattttttattttaattcataaacacactctaacagacacaaagaaaggaaagtttccttccacatattggaggaaaagtgaataaattaaacactaacttacctaatacttcactgtaaaactgattccacttctttttgttaaaagtctcaaatgcaaagtcaaaatgaagaaaatggaaaagatttttcacctttctataaatgtattttggtactaagttctgatatgacaacagttacatcagaaggaggtaatgaaagtcttccacagagttcttggtacatactgccagttgtaaatggatgatagtagaccaaatgtataagaaatgtttaacagattaagctgttcagatagcagctcactaatgagaaatgacatctgcaagaatgacataaattctggaatcttgttgttccttgtaagtttcttgttcaaaacagcatactcacagagcttttgaacagtatcagaacattcataatatgtgttttttgcatctttgaatcatatgccaacaatgtactctttgggaacttgtatgtccacatcttgatcaatttcataaaaatgaaatcaagttcattctcagtaaaagatgtgggataaacctcaaatttaacagcaaattgttggaatcaatgaggatggaagctgaaggtgacaagcacagttacctcatggtgtttctgagcaagttcatcaagtatcattattaaattgatataaagactgtatttcactggccacaccagcacattctcatgggactcagagctggaatacaacggtcagcataagaaacaaaaaagcccatttcttagacaactgttaaaa

SEQ ID NO: 317513 - DNA, 4001 bp, Homo sapiens
taaagaaaagaaaaagtggatgatgtaagataattactttacatacctttctgaaaaaggttagaacaatgtaagcaaagatgtaggtaaagtttatgtgctttgaaaaatatataaatatatatgaataatatattattatgtattatatattttgtccatgtttatttataagaaaggcaaagtggtgggagaattatgaggttaagcgacatctctaatgtcaagtcagtatactcacaattattaaaataagtcatagataattaaacatcaatttattttctctttaaagcttcaatagttgcatatagatatttaaacaactctttgagctccataatcaattaattctactgtacccataaaaccaattttctaacagtccagtttacacaactcattaagctaatccttttatctttggttcaagtgaactctgtactattttgagtgtatggcagaaatcctggtaccaactattcatttggatttgagctaagatcttaataatattatcatttaagtaaatatatttgtaaattatagctagaaattttgagaaattattgaaatagagaactgtactcaaccttaatctgtctcatatttttaaataaagagacatggtttcaataaactatatagatataacaaccttcacacttcaacaagataattggacttcaaatgcatgatttccaattctttagttagggagtatagaaatattagaaacttcaaatcacccttattgacttttgcatctgagatgtagacattatctctctctactgtgaaggaaaccttctggaaacatgggaatatctttcaatatctaaataagaaaactgagatttacaaggaaaactttctgcagttacatagatagttgtagaaaaatgtgtaattactcattctatatctatgcattcagtaagatgttacttgatggattttactgtttttaagatctaaaacattatatagtaaaacagatgtgtaattgcttaaattcttaggtgtactaatatataggtttatgatttcctggggtgttctgtttgagtgatggccacagggttttaacagaccttataatttaagcttttctataatgtttgtgagattgatagatcatcttgtattttcatttcataaattcacttaccaaaaactccacttccctgactttatggctttataaaagctctgcttcaaagacacaaataagttagatcttcacgttaccgattaaacaaattcttacctaaaacttcactgtaaaactgatcccacttcttcatatcagacatttggaaccaaaagtcaaaataaagcacatagatcatattttttaccctctccatgaaagtcatttgatcacttaattttgacataacaataggtatgtaggaaggagggaaaatcagtcctccactgtgcctttcaattgtgtagccaggagtaaagcggagactgtacacaaaccgtatgttaagtagcgcagccagcagctcaccacagggaaaaacagcatctgcaaaaacgatgtcaaatcttgactcttgtagttttttcataactttcttatttgaaactacatctttacagaagtttctaaatatgtcatataattcccacaggatttcttgttcttgtgaaaaatataaccaaaagctatcttttcgaatgtctgaccatctcttaacctgttgcatgatgatattctcaaattcagttttagttaaagatgtaggataaacttcaaatttaagagtggatgcatcattgggatcaaaaagaatggaagctgaagatgccagtacagtcacctcatgacctctctgaacaagctctttcaggattgtcttcatattcatccaatggctgtattctgcggcccacaccagcacttttccacaactcccagagctaaagtaacaactgagatgtatcagcagaagaactgaagtccatttcagagtcatcctggtgcaatgcgatcattcttttccagtcactgtttctttctcatacttatatacagagataaatcaatcaagttaaaatataactcctccaatccaaagtaaatatattataggagcatcctgagtacatggatggcaaggagacaaacaaagttcgattacttcatatttactcaaggatgttttatgtttcttttatgtttatattcactgtcatccacctaagattaatgaccttgcaagtaccctgttttatgtaacctactttataatagtgtcaagaacagtggcaagtgagagagtcctgcagagcccttgacacagaataagagatgaaatgattgtacaatgcaaacagcatttttgaatatcgtggttcaatgaatatcttgtaaatctttgttggagtataattcaaataccatatgattcatcaattagtatttaaaattaagtatttcctagtaaattcacagacttgtgcatccaacgtaacaatcagttttatctaaaaaaacaaaaaactcctgtgtattagttctcatctccccaccaaatttctgcatccaccctgcactaggcaaccagtaatctaatttctgcctctagaaacacacctattcaggatctttttaaaagtaaacggaacaatatagtatgtggtcttttgtggctggcttcttttatttagtttaatgtttttaaaggaccatccgtagaatagtgtaaataaggacttcatttttattgccaaattgtatcagatgctatttataaacacaatttatttattcatttataagttgatagatattgattttcttccacttttggccattatgaatagcattgattaacattgatgtgcatgaattctgtggacatgtttttatttttcttggggatatgcctagaaaggcaattactgaattatgtggtaaatgtaaatataaccttttgaggaattgctagactttttcagagtgagtgaataattttctattctcaccaacaatgtatgagggtttcaatgtctccacaaccttgcccacccttgtctttcacataaccaaaaaagttattttttattttaatttataaacacactccaacagacccaaaaaaggaaggtttccttccacatattggagggaaaagtgaataaattaaataataacttacctaatacttcactgtaaaactaatctcacttctttttgttaaaaatctcaaatgcaaagtcaaaatgaagaaaatgcaacagatttttcacctttctacaaatgtgttttggtactaagttctgatatgacaacagttacatcagaaggaggtaatgtaagtcctccacagagttcttggtacatactgccagttgtaaatggatgatagtagaccaaatgtataacaaatgtttaacagactaagctgttcagataacagctcactactgagaactgacatctgcaagaatgacataaattctggaatcttgttgttcctcataattttcttgttcaaaacagcatactcaatgagcttttgaacagtatcagaacattcatgatatgtagtttttgcatctttgaatcatatgccaacaatgtactctttggaaacttatatgtccacatcttgatcaatttcataaatatgaaatcaagttccttctgagtaaaagatgtgggataaacctcaaatttaacagcagattgttggaatcaatgaggatggaagctgaaggtgacaagcacagttacctcatggtgttctgagcaagttcatcaagtatcaacattaaattgatacaaagactgtatttcatcggccacaccagcacattctcgcaggattcagggctaaaatacaactgtcagcataagaaacaaaaaagcccatttcttagacaacttgttaaaatgctatctttctttataactttctctaacttggtacatatcaatatcaatcaatgtcacaatgatttaagtattgacaatagaggtt

SEQ ID NO: 317514 - DNA, 4001 bp, Homo sapiens
agtcatgtagaactgagtctattaaacttcttttctttataaattacccagtctcaggtatttctttacagcagtgtgagaatggactaatgtagccactatgaacttaaatacacatttgtcttccctctgaagctgcaatagtaacaaatatacctttaaacaactctttcagttccacaattaattcatcttaccttacccatgaaaacagctttccaggaagtactctagtgtctacagtttattaagctagtcccttgatccttggttctcaaagtaaaccatgagttttttgagctcaacactgaaatctttacacctactactgtcttggttcatcttaagatcttaatataattagatttttaaaataaatatatttacaaatgagaattaaaacattttcagaatttattgacatagagatatgtgctctcccttaatttggcccctattttctttgatggagagatgcagtttaataaaatatagattaaaacttagatgttcactttcaacaagatttcagtttttgaaagaaataattgtcaacctgttattgaaggaatgtataaacattagaaatctcaagttttaggcttctgtttctggagtagagccactatattactcaactgtgaaggaatccttcttacatgaaaaacaaaatttaatttctaaatgaggaaactgaggaactcaaagagaaacaaattcctcaatcctgcattgataatttttctagaaatatgtgtaaatactaaatttatgtgtctgccttcatgaagatgtttcttgaggtatctattgactttttttaaagatgaaaaaatgtatagcaaaatgatatgtgatagtttaaagaaatcattagtgctttacaatgaaggtttatgactctctgggtgtcctgtagtagtgatggccccagggttctaactgattctataaggtcaacattctataatatttttgagactgatagatcatcttacatttgcaattcataatttcccttaaaaacactatcttctgacattatatttatataagctcaccttcaaaggcacagaaaagttagaacttaataagcaccagttagacacatgacttacctagaacttcactataaaactggtcccacttcttcagatcataaatttgaaaccaaaagtcaaaataaagcatatgtatcatattttttatcctctccatgaaaatcatttgatcacttaattctgacataacaacaggtacataggaaggagggaacagaaatcctccaccattcttctcaaatgtgtagccaacagagaatcgaagactgtacagaaagggtatgttaaatagttcagccagtagctcaccacagggattaagggcatctgccagaatgacatcaaactttgactcttgtagtttcatcataagtttcttattcaaaactgcatctttacagagcttgttactgtagtcataatattcccaacacaattcttgtaattgtgaaaaatatgaccaaaatgtattttttgaaacaccatatatccatctatcgagaattttcagaagagaatcttccaaataatttttagttaaagatgtaggataaacttctaatttaatagcagatgatttactggcattgacaagagtagaagccgaagatgtcaacacagtcacctcatgacccctctgaacaagctcttccaggattgtcttcatatttatccaatggctgtattctgtgggccacactagcacctttccacagcttccagagctaaagtaacaactgagctgtatcagcagaaagactgacgtccatttcagagacatcctggtcttatgcaatgcttcttttccagttgttgtttctttctgtcatttctcatacttatatctgaggaaaaatcaatcaagttaaaatataactgctaaaatttgaagtaaatacataatactaacagtctgaataggtgcatgccaaggagaccaacaaaagattgatgacctcatatttattttagtgtgtttggtgttcttttatgtttacaattactctagtcaagcaataatttttatgacctagaatatgtaagtaacctgtcttatgtaattattttataatactgttaagaacagtggcaagtgagaggctcctgcctgttcggtgcccttgacatagagagaagaagtaattatacaactcaaacggcattttttaatatcgtggtgcaagtaatgtcttctaaaactttgttgacacataattcatataccatatgactcaccaattagtgtgtacagttcaatgtttcctagtatattcacagaattttacatccactacaataatcagtattatctccaaaagattctatacaatagcctctaaccccccactctgaaattttgcatccatcctaccctaggcaaccactaatctaatttctatctctatagattagcattttctggaccctttaaaaaataaatgagggttttccagtgatcatggcagatgggatgcaggactagattgcagctccagacagagcagcatgcagaggcttgcattgtgaattttagctgcagatcaactgcaagaacagaccagcaattctgagaggatccacacaccctctgcaggaagagtactgctcctgcaggacctgggagacatcccaaacactgtgagtgccccaacaatggaagtgggaaagggtgatccccctctccagaatacacatccccactggagaagctgaagttctgtttgcaggagaagttcctgactttatgtgaagctgagtcaaattagagaaccaagccaagcaaaatacaggggtagaggaagtagcagaaaggcactgggagctctctggatacccaagcggctcattcctgcctggcatcacagggatctatcaggagggtggccagtgatgcagggggttcaaagattctcctcaggacctgaaggcttgaagggatgagtaactcctcccttctcaggcccagccccaagatgcaagaccacttgcatcagcagcgtgtgtcagcaagatagcagaagcaggaagagagccggccagaagacacttaccctggctggaagagatgtacccctgaagatcaagaaataggccatccaggtactacatagcagtcacaacagactgggacacttactgtttacagaggactacaaaacccctgtcccatcctcacttggggctgatgccattttaggcctcagcccacctgcaaccaggcgttcattaaaacagcatgttgctccacaccgcctcctgttgtctgttggcgcgctgttggggttcaaactgattcaagaaccttacatctggtgccaaatcctaggaggggctcaggtctgtgtcgcttgtggacctatccctccaccccagagagcaggccacagcaattagacagaggaagctcctcagcctccagtcgcctctctgtgcatgcgcatcagccactgatctcgcctactggtaagtttcccttggagcccggttaacagggcaaaatctacatggcctctcttggtttctccagtccaaaaatccaacactgatccaagaaggcgccagcgtgcgccaggcactcgctggtcatctggtcttagggggatgcctctaagccatttcatcccgttccaggaaccaaaaaggcagcggagacgataactccttttatcgtctccctccagctgtccaggatggtctcctttttccctgttctctcgagctacccttcattatgggaaactcccggtcctcaattccaaaaaacagccctccagcctgcctcattaaaaatctgcaaaccttaggcctcaggcaagatatctgccataagtgccttgtcttttttatacgataaagcctggtcgcagtatgaattagataacgggtccaaatggcccgcaaatggaacactcagctttacagttttaactgacttaagca

SEQ ID NO: 317515 - DNA, 4001 bp, Homo sapiens
atagttttataagtgtctggtatttcccctgcttgcacttctctctcctgccactaagtgagaagatccaagcttgcttccccttagcctttcaccatgattctaagtttcttgaggcatcccagtcatgtagaactgagtctattaaacttcttttctttataaattgcccagtctcaggtatttctttacagcagtgtgagaatggactaatgtagccactatgaacttaaatacacatttgtcttccctctgaagctgcaatagtaacaaatatacctttaaacaactctttcagttccacaattaattcatcttaccttacccatgaaaacagctttccaggaagtactctagtgtctacagtttattaagctagtcccttgatccttggttctcaaagtaaaccatgagttttttgagctcaacactgaaatctttacacctactactgtcttggttcatcttaagatcttaatataattagatttttaaaataaatatatttacaaatgagaattaaaaatttttcagaatttattgacatagagatatgtgctcttccttattttggcccctattttctttgatggagagatgcagtttaataaaatatagattaaaacttagatgttcactttcaacaagatttcagtttttgaaggaaataattgtgaagttgttattgaaggaatgtataaatattagaaatctcaagttttaggcttctgtttctggagtagagccactatatttctcaactgtgaaggaatccttcttatatgaaaaacaaaatttaatttctaaatgaggaaactgaggtactcaggtacaagttcctcaatcctgcattgataatatttttagaaatatgtgtaaatataaaatttgtatgtctgccttcatgaagatgtttcttgaagtatctattgacttttttaaagatgaaaaaatgtatagcaaaatgatatgtgatggcttaaagaaatcataagtgttttacattgaaggtttatgactctcttggtgtcctatagcagtgatggcaccagggttctaactgattctataaggtcaacattctatatttttgagactcatagatcatcttacatttgcaattcataatttcccataaaaacactatcttctgacattatatttatataagcccaccttcaaaggcacaggaaaattagaacttaataaacaccaattggacacacgacttacctagaacttcactataaaactggtcccacttcttcagatcatatgcttgaaaccaaaagtcaaaataaagcatatatatcatattttttatcctctccatgaaaatcatttgatcacttaattctgacataacaacaggtacataggaaggagggaacagaaatcctccaccattcttctcaactgtgtagccaacagagaagcggagactgtacagaaagggtatgttaagtagctcagccagcagctcaccacagggattaacggcatctgccagaaggacatcaaattttgactcttgtagttttctcataagtttcttgttcaaaactgcatcttcacagagctttatattatagtcagaatattcccaacacaattcttgtagttgtgaaaaatatgaccaaaatgtattttttgaaatactatatgtccatctatcgaacattttcataaaaaaatcttccaaatcatttttagttaaagatgtaggataaacttctaatttaatagcagatgatttactggcattgacaagaatagaagccgaagatgtcaacacaatcacctcatgacccctctgaacaagctcttccaggattgtcttcatatttatccaatggctgtattctgtgggccacaccagcacctttccacaactcccagagctaaagtaacaactgagctgcatcagcagaaagactgacatccatttcagagacatcctggtcttatgcagtgcttcttttccagttgttgtttctttctgtcatttctcatacttatatctgaggaaaaatcaatcaagttaaaatataactgctaaaatttgagttgacctcatatttattttagtgtgtttggtgttcttttatatttacaattactctagtcaagcaataatttttatgacctagaatacgtaagtaacctgtcttatgtaattattttataatactgttaagaacagtggcaggtgagaggctcctgcctgttcggtgcccttgacatagagagaagaagtaattatacaactcaaacgccattttttaatatcgtggtgcaagtaatgtcttctaaaactttgttgacacataattcatataccatatgactcaccaattagtgtgtacagttcaatgtttcctagtatattcacagaattttactttcactacaataatcagtattatctccaaaagattctatacaatagcctctaaccccccactctgaaattttgcatccatcctaccctaggcaaccactaatctaatttctatctctatagattagcattttctggaccctttaaaaaataaatgagggttttccagtgatcatggcagatgggatgcaggactagattgcagctccagacagagcagcatgcagaggcttgcattgtgaattttagctgcaggtcaactgcaaggacagaccagcaattctgagaggatccacacaccctctgcaggaagcgtactgctcctgcaggacctgggagacatcccaaacactgtgagtgccccaacaatggaagtgggaaagggtgatccccctctccagaatacacatccccactggagaagctgaagttctgtttgcaggagaagttcctgactttatgtgaagctgagtcaaattagagaaccaagccaagcaaaatataggggtagaggaagtagcagaaaggtactgggagctctctggatacccaagcagctcattcctgcctggcaccacagtgatcctttaggagggtggccagcggagcagggggttcaaagattcttctggggcctgaaagcttgaagggatgagtaactcctcccttctcaggcccagtcccaagatgcaaggctgcttgcatcagcagcgtgtgtcagcaagatagcagaagcaggaagagagccggccagaagacacctaccctggctggagacatgaacccttgaagatcaagaggccatccagatactacatagcagtcacgttagattgggacacttactctttacagagaactataaaaccactgtcccatcctcacttggggctgatgccattttaggcctcagcccacctgcacccaggcactcattaaaacagcacgctgctccgcactgcctcgtgttgtctgttggcatgctctcagggatcaaaccaattcaagaaccttatatctggtgccaaaacctgggtggggctcaggtctgtgtcccttgtggacctacccctccaccccagagagcaagccacagcaaccagacaaaggaaactcctcagcctccagttgcctctctgtgcatgtgtagcaggatgagccacagacaaaacttctcagacaccaagttgtagaaggaagggctttattcagctgggagcatcggcaagctactgccttaaaatccaagctcctcaagtgcgcaatttttgtcctttttaagggctcacaacactaaagatttcacatgaaatggtcgtgattgatttaagcaagcagtgggtatgtgacaggtgctgcatgcactgctggtcagagagaaacagaacagggcagggggttttacagtgttcttctgtacaatgtctggaatctctgaataacatcggtttctaagttatgagttgatttttaactactgggtttaggtcaggcaggcccaggcctggtttcaggcctggagccaggctgcctgtctttggttttacttctttgttgttttttcttaaaacaggtactgagcataaaacaatataaaata

SEQ ID NO: 317516 - DNA, 4001 bp, Homo sapiens
gaaaagaaaaagtggatgatgtaagataattactttacataactttctgaaaggggttagaattatgtaggcaaagatgtaggtaaagtttgtgtgctttgaaaaatatatacatatattcatgtatatgaataatatatttttatgtattatatattttgtccatgtttatttataagaaaggcaaagtggtgggagaattatgaagttaagcgacatctctaatgtcaagtcagtgtactcacaattattaaaataagtcatagaaaattaaacatcaatttattttctctttaaagcttcaatagttgcatatagatatttaaacaactctttgagctccataatcaattaattctactgtacccataaaaccaattttctaacagtccagtttacacaactccttaagctaatccttttatctttggttcttcaagtgaactcggactattttgagagtatggcagaaatccttgtaccaactactcatttggatttgagctaagatcttaataatattatcatttaagtaaatatatttgtaaattatagctagaaatttttgagaaattattgaaatagagatctgtactcaaccttaatctgtctcatatttttaaataaagagacatagtttcaaataaactatatagatataacaaccttcacacttcaacaagataattggactttaaatgaatgaattccaattctttagtgaaggagtatagaaacattagaaacttcaaattaccctgattaacttttgcatctgagatgtggacattatctctctctactgtgaaggaaaccttctggaaacatgggaatatcttttaatacctaaaaaagaaaactgaggtttacaaggaaaactttctgcagttatatagatagttgtagaaaaatgtgtaattactcattctaaatctatgcattcagtaagatgttacttgatggatttcactgtttttaagatctaaaacattatatagtaaaacagatgtgtaattgcttaaagtcttaggtgtactaatatataggtttatgatttcctggggtgttctgtatgagtgatggccacagggttttaacagaccttataatttaagcttttctataatgtttgtgagattgatagatcatcttgtattttcatttcataaattcacttaccaaaaactccacttccctgactttatggctttatataagctctgcttcaaagacacaaataagttagatcttcaagttcccgattaaacaaattcttacctaaaacttcactgtaaaactgatcccacttcttcatatcacacatttggaaccaaaagtcaaaataaagcacatagatcatgttttttaccctctccatgaaagtcatttgatcacttaattttgacataacaacaggtatgtaggaaggagggaaaatcagtcctccactgtgcctttcaattgtgtagccaggagtgaagcagagactgtacacaaacggtatgttaagtagcgcagccagcagctcaccacaaggaaaaaaagcatctgcaaaaatgatgtcaaatcttgactcttgtagttttttcataactttcttatttgaaactacatctttacagaagtttctaaatatgtcatgaaattcccacaggatttcttgttcttgtgaaaaatataaccaaaagctatctttttgaatgtctgaccatctcttaacctgttgcatgatgatattctcaaattcagttttagttaaagatgtaggataaacttcgagtttaagagtgaatgcgtcattgggatcaaaaagaatggaagctgaagatgccagtacagtcacctcatgacctctctgaacaagctctttcaggattgtcttcatattcatccaatggctgtattcaccggtccacaccagcacctttccacaactcccagagctaaagtaacaaccgagatgtatcagcagaagaactgaagtccacttcagagccatcctggtgcaatgcaatcattcttttcaagtcactgtttctttctcatacttatatacagagataaatcaatcaagttaaaacataactccttcaatccaaagtaaatatattataggagcatcctgagtacatggatgacaaggagacaaagtttgattacttcatatttactcaaggatgtttgatgtttcttttatgtttatattcgctgtcatccacctaagattaatgaccttgcaagtaccctgttttatgtaacctattttataatagtgtcaagaatagtggcaagtgagagagtcctgcagggcccttgacacagagtaagagatgaagtgatcgtacaatgcaaatagcgtttttgaatatcgtggttcaaggaatatcttgtaaaactttgttgaagtataattcaaataccatatgattcatcaattagtatttaaaattaagtatttccttgtaaattcacagacttgtgcatccaacataacaatcagttttatctaaaaaaacaaaaaactcctgtgtattagctctcatctccccaccaaatttctgcacccgccctgcactgggcaaccagtaatctaatttctgcctctagaaatacacctattcaggctctttctaaaagtaaatggaacgatataatatgtggtcttttgtggctggcttcctttacttagtttaatgtttttaaaggaccatccatagaatagtgtaaataaggacttcatttttattgccaaatagttatcagatgctatttataaacacaatttatttattcatttaatagttgatggatactgatttacttccacttttggtcattatgaatagcattgtttaacattgatgtgcatgatttctgtggacatgtttttatttttcttggggatatgcctagaaaggcaattactgaattatgtggtaaatgtaagtgtaatcttttgaggaattgctagactttttcagagtgggtgaataattttctattctcaccaacaatgtatgagggtttcaatgtctccacaaccttgcccacccttgtctttcacataaccaaaaaggttattttttacttcaatttataaacacactctaacagaccccaaaaaggaaggtttccttccacatattggagggaaaagtgaataaattaagtactaacttacctaatacttcactgtacaactgatcccacttctttctgttaaaaatctcaaatgcaaagtcaaaatgaagaaaatgcaacagatttttcacctttctacaaatgtatattggtactaagttctgatatgacaacagttacatcagaaggaggtaatgtaagtcctccacagagttcttggtacatactgccagttgtaaattgatgattgtagaccaaatgtataacaaatgtttaacagattaaggtgttcagatagcagctcactactgagaacttacatttgcaagaatgatataaattctggaatcttgttgttcctcataattttcttgttcaaaacagcatactcacagagcttttgaacagtatcagaacattcatgatatgtagtttttgcatctttgaatcatatgtcaacaatgtactctttggaaacttatatgtccacatcttgatcaacttcataaaaatgaaatcaagttccttctgagtaaaagatgtgggataaacctcaaatttaacagcagattgttggaatcaatgaggatggaagctgaaggtgacaagcacagttacctcacggtgttctgagcaagttcatcaactatcaacattaaattgatacaaagactatttcatcggccacaccagcacattctaacaggactcagagctagaatacaactgtcagcataagaaacaaaaaagtccatttcttagacaacttgttaaaatgctatctttctttataactttctctaacttggtacatatcaatatcaatcaatgtcacaatgatttaagtattgacaatagag

SEQ ID NO: 317517 - DNA, 4001 bp, Homo sapiens
aagttagaataatgtgggcaaaaatgtaggcaaagtgtttgtgccttgaaaaaaaatacatatattcgtatataggcataatttaatttttatgtattatatattttacccatgtgtatttacaagaaaggcaaagtggtgagagaatcatgagggaaaactgcatccctcatgtcacatcagtatattcacaatcacaaacaagccatagagaattaatctccatttctttattttgtaaaccttcgatagtagcagatatacgtataaaccactctttgagctccgtgatcaattaattctaccatacccataaaaacaattttctaacaaatagtctaatttcccattcattaatctaatcttttatctttggttcttcaggttaactgttgattattttgaaatgatggctgaaatccttgtacctactactgcttttgagtcatgctaacctcataataatattagtttttaggtaaatatgtttgcaaattacagctagaaaattttgagaacttgttgaaacagaaatttgcattcaaccttaatttggctcatatttttaaagaaagatacatagtttcaaaaaaaaactatacagttgtaacttaatgttcacactttgacaagatgattagccttaaaataaatggtttccaatcctttagtgaaggaatagaaacactggaaacttcaaataacatgcattggtttttgattctgaaatggagacatcatttctctcaactgtggaggaaacgttctagtaacatgggtacatattgcaattactaaataataagactgaaatatacaagaaaaaacaatttctgcaatgttatatagatagttctaaaaaatgtgtaactactcaatctaccagtatgcattcagcaagatgtttctgaataagtctgacttttttttaagatgaaaaaatgtataataaaacagatatgtgattgcttaaagaaatcttaggtgcactaatatacaggcttatgacttcctggagtcttctgtatgagtgatggccacagagttttaactgatcctataatttacattttctatagtgcttgtgagtttggtagatcatcttacaatttcatttgataaattcattacaaaaataccccactaccctgactttatggctttatacaaactcagcttcaaaggtacaagaaagttagatcttcatgttaccaatcaaaaaagttacttacctagaacttcactgtagaactgatcccacttcttcatgtcaaatatttggaaccaaaattcaaaataaagcacatagatcatattttttaccctctctatgaaagtcatttggtcacttagttctgacataacaacaggcacataggaaggagggaacagaagtcctccactatgcttttcaattgcgtagccaggagagaagcggaggctgtagacaaagggtattttaagtaactcggccagcagctcaccaaaggggaaaacagcatctgcaagaacaacatcaaatcttgactcctgtagtttcttcataagtttcttatttgaaactatatccttacagaactttctaagtatgtcattaaatgtccacatgatttcttgtacttgtgaaaaatatgaccaaaatgtgtcttttggaagttctgcccatctcttaaccagctgcttgataatatcctcaaactcagttttagttaaagatacaggataaacttcaaatttaagagtagatgggctgttgggatcgaaagaaatggaagctgaagatgccaatacagtcacctcatgacctctctggacaagttcatccaggattgtctttatattcatccagtggctgaattctgtgggccacaccagcacctttccacaactcccagagctaaagtaacagctcagctgtatcagcagaagagctgaagtccatttcatagacatcctgatgcaatgcaatgcttgttttccagttgctgctcctttctgtcatttctcatggtgacatccagtataaatcagtcaagaagttaaaatgtaacttttacacttcaaagtaaatacattatattaacagtctgagcatgtggatgacaaagagacaaataaaaggtagatgacctgtttacacaagtgcgtttaatgttctttttggatttttttttttttgagagctcactgcaagctcctcctcccaggttcacaccactctcctgcctcagcctcctgagtagctgggactacagacaggcacctgccaccgcacccagctaatttttctgtatttttagtagagatggggtttcactgtattcggcaggatggtctcgaacccctgaccttgtgatctgccctccttggcctcccaaagtgctgggattacaggcgtgagccaccgcacccagccctagatttttaagtgctgtaattcagctaatatcaatgatcttggatggactcatcacctgactcatgtaatatatttcagaatagtgtgcataagagtagcagtgagaggctcatgttcctgcagtctctttgacacagaactaaagataaaatagctaaatgtggttcaaaaacttttgtaaatttgttgacgtataattcagatatcatacaaattatcaattattgtgtaaaatttaatgtttcatagtatattcacagaattgtgcttctaccgtaagagtcaattttagagaactcttatctcctaaaaataaaccctataagctttagccttttactccctaccccttctttctgcatttgtcctatcctgggcaactgctacttgaatttctgtctctatagatttgcctattctggacattttttaaatacatggaatcacacaatatgtgatattttatggctggcttattttacttagcataatattttaaaggttcatttatgatatagcatttacgtgttgattcttacaaccatcatgtatgatttagagagtttcaagatgaaactattcctatagactttgttgaattaatgaaggacaaagggaggggaaaaaaaaaaaaaaagtaaaccaagcctgtagtacattcagtattaattattacattagcttgctctctgactcacttcctaatagttttttggctattgtcttagaattatgcagacattgttacaagattaaagttcatcttaactgttctatagataataacttaaacattttgaaatgtggttttctctttgaggtattccttcaggtccagcatactgatgaaactactgactcagctggtctgagggacctccctgatgccagctgctctcaaggaccccacaaggagctgactcaccaaagaatgcagtttccaactcctactgattttatcttcattatcctgactaatctatgactccaatttttcagtccatcaccctccattaaccccttaaaaactccagcccagatttccttgaggaggtaagtttgagggcctccaactatcttccttctcagtgccctccaattattatactctttctttgttgcaaaacataatgtctcattgtaattggtctattattgcagagtgggcatatgaacctgttggccctataacaaagacttcagtggaggaaataactgcagatgtggtggaaatagaaagataactcaaattagaagtggaacttgaagacgtaagtaaactgctgcaatctcgtgataaaacaaatacatgaggagttacttcttatggaagagaaaagaaagttgtttcttgagattgaatctactcctggtgaagattatgtgaacattgctgaaatgacaacaatagatttagaatatgacttaaatttacttaataaagcagcattagactttcagaggattgattccagttttgaaagaagtaccactatgggaaaattgctatcaaacaaaaatgtatgctaaacagaaatcttttgtgaaaagaagggttagtggatgtggcatatgccattgt

SEQ ID NO: 317518 - DNA, 4001 bp, Homo sapiens
tcaaaagagctagagtctttctctggattaggctttggtttaaggaatgtttgtggctgctttgatctatctagattaaattttcttcacgtcagcgataatgcagattaacttcttgccatttgtacattcactggagtaatacttgtaatttctttcaataactttttgtttctgtattcacaactaggttaactgctgcaagaggcctagatttcagcctatctcagctttcaacatgccttcctcacttatcttaataatttccgacttttgatttaaagtgaaacacgtggtactctctctttcacttgaacacttagagagctttgtaagattattaactggtttaattttaacgttgtcgtttctcaggaataggccagaggagagggagagagatgggaaaaagtggttcatggggcactcagtagacaaataatatgtaataagtttgatatcttatatgggcataatttgtgacacccacaaacaattacaatagtaatatgaaaaatcactgatcacagctcaacataaggaatatagcaatgatgaaaaagattaaagctttatgaaaattagcaaaatgtgtcacaaagatataaattgatgatttgctgttggaaaaatcatgttaatagatttgtttgattataagattgccacaaaccctcaacttatgagaaaaaaaaacccaaatatctgcaaagcatgataaaacaaagtgcaataaaataaggtatgcttatcctatgaagcatattataatgcatcatgtttctggtgcagggtcatcagaaaaccagagaacataattatccctctatggagcaatcagaaaaagctggtgtgacagataacatacagggtaagacaaaagctttggcaggatctaggcagagtgtggctaacggaaagaattcacagtgagtagaatgagaaaaggtcatggtatttagaaagcattccagtaagtatgaattttagattaaattgtgtgccagagattatttttaaaaattggttgaaattggagaccttacatagctttgtacagtacatatggggttttattttaatttacaggaaaaataaccaagtatttaagaaagccagtcaaaatgtcaagtgtttgtttgtttgtatgttttgttttaagcaatcaactcttgttgccaaacacagattgacaagtaaagtcaagagctcacatgtaggaaaaatgattaaaatgtatattagtagactaagtatgagaccataagggctggggcttgtcttgataatagtaaatgtgaagaacagagattaaatttgtgaatactgactgcatctgagactagaagaaatgcacaaaagcaaaggcactgatgtggtttctacatgaatgatcaaaacacagataatgatattaggtaaagtatgataccaaacatgaatggcatgtttggaaaaaaaatatgaaccatttgaaatttgtgttccttcagagcttaattttttaataagtattttccatataaataattataaatttttggagactcattttttgggcaacgtgatatagtttcaagatatgggttagacaatagattatctactcaggtatctatgcacctgccattttttcacattacacattcaatgcacaatttatagcacttacctaatccattcgttgatgagacatgtaagagagcaaaaaacattatgatgtagtccctgtgctcaagcagctcacatgtttatatttaaacaagttgactaacatttatgtttatattaaagaaagggctccaggctgggcgaggtggctcacaccgttaatcccagcactttgggaggccaaggcgggtggatcaagaggtcaggagatccagaccatcctggctaacacggtgaaaccccatctctactaaaaatacaaaaaattagccaggcttggtggccggcgcctgtagtcccagctactccggagtctgaggcaggagaatggcgtgaacccgggaggcggagcttagagtgagctgagattgcgccactgcactccagcctggacaacagagccacagagccagactgcgtttcaaaaaaaaaaaaaaaaaaaaaaaaaaaaaaaaaaaaaaaaaggctccaatagagatagtccatagtgaagagtgtttaaagaatatttagtacagaaagccaaacacatttaattctttcagataaagctatgcttcagctgtgacatgtctctaagtgcttagaaagtcaaaggaatgctatttaaaacccaaaccaactttaatagcttctccttgctaagaagagaaccataagcaaattgggagatatagtcattgatggaatttttgagagagggtgaaaggatcagagattttatagtttctggtaatttttttttctttgttgttgtttttgttggatacaacaaatgtgtcagagtctcagggtaatttatttagcagaacctatttgagaggaagatttataattagcagttggataattttttctttcataaataggcaagattgtaatagagtttcttgtagcaattgagacaatgaatggcactccagaggaaaagaaaaaaatgcaaaaaaatagtaataaaggaaatttcttagaagaaactgaattaaaaactctttgaaaggaaatattattttcaagctgtatacaaagctcaggcatgctaggattactgtatggctgtatcacttttatgaaacacacaaattggattaaaaagtttattcataatagcaaaagacaaatgtcctgtgggaagattatatttgcaatatatatgccaaataaagatgaattttgcttatgctagaaacttgaccctatccagagaggccaagcagatacttatatgatctggtggcagaatataatttttaaaaaatttttcttgggagtaagttgccagtatgtaacaaatttgagaatgtactgtttccctgaaagctactagaagacacaggagaaatgaccataaagaggaaaacactagacctaaaaattgtacactcaactgagcacaatgacaaagagatactgatgactaagataggcacataatgcctggatagtaaagtcttcacattagagattgtacgtggataattctaagaaaaatatttctggaaaacagagaatcttttcaataggtatacatgcactccttaaggtaaagttaagattatgatacagtatgatatagtattatgtaagtaacaacataataaaaattatataaataaaaagcaaaacatgaagttgcagaacagaaaggtagacaaaatacaatatttgactctccagtgaatgaatgtacaaagactatagaatataattactaattccaaagtagtggtggcttacagtaattaagaatgaacgcaaaggtgatgaaagttttaagggaagtaaaacttaggtaagggaacatacctcaataaataatgaataaacttaataaatcttaataaatcttaaataaacttaagaaagacctgtgacaatatgctatgttgtggaaaatggatatgactatatttttatagtctgagaaatttaacggtgtttatctttttggatcaccccttcaatatgctttaattagttaaaaatcaatgtggactctcacaataaaacattatgaataaatgttaaaaatattagatttttaaaccagaaattccattgtcagtaacatattctaagatttagttacaatatgtacatcaagaatattcactgaaccattctgatggttaattttaggtgtcgacttgattggattgaaaaatgcctagatagctggtaaagtagtgtttctgggtgtgtctgtgatggtgttaccagaggagattgacatttgagtcattggacagggaggagaagacccacccttaatgtgggtgggcataatccaatcagctgccagcacagctagaacaaagcaagcagaaggc

SEQ ID NO: 317519 - DNA, 4001 bp, Homo sapiens
aggggttagaataatgtaggcaaaaatgtaggcaaatatctgtgctttgaaaaatatatacacatattcatatatagatataatttaattttatgtattacatattttgcccatgtgtatttataagaaagacaaagtagtaggagaattgtgaggttaagctacatctctaatgtcgcatcagtatgctcataatcataaacaattattaaaatgagccatagaaagttaaacagaaaatttcttttctcttaaagcttcaatagtagcatacggacatttaaacaactctttgagctccataatcaattaattctactctacccataaaaataattttctaagaaatagtctagtttacacaactcattaagctaattcttttatctttggttcaagtgaactgtggactatgttgagagtatggctgaaatccttgtaccaactactcttttagattcaagctaagatcttaataatatttttaagtaaatatatttgtacattatagctagaaatttttgagaaattattgaaataaaaatttgtactcaaccttaatttgtctcatatgttctaataaagagacatagtttcaaaaaactatgtagatataacaaccttcacacttcaacaagatgattggactttaaattaatgatttccaattctttcgtgaaagagtatagaaacattagaaacttcaaattgcccttattgatttttgcatctgaggtatagacattatctctctttactgtgaaggaaaccttctggtaatatgggaacatcttttgatttctaaataagaaaacaagtttacaagaaaaaacaatttctgcagttatatagatagttgtagaaaaatgtgtaactactcattctaaatctatgcattcagtaagaagttatttgatggattttactgtttttaagatgtaaaacaatgtatagtaaaacagatgtgtaattgcttaaagtcttagatgcactaatgtataggtttatgatttcctggggtgttctgtgtgagtgatggccacagggttttaactgaccctgtaatttaagcttttctataatatttgtgagattaatagatcatcttgtatttttgttttataaattcacttaccaaaaccccactaccctgactttatggctttatataagctctgcttcaaagacacaaataagttagagcttcatgttactgattgaaaaaaatacttacctagaacttcactataaaactgatcccacttcttcatgtcaaatatttcgaaccaaaagtcaaagtaaagcacatagatcatattttttaccctctccatgaaagtcatttgatcagttaattctgacataacaacaggtacgtaggaaggagggaaaataaatcctccactatgcttttcaaaagtgtagccaggagagaagctgagactgtacacaaagggtatgttaaatagctcagccagcagctcactacagggaaaaatagcatctgcaaaaatgacgtcaaatcttgactcttgtacttttttcataaatttcttatttgaaactacatctttacagaactttctagttatgtcaccaaatattgacatgatttcctgtacttgtgaaaaatataaccaaaatgtatcttttggaaggtctgaccatctcttaatctgttgcatgatgaaattctccaactcagttttagttaaagatgtgggataaatttcaattttaagagcggatgagttgttgggatcaaaaagaatggaagctgaagatgccagtacagtcacctcatgacctctctgaataagctcatccaggattgtctttatattcatccaatggctgtattctgctgcccacaccagcacctttccacaattcccagagctaaagcaaaagctcagttgtattagcaaaattactgaagtccatttcacagacatcctggtgcaatgcaatgcttgttttccagttgctgttcctttctgtcatttctcatggttatgtccaaagataaattagccaagaagttaaaatgtaacccttataagtcaaagtacatacaatatcattaaatcaacagtctgagcatgtggatggcaaagagacaaatgaaggtaaatgatctgttcacacagatgtgattaatttcccttttatgtttatgagtgctatccttcagctaatatcaaggatcttgtatggacatgccatctgtcttatgcaatatattttagaagagtgtccagaacagtagcagtgacagatcttgtttctgcagtccatttgacacaaaactaaagattaaatgactaaacatggtccacatatttttgtaaactttgttgacatgtaatttaaatatcatactatttatcaattattgtgtaaaatttaatgtttcatagtatattcacagaattgtgcatctaccataacaatcagttggagagcccttttatctccccaaaataagccctatagtccttagcctttttctctccacccctagtttctgcatttcccctgtcctaggtaattgctaattgaatttctatctctatagatttgcctattctggacaatttttaatgcatagaatcatacaatatgtggtattttgtgactggcttcttttatgtaacataatattttaaaggttcatttatgatatagcgtatacatgttgattcttacaaccatcatgtaagatattgagagtttcaagatgacactatctttttaaactttgttaaagtaatcaaagataaagaaagaaaaagagaaaagtaaaccaagcttgtagtacattcagcattaatcattaggttagcttgttctccgactcacttcctcacagttatttggctgttgtcctagaattatgcagaccctgttacaagactatagttcctcttaatccttctataaatattaacttaaacattatgaaatgatcaactttccttttgaggtattccttcaggtccagcatactgctaaaactactgactcggctggtctgaaggatctcactgatgtcagctgatctgaaagacttcactgatgccagctgatctagaggaccccacaaggaactgactcagcaaataatgtagtttcttgttctgatgactttaccctattaccctgactaatcaattacccaaattttccagcctatcaccatctatgatctccttaaaacctccaacccagaactccttgaggagctggatttagggttctcttcttatctccttgctcagtgccctgcaattattaaactccttctttgctgccaaatctgacgtctcagtgtaattggactattattggacagtaagcatatgaaactgttggtcctataacaaaactttaatggaataagtaactgcaaatataataaaactagaaagataactataattagaagtggaacttaatgatgtaacagaattgatgaaatctcatgataaaacaaataagtgaggagttactacttttggaggggcaaagaaacttgtttcctgagatggaatctactcctggtgaagatgttatgaacattgttgaatgacaacaggagatttagaatattacttaaacttactttataaagcagcgttagagtttgagaggattaattccaattttgaaagaagatcttctatgggtaaaatgctatctgacagcattgcatgctaaaaatatcttttgtgaaagggtgggttaatgtatgtggcaaatgccattgttgtcttatttttaagaaattgccacagccatgctaagtactagcggccaccaccaaaatgagttagcaaccatcaacattgatatgagaatcttcatcaacaaaagttgcactgactgaagactcagatgatcattagcactttttagcaattaagtgtttttaaattaaggcatgtatttttttagacttaatattattgcagacttaatatgctatagcattgtgtaaa

SEQ ID NO: 317520 - DNA, 4001 bp, Homo sapiens
tggggatatgtcagaagcacgccaattttgagtgaatatagacgtttttgaacatgaaattatcagaaatgataacaatttggcatctagccaaactccctaacattcacgtcattgatactgaaaaactggtagtacaaggtgacagcctgaggggactgaagatttttggagtatttggagtagtgtggtttttttctaatttttaccaataggatccccagaaataaaagactctatcgtcactgctaacactggctcataataaaggtgattctccagagcacgcctggtttgataccgccacccactccttcccttggcgacattttcctgctaagaacgcctagttagcgcaatccagccattcgcgttagttctcagaactctctcagaagttctctaccttctctcctctccccgcctagatgctgaaaggtgatgggaactcgcggtacaggtacagaggctattcctttcctaaggaagtgctgcacaatggcaggtttaccgtactcaattttataaaccctcaattaaaccagaaagcttgtatatagagattgggtaccccgcccacctcctcagattgtccttttgccccgacgcactgcatctacttgcactctccgatgcggtttgcctccttcaaatccaaaacacacataccaggctccctcgccgctcctccagtccatggaaggcgcccttctttttgccagcagcgcgtccttctctccccgcccgcaggcgctcacctcttctctaatcccgggggcccgcacaggcttctctaatgcaagggcaccccgtaccattcccaaatcggcgcggggacccgtgaaaccctgccaccactgtacactgtccattgtcgagagtcgcgcgggcacgcggaaacggcgggccccgaaaagtctcagcgagcttgtacagccccaagacattccccacccccaacacatcccgctcttgttcctccttagggggaagacggagtaaaggggagttgaagaggtcccgaagctcctcctggtcccccacctccatccctgccctggcagctggctctggcctctgggctccgcggtgcccatcccttcaggggtcaagtacaaggtcctcggccgaatcgcctccccgttataccctccctctgccttgagcgcacaaacgcgagagaaccctcgaacggatgccatatggcagaaacaggatcgcgggcgctatgaggggccagcctaaaaagatctccttcacaccccctcaacccctagcctttctccctaccccgccaacccccactaaccacttctaacttcctcagcccaaccctgtctgtgctttctaattcccacccccccgcccctggacagcagccattcgcccggcactcacctcagggagcaaacaacgcccctctcctccacccagaccgcccccccttccgccctctggaacggcgtggtccctccgctcacctcgtctcttggctgccccgcgcgagtttgagtgtgtgtctgccgcgtaattgtatccgggacagaagggacctgtgtttgtgcgctgaatcaggtgtcgccgccttcggtggttcgggggcgtaagggaggcttcggagttagcgtgttggctaaggagggctctctgggttcacagttgatagcaatgctttaaccgtgtcctccctcgggtcctcagcgcgcctgctcgtccgcagctcccagcgggcggccaggccccccgccccccagccgcgccccgccctgcgtgcggcgagcagagtcggagcgcgccgctgcccttccgcacttggctcagcggggcacgacacgggccgccacgcgctcagcctagcatcactcgcctctgactgcgagcgcctccagctccccgggctggggcatggatgcagacgcgccttcgtaccacgcgctcgcaggctgggcaaggggcagcgcgttgggatccggccagtcgtccgctgagcgaggttggcttgcaggctgggacttttcgcgagccctctgggcgctcgagttgcgaactctgacaacggcacgtggccccgcccactcttccctctttgcgaggcgtgtcccgcgccctttctgccaccacccacgtagtccctgtgcccgccttttatcatcaaggcggctcagtgagctctgcgtgttgatgtcgcgccttttctcatcttcctgcctttcctgcctcacttctgctgaatccattcaaaagttatacttgggcaagtgggtggaggagttaggaaaattaaaagagggatgcttaggtgagcaggtacctgcactgccgccaacccaggcttcaattctggctctcttgtagcggaaagccttaaaaaacgcgagtttggggatcctgaaaaaaagtaaatagggttgctgggctgaataacatccctcctctcaggctcctgctgaaagggccattcatgatttgcctggttgagcctgtggcgactttattctgacgaatctgcctttgccagcagcataaccttgccaagttggcgtcttgaccagcaagcaactgtgcccaaggaagcctctctgtggtgcctcagacctgagaggccgagtgcctttgagcgcctgaggtagattgtgagtttcatgaaaaccgagaaagtctaagtgtgcatgtgcgtaagatattttatatatatatatctcatatatatatgagatatgtctatataacgtggactgaattgtttattgtttatgtttcgtgtcgagcataaattccagaagctaagatgcttccatagcacacaaacgttatgcgtttaaacgttggaaatcaaaaatgccatgtcaggtcattctgtccttgttccaaagtgagattcagaaataggttgggattttctgcccttagataagaaaacggaaattatattttactgtatatgttatcagttaatgataaattaaaaaactaatatacactgctgttattgtaaaatccatatgctcaagaatgttcatggatggagagatcttcaaatgccatttcaaaaaagaaaatgcacttttcttctttgcagattaggaatttgaacatattccctgtgcaaaatgcagggaatattttcacagcctttgtacctgattaccatactctctatttatttcttatttaaattgcactagaaaacctaaagtaaatgaaatgtaacataataaagaaaagagaatttagacatttactttaaaagctttatttctcaaaggtcaagcttcagtttcaagctactgtttgatgatgcatatgtaaattcttggtaaaaacttgatcattagcaattaaaacaacttttttcttttattatataaaaatgtttaaaattgtttcaccacatccttgtccttaaaatggtgtaaactgaccattgtgtaaggtttttgtcagatttttggatagaaaaggagtatatattatgtgtagatatgtccatgtttattgtttctctaatctatctatttttgtccacattaaatactgattattgaatttctcacagctctacacagtaagggtgttccataatgtaaaacaagtttattcaatcatcatatgaatagttgaaatacacttttggagtttgaaatgataaaagcaagaaatcagtgaggttcatttcaccgccccaccccacttttcctttttttaatgctcccacctttaattgttaacattattggctaagtggttgaataaatgaataatgaaaacatttgctacttctctttaaggaaggatgcatattttccatatttaatgtatccttcaagctcccattcagattaaacaagattctccctatcatctttagtttatagaatgttgaatgggacagcatagcctgcagtgagaaagtttcagccaatgtggagtatggtattaaaattccctcattatttctgtggactatatatatcagtattctcaattgttatttttttcag

SEQ ID NO: 317521 - DNA, 4001 bp, Homo sapiens
taccaagggatttactgttggctcaatcaataaaaagaatttaagtttcacatagagaacagagtttcttaaagtgccattgattccatcattgaaatgaaattgcaatagagcatgctttccttaaaaccattacatttacttactagcttaaattaaccaactccctactttgatggaagttaccacctcactttcattattggacataaactagtggtaataacctcccagagaagaacctctgttcactgacctgaagctaaacatatatacctgttaattgtgctatttggggcagaacagaggggattctgtgtgtaattaaagataaaatcacttatactcattaaaattaaccatttaactatattctcctcacatactataactattacttaatcagaaaactacttcccaggcagtctattgaccatatggcatagtggtcttttcagtattacagaaatgctcattcaaagcaggaatgtttcccagggaagtggtggacccacataaagggactttggaggccccatgtcctaatcaccttttagtgtactgtatatatacaatatatataaataacaaatcatatctcttccaaaaatcaaaattgacttttacattaaaaaagaattaccaaggaattcggcaaaccttacttctggtagtgggctggctggtttggttaggattcctcctacataaacaacattaggcagagtgggtcttgggaattccagtgctacgtcagtacacagcatccacaggctggacccatgaaccaaatcatacatggacttctctggcagcaggttgtacttctgcattatcctttcatatttgggaagaaccagaaagctgacccctaatctggaaatgaggtaaacaccggtatttttcatcctttgcagcaagttcatgcggtctgtgaggagtgagttaaactctgggacgtatgctaatggagcaggagcacccacttcagcaggataccaaaggccagttgaaaatacagcatatttaacccctaaaagatgagctatcacaaatccacacatatcattagggtccaccagcagcaggtcaaatttttctttcttcagaccctggatcagggcatggttgccaaccatcaggtcacagttcttagtatagtgatccagtatgtcaaacagttcgattgctgtcaatctcccagagaaaatattccgcatcttggactgtaggaaagcatctgaggtggtactgttaaagatccctgggtagcgctggaggctgtaatgattagatggggcgatgtctctgccttcagagaggaggaacactgtatggtggcctctctcgtgcaaggctgaggctagcgtcttgaaaatgtacatatggctttcaaacataattggcggcacgatgatgattttggcagccttcgctatcccaacagcactccacaggagaatgaaatatggagtgtaagacttcatagctgtaataacaaccagaaaacaacttaaaacaaaatacaatgctcaccattcaaaacaagcaatcacaaagcatttttccccaaaaatatctgatctaatactttgtctaaaaaaaaaatcatgaacagacacttctcaaaagaagacatttatgcagccaaaaaacacatgaaaaaatgctcaccatcactggccatcagagaaatgcaaatcaaaaccacaatgagatatcatctcacaccagttagaatggcaatcattaaaaagtcaggaaacaacaggtgccggagaggatgtggagaaataggaacacttttacactgttggtgggactgtaaactagttcaaccattgtgcaagtcaatgtggcgattcctcagggatctagaacccagccatcccattactgggtatatacccaaaggactataaatcatgctgctataaagacacatgcacacgtatgtttattgcggcactattcacaatagcaaagacttggaaccaacccaaatgtccaacaatgatagactggattaagaaaatgtggcacatatacaccatggaatactatgcagccataaaaaatgatgagttcatgtcctttgtagggacatggatgaaattggaaatcatcattctcagtaaaccatcgcaagaacaaaaaaccaaacaccgcatattctcactcataggtgggaattgaacaatgggaacacatggacacaggagggggaacatcacactctggggactgttgtggggtggggggaggggggagggatagcattgggatatatacctaatgctagatgacaagttagtgggcgcagcacaccagtatgtcacatgtatacatatgtaactaacctgcacattgtgcacatgtaccctaaaacttaaagtataataataaaaaaaaagaatgcattctatagtattatacactaacatacaaaaaaaatcactattaaaaattatcctgatatttgttctaattacctctttatttttgaaagatcaattatgtttaagtatagaattgaaagcaaagttgacataaactgaaatatattaaaaatggatctgtttgggaagaaaattgaatcagtaaactattttcaaacatttgaaataacattttgataaggctgaatgacacataatatatctttttggaagaatatctatgaaatatctatggaacatctgttcatcttctaattgaatgtcaatgttaatcccaggaagaagagctgacctttttaatttccaggtatatcagcacgtgtctcttatttaaatcattttaattcaatggttacatttgcagttataatcaaagcataccaaagaaagattgttttagaaaataattattttgaatggtagtttggtaattctgcagaaaagacttttttccagaggaaaaatgatctttaacatatattttccctttacctaaataccatagttgtcctagcaatctatatttatgtaatctatgtcaatttgctgatgcatttcagggcattatgtaaaagagaaacttttaatagaaaagctcaagagggttaatggatctcagtaaatacttattgaaaaaggactgatgaatgattatgtctcagaccacacttctatgttgtacctttaactcaggtgcaaatgtcaagtcagaggatgcctgtacacttgagggccagtacttctcctaccttttcatgttaacagatatgtgtaataaagttgtcttttattgtttttagagataaatatactatacgtggggaccatatagtgtgcaaatacacccaccaacctattcaatataatgaattcttagactctaaattagacccccaaatagaaaaaagatctaaacaattgctcatgcaaactggacacatttcaaaaatctcaaaatagatttatacacacatcaccaacacacatataaccaaattgatatctatttttactccttagaatacattaaccctcctatttgtataaattcccaacatctaaacgcagttttaacaactataccttctaaacattcaaacactacaagcaatgtaaagaaatcaatagcaggcaactaatagattcttccaataacaagattgaactctaaaatacatatatttccagatgcttttttcctctcctactctaagggaagtttcaaactatttgaaagttgaaattataccattaagaataagtaaaagtaatgcacattacaaacatataatataaatgtcacttacattattataaggctttaaaaataattaactttggagaagatactgattctatagtaaagttgactacaattacaagatcagtgaagaaagaaaattaaggagctgatcttagaaaaaccttccaaatgtttattctactgtactgcctcacctatgtgtctctccaatgttgccttctcacaaatctgaagaaggaaaaatgagatattttacaaggaaatatgaactccaggga

SEQ ID NO: 317522 - DNA, 4001 bp, Homo sapiens
gggatgggaggcatctggcgagaaaggaaggaaggatttatgagcagggccacttagcagggcagcaggaaaatttacttccgaagaagctatcgctaattcacaaagccttgctaatcacttacctctccacccagaccgcactcctatgctaggcgctctcctccgcttccaacacccccatccccacccccagcgcctctctaagatcagagggaatgctgtccggaaaccctagggtgtctgaacatcacctggggagttggggctatcgtaaagcctccctttactctccaaatttggaaggaagagtaaccgagagtgaagggagaatccctgaattgcctctgaatgctgcataagcttccttcattctctcctcttccaggaaaagctgagctgcctcgcctgagccggctatcaccactgaagtgggctaagagacccaagtaggagctgggcttggccagaagttttggggcccaggtgacctgaaagagaccccggaggggacagccttggctctttcttctgcgctcccttccagtcagctttcccggctttgaaggctgggagctgctgctaacacttcaaactaggcggacaagaagggagccgggcgatcagctccggagcctcccctcctcccttacccatccccaactcccggccacactcttcccaacccggcttcgcccagggccccggtcacttatgttaaagttcacaggcgttaaattaaaatgtcagagttataaactggtcgactaccccggggagtttcggatttggtttgaacaagcagccggttcccccagagctccgggattttcatttctacatcccctggtgggaagcaggcatgaagcggggtatgtatgagtgcagaggcatgcacatcccgggcctgcctccagccgggtacgcggattcgggtgagctgtgtatttccacagcacctgaagcagcaggcgagggggacgggtgcttttgagtccttgacagtaatggacacatttccttagctgagcgcccttcggggtctagtgtgctcagagactcagtgaagatcctgctaccccagtcttggcacagcgcggggagcctctgcgcatcatgcgcttcggggtgcatctacggtatgtcacacagccacccgcaccgagagtctttccaaacctccgtgtgtgcaatatgcaacaacgtgcgcgtgcggagctgaaagggcacaagacactccaggctcccacacgtatggagacggatcggctgcgtgtccacaccccgttcgtccctggtccattcgtgcccatctcagaagatagattaaacataataataataataattattattattataatcaaagcttcttgactagttgggaaagtggaatttagagtggtttccagttgaaagcaacgaggcaaattgaggaagtcaagagaactggggaggaggagaggaaggagggaaggaagaagctaagggaggtggccgcggagcttggcggacccccttaccttgggcggcggagccagtgccgctggcgctgagcagggccagggcaggtagcacgagcatttgcagcaagtatcccagtcccagtccgcagcgggccgctgtcgcccgcagacctttcctcatcgtagacagaggtgtgccggggggaggggagggggacagagagacgcgcaaacagctgaaagccccactgggcagaagctgaatccgtgcaccgcgaagcagtccgaagaaataacgacaaccaagcgccacactccactttctccaaaggcaggggccaaaagggggaggagaggagacgccgaggaggagtttgaaggtccctctttcccaatgccttctaactgacgtctcccgcgagcgactgctctgcccccacttgggaagtccagggaggcgcaaggcggccacctccgccgctccccccagcagcaggagcagccgcagctccgccgcacgccgaagtctggactgctctccgggtcccctcgcctgtgaggaacacacacagacaccgggggtgggggtgggggtgggggttgaagtggggggagttggaggaggagggaacggagggaggaagcttgggcaccgtcaggcgctctggtctccaatctcagtgttctcacgccggcggagagatgtcccggctgtcgctgctgggtggccaaggaggttcacatcctagagtagggcgcacgggtgcgcgaaggcgctcgccaaggaggcgtagagggcgcagcacaactcctctggggggtaaccgggggcgggagcacgcccgcccgccttatgtaagcaaggattgcagggagatcagcgcccaggagaccagctgtgggtttgcccgctgaagccgaggcgagacagaccaggggacgaagcggctgcggagagtggcagcgcgcctgcctcccgcggtgcgccagacctggacgccgggagtgcagcgggcgcgccccgggccactaggctgtgtccagtggagctcagcctgccgcctgccaccttcttcgccgcgccggcaaagcctcagccgaattccctaggactggactcggtctacgacttcgggtctcgcggttgacgaagccggtgcgggctcgaactgaagtccttcttggttggggaagaaggcatgaagcttttgcactgccccagccggctgctgtcctggggttgtcagcgccagtcagactgctttatgttctgagcgcgtatgacccctttgcagtggaacagaaactaaaagctcgacggaaactcattctgcaacagtgctttctttgcgtgcatgttggtggctgacaagggtggtgatgcgataccgagagaaactctcttagaaaaaaaaaatgcaaagcaaaatttgtagatactcaaagtgatggtggagcctataacatgtttttcaaatttctaatagtgtgtgtaagaactcgagctgctatgaatttgtttacctttctacaggaaataattgtctacgtagctgggttgtgaatccctgtggtcatgatggagggatgcaagattgggtgggtaaaataagactagacaaaaggaaagtgaatttattaaaaggtcaacacacagacacagacaacattttgggaaaaagaaaatcacttcccaagattagcatgtctttaaactaataatacatcagggaattttatgctcttggtgccaagggggccatgtgtaaacacgcatgcacacacacacgcaggaaacatgaggtctaattttggctgtggtcataactactctgttaccctgggtaagtcaggtaacctgtgaatgtctcagtttcttcatttgtgaaatattttgatagtttcaaagttctcttaagttctaacattctatgattctgcctgcacagccccatctaggcaataagacctatctcggatgaatcagggagatccgaaaaggtagtatttgccaaagacattgacaaaactggccacttcttatttctgtggagactctgtccaccacacaaaacccttcttcactctcttcatcttctccataccaagacatcaagatatttgacaacagggtgggtgctggcaccagactgtctgccttcagttcttagcatttcttattacttgactgatattgaacattaaagctaggtgcctctcttccctaatttgtaagatgggtctagtaacaggaactatctcatagggttatttgaggattatgtaagttaaacatatgtaaaatgcctgacgccaaaattgtaaactgctgttcttaccattgatgaaaaattcccattagcctcatgctatctacaccagtgctgttcagcagaaatttctgcaatgaagaacatgttcatatctgtactttctgaggtcgtagttatgagatacatgtggctacttgcatgcaatgtggctagtgtgaattggaaatttttatttaattttaatttaaatagtcacatgtgg

SEQ ID NO: 317523 - DNA, 4001 bp, Homo sapiens
ggctcaagcgatcctcctggcttagcatccccttagctgggattataggcctgtgtcactgcgactagctgcagttaattttagtaatactatataaagttcccaaaaagtattgaaatacaggcatgagcaataaagtgaaggctttgaagtaaggtacctcttggttgaatcctggctctattattagcagtgtgacattggtcaagttacttcaccccttttttttttttttttttttgagacagagtttcgctcttgttgcccaggctagagtgcaatggcacgatctctgctcaccgtaacctccgcctcccgagttcaagcgattctcctgcctcagccttccgagtggctgggattacaggcatgtgccaccacggccggctaattctgtatttttagtagagacggggtttctccatgttggtcaggctggtctcgaactcccgacctcaggtgatccgccggcctcagcctcccaaagtgctgggattagaggcgtgagccaccgcgtccggcctacttcacccctctcagtctcattttttgacttttaaggtgagaatactctcacctatcttgcagggtagttaacgattaaagcataatgtggaatataaagagctcagcacagaacctagcacaaggtaagagcctgacaaatgaaagctactatattatccctcaggatcccattaacaaagttagccattaaagtgttatacttagtctcttttatgtagatctaaaattcttctcaaataaaaagtttatttcaaaaaggcatacaccctcgattccattaaacactaaccaaacttcaaaataagtgtattctaaacctagaatctaagcaactattaaataatgttttcagcggctaaccatttttttttttttttaaataacgccgcaaatcatgtcattaggagttcaggcagaaagcggtggacgtgtccccaaagcagtttgagcgcttaagatccctactacgttcaaggtagcatttgccaaatgatatatatttgggtgagcccgaaaagccggatctgaacaaataacaccaggcagaacgaccgctcttccagttgatgggacaggagcaggtggatttgtccttcaaagaatatcgttttattcttagccaaatgctctcaccaacagctgggttttaaaccttctcgcagttttccccaacgccccagtttcagactgcgagggagggagcaggacttcaggctcctctcggccagtgcagacgagcgaaagagaaagagggaggggcccacggccccgaggggcgtgggaggcagttcgggccagctcggccgcgcatccgtcccttcccgtgcggtaccacctgcggaccactctcctagcccgagcttcagggcctacagagctgcggggcgcggccgccgtcagtccggccgaacggcagcaatggggactgagctgggggcgtgattgaataactctgggatttcaggagcggaaggagggcaaagggggaggcggcatgtggatgccccctccatggtgggacgctggaggtgaccttcgggtctccgagtgctccgtccccgtccctgcccggaccccttcccaagtcccagacccgctgctcctctcaccgtctcggcttctgtgtgctggggtccggcactctgaccccccattaccccgcggaggaaattcatcttgccgttcagccaccaggtttaccggcccctccggaaaaaaaagaagacaacttcccccgccctccgcagggcctgggccccaatcccgcactctacacactcctactgctgccaccaccgcctccaactcggcggccactccagccctctaagcccggaaacagccgccagcagcggccaagatgcgcatgcgcggggacgtggcattacgtggcggctcgaaggttgaaggcaaaaggggagcggaggcgagaggaacctcttagctaggttccgccgaagccccacccactgcgcagaccccgcctcccaccgcaggggcacgcctcctacccccacccttcgcggattgatcctgctggccgcagccacccacgtggtggaagcccggccctgcaggctggagaggatttgattagactacgcgtttcgacttgcagggtgtttaatcgtcgccaagcgggacttactgcaagctatcaaatctgaggtcttattttgttgagtcgaaagtgaaattttcctttggccaacgtgacaggtaaggcttcctggcgcctgagagggttcgcttggtttgacggtttactggtaccagcattgtggctttctgatcccggtaaattgcatttctttacagggctttgtttggtggtaaaaagggttactagacacccctcattccactgccactggagggcgcatttctcagctcttgctcttcaaacctgctgaaaggaattcctagatctaaacaccaggtacacctctattttcaagtgtcgtcaggaggaaacccatcaaaccctacatttagcttactagagaaatacattgttctgctgtgtcagtttggcgagtaacataatgtttcgttattaactctcaacccctgtgttttcagtttttttttttttaacatgaaaaattgtcattttctctaattggtatgcctgttcctttggcagtgaggttgtcagtacacatgcttctggaatagtcttgtaaatttcttgaggctaaaaagcacaggtctagttagctaactgactcatgcacctctccccttggattccccacaggtctcagattcagcatttaaaattgaactcgtcatctttccctgcctcccttaaagaaaaaaagtcaatatgctgcttctactgtgtgcgtgccgtgctcagtagtaccactgtccaaataattgcctaagctagacagaggaagctgggaagaatcttagactctggctttccacccacacatgtccaatcaatagtcatgtcctatcatttctatttatagaatatttctcaaataggtgttctgctctccatcctctgtgcctgtgacatagattatgttcttctcatcatttctcattgagatgacagcaacagcctcctaattagtttgtctgcattcagccctggcttccttccagtccaatctccagtccatccttgggtgagactaacaacaacaaaacatctgttcatgtcattcctcttaaaatcctccagttgttccccattctgtccagaataaagtgcaaactccttagtttgtcatacaggcctgttatgatttagctcctgcctactttttcagctcctgcctcccccacatactctgggcatttttctcagacctggatatgcccttcccttcctttctcttcatcaagcaaactcctgctaattccttaaggctcaactctgacatcattcttgaaagctttccctaaaatgtaggtacacatctatatgttagcactttgcagttattgatactgtatatggtgtacattgaataaatgcttgctaaaccaaactgttaagggcaggactatgttattcattttatatctctgttgcttaccactgtctcataaaaggtgatattgatggataaatgaataaattattgaaagaatatatgaatattatactaagaggaggttccctttttttaatctgtaaagtgaaattgtagggaagacatcataagctatgtgtttcctagtgccaacattttaagcctgggcaacttggagaatggtggggtcatactgccaaaaatactgtgcgctaagcattgtcctctgctttaaagctatacacttgacattttaccgtagacattttccatgggagcattttgttgcagcctaaaaaaagtaaccagtaaattactcagcatttttgttactaagaaatgcatgcaaagaacttcacttaagcccctaagcctcacccctccctgaacctcacttcaccttgtccctgaaactca

SEQ ID NO: 317524 - DNA, 4001 bp, Homo sapiens
tcgaatgaaacacaccccaagagaaaatacgaaaccgagtcccctgcaattacctcacacgcaaacctacacgtcggtaggtcatattcataaatacacactgaatgtcacctatcatgaacacaaacactcagacagtccctccagaggttcggaagactcacgaccccaaaacttgatgtttcccatatgcgggctcatcctgagatgtagccatctctatccagttgtccctgttgtacagacagaaacttgggctcctcattagtttatgtaggattgacggtgttcgtgtttgtgtgggtgtgtgtgtgtttgcgtgcgcgcttctgggtgtagttatgtgtgtgtgtgtgtgtgtgtgtgtgtgtatgcacccctacgtgtgggtcggtacttccactgagatcactggcacacaagcagagccctcttgctgtgtttgttcttccctttggatctcctggtcctccctcgtagggaagcgagtgtgccagtgttcatggactcctgatctgtcggggtcgtcgaagagaggtttagcagggagctttgctgttcaggatgatggttcttcatccgacacttgtattttgattgatgaatcacaagtacgtcgggaggcaccgtaccttcgactcttctgacgttgaactcaggcttcgttttgttttgctcttgaaggaatttccagtggtctaaggtgctttcctgagtggctctttccaccaagtgctcgtccaactcgggggcctggaggcaggggtggtctctcttgagctctccttgcgttgctcgcctgtctgtgtcttctacgccaagggctcttggttccctgcctcttgacacactctcactgtgtctttcccattcactcttctggatgtaaaagaggacgtaggcctgttgactcaggacagaagtgatgctagaggcggtgacctcggcatcatccattttataccactggccttcttgagctttgacataagaggagtaatgtccgttgtgacaactccacccagcgtggaccagcacagcatagaggacatagacgagaggtcctgtgttctgctgagacatgtatggctgcatgtcaaggcactcaggatattgcacattcttggcaattttgttgcctgtgacatcggggaatctcttcaatacaaggatgaggaccttggcagagttgtgtaaagttaacgtcttggaggccggcgccctctggagacaaacaccacaatgataggcattctctccattgagttcttcgggcttcaccaactgttccaaagcttgctggacactctgagctgcctggatatccagggcgatgtccaggtaagggtcaaaagtgtctgaaatgccgtggcagtggagacacttgatttgagatctccagtagcctccaaatatttggtggatgagggtggtgtccttagagtgacgatctacctgcttgtgcccgggaaggcatgcctttctcatggcatccacagtgaacatgagaaattcatgggcatcttcctgcttgcctctatggaagccagcagccaatgcctgtgagggctggatgacatggccaggaatgtggagggcccttgtgatgtgagcttgcatagtacagagcatgcagcccttgtgacgatgacacgtttgagagtgctcccggaacagcatgtagttggcaagtggcggtttgtatgtcaggcactgcagggaagcgttcacgtagcaggtatttcccatattctggagcccagcccccaccgcagcaggtctcctgctactcagaggaggcttctccctgggagcaagctgtcttgccacaggagccaaatcatcacagaggtcgacacgggtctcacatgagagtggtgacttctcagggagagaagtacgctggatttcagcaaaagctgcatctggccgagaagatgtgagttttgaaaagtggttgaactgccactcacctcccaagtagagtgagtcgtcctccatgtcgactggaacaaggatcacaaggtttttctgctgggaccgcaggttgcagaaagacgctatctcttccgagagagtcttcaaatgacgagctctctggccgcatcagcccttctataactcacccacaccaaccgcgaacaccccacccactcatcaggtgcgcgattagccaatcaaatatcagcactcaattcaggaaggagtcacagggtgtgtccccttgcatcgctgggaattcaacagacacagcccacatcatgacttccagaacacctgaatcagattactcctcaggatgataagcacatataataggagtgtaaccgggttgggacagtggccacacagttgccttattttaggtaaagcaatggcagggaagaaatctttaccttggaaaccgtgtgtgtgtgtgtgtgtgtgagtgtgtttgtgtgtgtgggggggggcgtgtgtgtatgtgtgtttgtgctgggatgaacttccaagtatgtacttttggcagctaccatcatcctctcagtgaccgaaggacaagaattcggaagtgtgctttctgacctgagaatagtcaatgaagtataatatttagcacagcgtattttcttccctaatgagaaaggagagatccgtggaatcaaacagaccttccagcgataacctttccacgttgagcctattgattctctatccgtgttgaattacttgccagtggacaacaagacaagtgtttgcatgaaatgctcttgtggaagctagattgccaaatgataaagcatcatatggtagaaagaagcactgaagtttgaagagatactcagtgcacaatgtagactgtgtaggactttgtggaatcatgcaatcagcgggagactatttgatgacattccccaaatttgtgtttgcccgaaaatgtagattgtcacgacattgtatagtgagtagtttctgacgtccgacggcagtttaagaaaatatgaaagaaaaatcttgagaaatcagaaggtatcccaactatacccttttttttcttgaagtgatgaaaataaaaacaacgtatctgacaccgtgggtgataatatttccatgtgtatgtgataatggatcaacatttcatagagacgaaataaaatgttctaaggttgacaaaagcaaacactgaaaattatactctagatagcccggcggacggcagtgaggccctgtctcaagaagaaacatcggagacgtttaaaagcagggagtgaaacagagtatagcataccatttttaatactggtccttgtttcagtgggaaaaggccaaaataagccgtgtgtctcctggattctcgctttgattgttcatgatctgggattttccctccatttccagttatgcattgtatggtggaattccagttagcacatttggtgcaaaaattttaattctgacgaaagtggacacgttccctgaattaagagggacagaattttggtgtgtcttcattctgtctgccttaccaggaatgaagatcctggctcttgggactttcccaacatgtcttagagagtaagcaacagggcagaattgaggcccggcgccaaggcctctaggtgtaaagaaacagccctggcttcaggacccatgaaattaggatgattttaaggagtatgatggaatgagaggagtgtgacctttggccccatttctttcccttgtcttttcatgggccaggtgtgctccatcagaaagcttcctgtgcctgatgtaaagtttcctgtgggaagaaaggagcactgcttagaaagatgctacacagggagaaagcagccacgattttcaggaaaatgatccccagaagcatgagcaatccagatgccgtggcttcccacagggtgtgcgagagtcttatcgttttaaccgggaactaggcattggtgtcctttaatgctcataacagcttttgaggggagccgaattgatatcctgcctgcgtgtcatgctcattgcactgt

SEQ ID NO: 317525 - DNA, 4001 bp, Homo sapiens
acgaatgaaacacaccccaagagaaaatacgaaaccgagtcccctgcaattacctcacacgcaaacctacacgtcggtaggtcatattcagaaatacacactgaatgtcacctatcatgaacacaaacactcagacagtcccaccagaggttcggaagactcacgaccccaaaacttgatgtttcccatatgcgggctcatcctgagatgtagccatcactatccagttgtccctgttgtagagacagaaagttgggctcctcattagtttatgtaggattgacggtgttcgtgtttgtgtgggtgtgtgtgtgtttgcgtgcgcgcttctgggtgtagttatgtgtgtgtctgtgtgtgtgcgtgtgtgtgtgcacccctacgtgtgggtcggtacttccactgagatcactggcacacaagcagagccctcttgctgtgtttgttcttccctttggatctcctggccctccctcgcagggaagcgagtgtgccagtgttcatggactcctgatgtgtcggggtcgtcgaagagaggtttagcagggagctttgctgttcaggatgatggttcttcatcccacacttgtattttgattgatgaatcacaagtacgtcgggaggcagggtaccttcgacttttctgacgttgaactcaggcttcgttttgttttgctcttgaaggaatttccagtggtctaaggtgctttcctgagtggctctttccaccaagtgctcgtccaactcgggggcctggaggcaggggtggtctctcttgagctctccttgcgttgctcgcctgtctgtgtcttctgcgccaagggctcttggttccctgcctcttgacacactctcactgtgtctttcccattcactcttctggatgtaaaagaggacgtaggcctgttgactcaggacagaagtgatgctagaggcggtgacctcggcatcatccattttataccactggccttcttgagctttgacataagagaagtaatgtccgttgtgacaactccacccagcgtggaccagcacagcatagaggacatagacgagaggtcctgtgttcgtctgagacatgtatggctgcatgtcaaggcactcaggatattgcacattcttggcaatcttgttgcctgtgacatcggagaatctcttcaatacaaggatgaggaccttggcagaggtgtgtaaagttaacgtcttggaggccggcgccctctggagacaaacaccacaatgataggcattctctccattgagttcttcgggcttcaccaactgttccaaagcttgctggacactctgagctgcctggatatccagggcgatgtccaggtaagggtcaaaagtgtctgaaatgccgtggcagtggagacacttgatttgagatctccagtagcctccaaatatttggtggatgagggtggtgtccttagagtgatgatccacctgcttgtgcccgggaaggcatgcctttttcatggcatccacagtgaacatgagaaattcatgggcatcttcctgcttgcctctatggaagccagcagccaatgcctgtgagggctggatgacgtggccaggattgtggagggcccgtgtgatgtgagcttgcatcgtacagagcatgcagcccttgtgacgatgacacgtttgagagtgctcccgggacagcatgtagttggcaaggggcggtgtgtatgtcaggcactgcaaggaagcgttcacgtagcaggtatttcccatattctggagcccagcccccaccgcagcaggtctcctgctactcagaggaagcttctccctgggagcaagctgtcttgccacaggagccaaatcatcacagaggtcgacacgggtctcacatgagagtggtgacttctcagggagagaagtccgctggatttcagcaaaagctgcatcgggccgagaagatgtgagttttgaaaagtggttgaactgccactcacctcccaagtagagtgagtcgtcctccatgtcgactggaacaaggatcacaaggtttttctgctgggaccgcagtttgcagcaagacgctatcccttccgagagagtcttcaaatgacgagctctctggcgcatcagcccttctgtaagtcacccccaccaaccgcgaacaccccacccactcatcaggtgcgcgataagccaatcaaatatcagcactcaattcaggaaggagtcacagggtgtgtccccttgcatcgctgggtattcaacagacacagcccacagcatgacttccagaacacctgaatcaaattactcctcaggatgataggcacatataataggagtgtaaccgggttgggacagtggccacacagttgccttattttaggtaaagcaatggcagggaagaaatctttacgtaggaaaccgtgtgagtgtgtgtgtgtgattgtgttcgtgtgtgtgtgtgtggggggggcgcgtgtgtgtgtgtgtttgtgctgggatgaacctccaagtatgtacttttggcagctgccatcatcctctcagcgacggaaggacaagaagtcgaaagtgcgctttctgacctgagaatagtcaatgaagtatagtatttagcacagcgtattttcttccctaatgagaaaggagagatccgtggaatcaaacagaccttccagcgataacctttccacgttgagcctattgattctctgtccaagtgaaattacctgccagtggagaagaagacaagtctttgcatgaaatgctcttgtggaagctagattgccaaataataaagcatcaaatggtagaaacatgcactgaagtttgaagagatactcagtgcacaaagtagactgtgaaagcctttggggaaatcatgcaatccccgagagactaattgatgacaatccccaaatttatgtttgccagaaaagagagacggtcatgacactgcatagtgagcggtttcggacgtgcgacggcagtttaagaaaacacgaaacaaaaaacttgagaactcagaaggtatcccagctataaccgtttgtttattaaagaattgatgaaaataaaaacaacgtatctcacagcatgtgtgataatatttccatacgtatgtgataatggatcaacgtttcctagaggtgaaataaaaagttctaatttggacaaaagcaaacaaggaaaattataccgtagaaaagcccggctgacggaagtgaggccctgtctcagggagaaacatcggagacgtttaaaagcagggagtgaaacagaggatagcgtgccatttttaatactggcccttgtttcagtgggaaaaggccaaaataagccgtgcatatcctggattctcgcatcgatcgttcaggatcggagatgttgcctccatttccagttacgcattgtatggtggaattgcagttagcacatttggtgccaaaattgtaatgctgccgaaagtggacatgttccctgaagtaagagggacagaatttgggtgtgtcttccggctgtctggcttagcaggaatgaagatcctggctctagggattttcccaacatgtcttagacggtaaggaacagggcggaattgaggcccggcgccaaggcctctaggtgtaaagaaacagccctggcttcagggcccatgaaattaggatgattttaaggaggatgatgggatgagaggactgtgacctttggccccgtttctttcccttgtcttttcatgggccaggtgtgctccatcagaaggcttcctgtgccggatgtaaagtgtcctgggggaagaaaagagcactgcttagaaagatgctccacagggagaaaggagccaccattttcaggagaatgatccccagaagcatgagcaatgcagatgccgaggcttcacacaagaccctggagggtcttattcctgcagccgggacctgggcatcggtgtgcttgaatgctcataaccgattttgaggggagcccaatcgataagctgtctgccagtcatgctcatc

SEQ ID NO: 317526 - DNA, 4001 bp, Homo sapiens
acgaatgaaacacaccccaagagaaaatacgaaaccgagtcccctgcaattacctcacacgcaaacctacacgtcggtaggtcatattcagaaatacacactgaatgtcacctatcatgaacacaaacactcagacagtcccaccagaggttcggaagactcacgaccccaaaacttgatgtttcccatatgcgggctcatcctgagatgtagccatcactatccagttgtccctgttgtagagacagaaacttgggctcctcattagtttatgtaggattgacggtgttcgtgtttgtgtgggtgtgtgtgtgtttgcgtgcgcgcttctgggtgtagttatgtgtgtgtctgtgtgtgtgcgtgtgtgtgtgcacccctacgtgtgggtcggtacttccactgagatcactggcacacaagcagagccctcttgctgtgtttgttcttccctttggatctcctggccctccctcgcagggaagcgagtgtgccagtgttcatggactcctgatgtgtcggggtcgtcgaagagaggtttagcagggagctttgctgttcaggatgatggttcttcatcccacacttgtattttgattgatgaatcacaagtacgtcgggaggcagggtaccttcgacttttctgacgttgaactcaggcttcgttttgttttgctcttgaaggaatttccagtggtctaaggtgctttcctgagtggctctttccaccaagtgctcgtccaactcgggggcctggaggcaggggtggtctctcttgagctctccttgctttgctcgcctgtctgtgtcttctgcgccaagggctcttggttccctgcctcttgacacactctcactgtgtctttcccattcactcttctggatgtaaaagaggacgtaggcctgttgactcaggacagaagtgatgctagaggcggtgacctcggcatcatccattttataccactggccttcttgagctttgacataagagaagtaatgtccgttgtgacaactccacccagcgtggaccagcacagcatagaggacatagacgagaggtcctgtgttcgtctgagacatgtatggctgcatgtcaaggcactcaggatattgcacattcttggcaatcttgttgcctgtgacatcggagaatctcttcaatacaaggatgaggaccttggcagaggtgtgtaaagttaacgtcttggaggccggcgccctctggagacaaacaccacaatgataggcattctctccattgagttcttcgggcttcaccaactgttccaaagcttgctggacactctgagctgcctggatatccagggcgatgtccaggtaagggtcaaaagtgtctgaaatgccgtggcagtggagacacttgatttgagatctccagtagcctccaaatatttggtggatgagggtggtgtccttagagtgatgatccacctgcttgtgcccgggaaggcatgcctttttcatggcatccacagtgaacatgagaaattcatgggcatcttcctgcttgcctctatggaagccagcagccaatgcctgtgagggctggatgacgtggccaggattgtggagggcccgtgtgatgtgagcttgcatcgtacagagcatacagcccttgtgacgatgacacgtttgagagtgctcccgggacagcatgtagttggcaaggggcggtgtgtatgtcaggcactgcaaggaagcgttcacgtagcaggtatttcccatattctggagcccagcccccaccgcagcaggtctcctgctactcagaggaagcttctccctgggagcaagctgtcttgccacaggagccaaatcatcacagaggtcgacacgggtctcacatgagagtggtgacttctcagggagagaagtccgctggatttcagcaaaagctgcatcgggccgagaagatgtgagttttgaaaagtggttgaactgccactcacctcccaagtagagtgagtcgtcctccatgtcgactggaacaaggatcacaaggtttttctgctgggaccgcaggttgcagaaagacgctatcccttccgagagagtcttcaaatgacgagctctctggccgcatcagcccttctgtaagtcaccccctccaaccgcgaacaccacacccactcatcaggtgcgcgataagccaatcaaatatcagcactcaattcaggaaggagtcacagggtgtgtccccttgcatcgctgggaattcaacagacacagcccacagcatgacttccagaacacctgaatcaaattactcctcaggatgataggcacatataataggagtgtaaccgggttgggacagtggccacacagttgccttattttaggtaaagcaatggcagggaagaaatctttacgtaggaaaccgtgtgagtgtgtgtgtgtgtgattgtgttcgtgtgtgtgtgtgtggggggggcgcgtgtgtgtgtgtgttttttctgcgatgaacttccaagtatgtacttttggcagctgccatcatcctctcagcgacggaaagacaagaagtcgaaagtgcgctttctgacctgagaatagtcaatgaagtatagtatttagcacagcgtattttcttccctaatgagaaaggagagatccgtggaatcaaacagaccttccagcgataacctttccacgttgagcctattgattctctatctgagtgaaattacctgccagtggagaacaagacaagtctttgcatgaaatgctcttgtggaagctagattgccaaataagaaagcatgaaatggtagaaacatgcactgaagtttgaagagatactcagtgcacaaagtagactgtgaaagcctttggggaaatcatgcaatccccgagagactaattgatgacaatccccaaatttatgtttgccagaaaagagagacggtcatgacactgcatagtgagcggtttcggacgtgcgacggcagtttaagaaaacacgaaacaaaaaacttgagaactcagaaggtatcccagctatacccttttgtttattaaagaattgatgaaaataaaaacaacgtatctcacagcatgtgtgataatatttccatacgtatgtgataatggatcaacgtttcctagagatgaaataaaaagttctaatttggacaaaagcaaacaaggaaaattataccgtagaaaagcccggctgacggaagtgaggccctgtctcagggagaaacatcggagacgtttaaaagcagggagtgaaacagaggatagcgtgccatttttaatactggcccttgtttcagtgggaaaaggccaaaataagccgtgcatatcctggattctcgcatcgatcgttcaggatcggagatgttgcctccatttccagttacgcattgtatggtggaattgcagttagcacatttggtgccaagattgtaatgctgccgaaagtggacatgttccctgaagtaagagggacagaatttgggtgtgtcttccggctgtctggcttagcaggaatgaagatcctggctctagggattttcccaacatgtcttagacggtaaggaacagggcggaattgaggcccggcgccaaggcctctaggtgtaaagaaacagccctggcttcagggcccatgaaattaggatgattttaaggaggatgatgggatgagaggactgtgacctttggccccgtttctttcccttgtcttttcatgggccaggtgtgctccatcagaaggcttcctgtgccggatgtaaagtgtcctgggggaagaaaagagcactgcttagaaagatgctccacagggagaaaggagccaccattttcaggagaatgatccccagaagcatgagcaatgcagatgccgaggcttcacacaagaccctggagggtcttattcctgcagccgggacctgggcatcggtgtgcttgaatgctcataaccgattttgaggggagcccaatcgataagctgtctgccagtcatgctc

SEQ ID NO: 317527 - DNA, 4001 bp, Homo sapiens
acgaatgaaacacaccccaagagaaaatacgaaaccgagtcccctgcaattacctcacacgcaaacctacacgtcggtaggtcatattcagaaatacacactgaatgtcacctatcatgaacacaaacactcagacagtcccaccagaggttcggaagactcacgaccccaaaacttgatgtttcccatatgcgggctcatcctgagatgtagccatcactatccagttgtccctgttgtagagacagaaacttgggctcctcattagtttatgtaggattgacggtgttcgtgtttgtgtgggtgtgtgtgtgtttgcgtgcgcgcttctgggtgtagttatgtgtgtgtctgtgtgtgtgcgtgtgtgtgtgcacccctacgtgtgggtcggtacttccactgagatcactggcacacaagcagagccctcttgctgtgtttgttcttccctttggatctcctggccctccctcgcagggaagcgagtgtgccagtgttcatggactcctgatgtgtcggggtcgtcgaagagaggtttagcagggagctttgctgttcaggatgatggttcttcatcccacacttgtattttgattgatgaatcacaagtacgtcgggaggcagggtaccttcgacttttctgacgttgaactcaggcttcgttttgttttgctcttgaaggaatttccagtggtctaaggtgctttcctgagtggctctttccaccaagtgctcgtccaactcgggggcctggaggcaggggtggtctctcttgagctctccttgcgttgctcgcctgtctgtgtcttctgcgccaagggctcttggttctctgcctcttgacacactctcactgtgtctttcccattcactcttctggatgtaaaagaggacgtaggcctgttgactcaggacagaagtgatgctagaggcggtgacctcggcatcatccattttataccactggccttcttgagctttgacataagagaagtaatgtccgttgtgacaactccacccagcgtggaccagcacagcatagaggacatagacgagaggtcctgtgttcggctgagacatgtatggctgcatgtcaaggcactcaggatattgcacattcttggcaatcttgttgcctgtgacatcggagaatctcttcaatacaaggatgaggaccttggcagaggtgtgtaaagttaacgtcttggaggccggcgccctctggagacaaacaccacaatgataggcattctctccattgagttcttcgggcttcaccaactgttccaaagcttgctggacactctgagctgcctggatatccagggcgatgtccaggtaagggtcaaaagtgtctgaaatgccgtggcagtggagacacttgatttgagatctccagtagcctccaaatatttggtggatgagggtggtgtccttagagtgatgatccacctgcttgtgcccgggaaggcatgcctttttcatggcatccacagtgaacatgagaaattcatgggcatcttcctgcttgcctctatggaagccagcagccaatgcctgtgagggctggatgacgtggccaggattgtggagggcccgtgtgatgtgagcttgcatcgtacagagcatgcagcccttgtgacgatgacacgtttgagagtgctcccgggacagcatgtagttggcaaggggcggtgtgtatgtcaggcactgcaaggaagcgttcacgtagcaggtatttcccatattctggagcccagcccccaccgcagcaggtctcctgctactcagaggaagcttctccctgggagcaagctgtcttgccacaggagccaaatcatcacagaggtcgacacgggtctcacatgagagtggtgacttctcagggagagaagtccgctggatttcagcaaaagctgcatcgggccgagaagatgtgagttttgaaaagtggttgaactgccactcacctcccaagtagagtgagtcgtcctccatgtcgactggaacgaggatcacaaggtttttctgctgggaccgcaggttgcagaaagacgctatcccttccgagagagtcttcaaatgacgagctctctggccgcatcagcccttctataagtcacccccaccaaccgcgaacaccccacccactcatcaggtgcgcgataagccaatcaaataacagcactcaattcaggaaggagtcacagggtgtgtcccctggcatcgctgggaattcaacagacacagcccacagcatgacttccagaacacctgaatcaaattactcctcaggatgataggcacatataataggagtgtaaccgggttgggacagtggcctcacagttgccttattttaggtaaagcaatggcagggaagaaatctttacctaggaaaccgtgtgcgtgtgtgtgtgtgagtgtgtttgtgtgtgtgtgggggggggcgtgtgtgtgtgtgtgtttgtgctgggatgaacctccaagtaggtacttttggcagctgccatcatcctctcagcgacggaaggacaagaagtcgaaagtgcgctttctgacctgagaatagtcaatgaagtatagtatttagcacagcgtattttcttccctagtgagaaaggagagatccgtggaatcaaacagaccttccagcgataacctttccacgttgagcctattgattctctgtccgagtgaaattacctgccaggggagaacaagacaagtctttgcatgaaatgctcttgtggaagctagattgccaaataagaaagaatcaaatggtagaaacatgcactgaagtttgaagagatactcagtgcacaaagtagactgtgaaagcctttggggaaatcatgcaatccccgagagactaattgatgacaatccccaaatttatgtttgccagaaaagagagacggtcatgacactgcatagtgagcggtttcggacgtgcgacggcagtttaagaaaacacgaaacaaaaaacttgagaactcagaaggtatcccagctatacccttttgtttattaaagaattgatgaaaataaaaacaacgtatctcacagcatgtgtgataatatttccatacgtatgtgataatggatcaacgtttcctagagatgaaataaaaagttctaatttggacaaaagcaaacaaggaaaattataccgtagaaaagcccggctgacggaagtgaggccctgtctcagggagaaacatcggagacgtttaaaagcagggagtgaaacagaggatagcgtgccatttttaatactggcccttgtttcagtgggaaaaggccaaaataagccgtgcatatcctggattctcgcatcgatcgttcaggatcggagatgttgcctccatttccagttacgcattgtatggtggaattgcagttagcacatttggtgccaaaattgtaatgctgccgaaagtggacatgttccctgaagtaagagggacagaatttgggtgtgtcttccggctgtctggcttagcaggaatgaagatcctggctctagggattttcccaacatgtcttagacggtaaggaacagggcggaattgaggcccggcgccaaggcctctaggtgtaaagaaacagccctggcttcagggcccatgaaattaggatgattttaaggaggatgatgggatgagaggactgtgacctttggccccgtttctttcccttgtcttttcatgggccaggtgtgctccatcagaaggcttcctgtgccggatgtaaagtgtcctgggggaagaaaagagcactgcttagaaagatgctccacagggagaaaggagccaccattttcaggagaatgatccccagaagcatgagcaatgcagatgccgaggcttcacacaagaccctggagggtcttattcctgcagccgggacctgggcatcggtgtgcttgaatgctcataaccgattttgaggggagcccaatcgataagctgtctgccagtcatgctcatcac

SEQ ID NO: 317528 - DNA, 4001 bp, Homo sapiens
acgaatgaaacacaccccaagagaaaatacgaaaccgagtcccctgcaattacctcacacgcaaacctacgcgtcggtaggtcatattcagaaatacacactgaatgtcacctatcatgaacacaaacactcagacagtccctccagaggttcggaagactcacgaccccaaaacttgatgtttcccatatgcgggctcatcctgagatgtagccatcactatccagttgtccctgttgtagagacagaaagttgggctcctcattagtttatgtaggattgacggtgttcgtgtttgtgtgggtgtgtgtgtgtttgcgtgcgcgcttctgggtgtagttatgtgtgtgtctgtgtgtgtgcgtgtgtgtgtgcacccctacgtgtgggtcggtacttccactgagatcactggcacacaagcagagccctcttgctgtgtttgttcttccctttggatctcctggccctccctcgcagggaagcgagtgtgccagtgttcatggactcctgatgtgtcggggtcgtcgaagagagttttagcagggagctttgctgttcaggatgatggttcttcatcccacacttgtattttgattgatgaatcacaagtacgtcgggaggcagggtaccttcgacttttctgacgttgaactcaggcttcgttttgttttgctcttgaaggaatttccagtggtctaaggtgctttcctgagtggctctttccaccaagtgctcgtccaactcgggggcctggaggcaggggtggtctctcttgagctctccttgcgttgctcgcctgtctgtgtcttctgcgccaagggctcttggttctctgcctcttgacacactctcactgtgtctttcccattcactcttctggatgtaaaagaggacgtaggcctgttgactcaggacagaagtgatgctagaggcggtgacctcggcatcatccattttataccactggccttcttgagctttgacataagagaagtaatgtccgttgtgacaactccacccagcgtggaccagcacagcatagaggacatagacgagaggtcctgtgttcggctgagacatgtatggctgcatgtcaaggcactcaggatattgcacattcttggcaatcttgttgcctgtgacatcggagaatctcttcaatacaaggatgaggaccttggcagaggtgagtaaagttaacatcttggaggccggcgccctctggagacaaacaccacaatgataggcattctctccattgagttcttcgggcttcaccaactgttccaaagcttgctggacactctgagctgcctggatatccagggcgatgtccaggtaagggtcaaaagtgtctgaaatgccgtggcagtggagacacttgatttgagatctccagtagcctccaaatatttggtggatgagggtggtgtccttagagtgatgatccacctgcttgtgcccgggaaggcatgcctttttcatggcatccacagtgaacatgagaaattcatgggcatcttcctgcttgcctctatggaagccagcagccaatgcctgtgagggctggatgacgtggccaggattgtggagggcccgtgtgatgtgagcttgcatcgtacagagcatgcagcccttgtgacgatgacacgtttgagagtgctcccgggacagcatgtagttggcaaggggcggtgtgtatgtcaggcactgcaaggaagcgttcacgtagcaggtatttcccatattctggagcccagcccccaccgcagcaggtctcctgttactcagaggaagcttctccctgggagcaagctgtcttgccacaggagccaaatcatcacagaggtcgacacgggtctcacatgagagtggtgacttctcagggagagaagtccgctggatttcagcaaaagctgcatcgggccgagaagatgtgagttttgaaaagtggttgaactgccactcacctcccaagtagagtgagtcttcctccatgtcgactggaacaaggatcacaaggtttttctgctgggaccgcaggttgcagaaagacgctatcccttccgagagagtcttcaaatgacgagctctctggcgcatcagcccttctgtaagtcaaccccaccaaccgcgaacaccccacccactcatcaggtgcgcgataagccaatcaaatatcagcactcaattcaggaaggagtcacagggtgtgtccccttgcatcgctgggaattcaacagacacagcccacagcatgacttccagaacacctgaatcaaattactcctcaggatgataggcacatataataggagtgtaaccgggttgggacagtggccacacagttgccttattttaggtaaagcaatggcagggaagaaatctttacgtaggaaaccgtgtgagtgtgtgtgtgtgattgtgttcgtgtgtgtgtgtgtggggggggcgcgtgtgtgtgtgtgtttgtgctgggatgaacttccaagtatgtacttttggcaactgccatcatcctctcagcgacggaaagacaagaagtcgaaagtgcgctttctgacctgagaatagtcaatgaagtatagtatttagcacagcgtattttcttccctaatgagaaaggagagatccgtggaatcaaacagaccttccagcgataagctttccacgttgagcctattgattctctatctgagtgaaattacctgccagtggagaacaagacaagtctttgcatgaaatgctcttgtggaagctagattgccaaataagaaagcatgaaatggtagaaacatgcactgaagtttgaagagatactcagtgcacaaagtagactgtgaaagcctttggggaaatcatgcaatccccgagagactaattgatgacaatccccaaatttatgtttgccagaaaagagagacggtcatgacactgcatagtgagcggtttcggacgtgcgacggcagtttaagaaaacacgaaacaaaaaacttgagaactcagaaggtatcccagctataaccgtttgtttattaaagaattgatgaaaataaaaacaacgtatctcacagcatgtgtgataatatttccatacgtatgtgataatggatcaacgtttcctagaggtgaaataaaaagttctaatttggacaaaagcaaacaaggaaaattataccgtggaaaagcccggctgacggaagtgaggccctgtctcagggagaaacatcggagacgtttaaaagcagggagtgaaacagaggatagcgtgccatttttaatactggcccttgtttcagtgggaaaaggccaaaataagccgtgcatatcctggattctcgcatcgatcgttcaggatcggagatgttgcctccatttccagttacgcattgtatggtggaattgcagttagcacatttggtgccaaaattgtaatgctgccgaaagtggacatgttccctgaagtaagagggacagaatttgggtgtgtcttccggctgtctggcttagcaggaatgaagatcctggctctagggattttcccaacatgtcttagacggtaaggaacagggcggaattgaggcccggcgccaaggcctctaggtgtaaagaaacagccctggcttcagggcccatgaaattaggatgattttaaggaggatgatgggatgagaggactgtgacctttggccccgtttctttcccttgtcttttcatgggccaggtgtgctccatcagaaggcttcctgtgccggatgtaaagtgtcctgggggaagaaaagagcactgcttagaaagatgctccacagggagaaaggagccaccattttcaggagaatgatccccagaagcatgagcaatgcagatgccgaggcttcacacaagaccctggagggtcttattcctgcagccgggacctgggcatcggtgtgcttgaatgctcataaccgattttgaggggagcccaatcgataagctgtctgccagtcatgctcatc

SEQ ID NO: 317529 - DNA, 4001 bp, Homo sapiens
acgaatgaaacacaccccaagagaaaatacgaaaccgagtcccctgcaattacctcacacgcaaacctacacgtcggtaggtcatattcagaaatacacactgaatgtcacctatcatgaacacaaacactcagacagtccctccagaggttcggaagactcacgaccccaaaacttgatgtttcccatatgcgggctcatcctgagatgtagccatcactatccagttgtccctgttgtagagacagaaacttgggctcctcattagtttatgtaggattgacggtgttcgtgtttgtgtgggtgtgtgtgtgtttgcgtgcgcgcttctgggtgtagttatgtgtgtgtctgtgtgtgtgcgtgtgtgtgtgcacccctacgtgtgggtcggtacttccactgagatcactggcacacaagcagagccctcttgctgtgtttgttcttccctttggatctcctggccctccctcgcagggaagcgagtgtgccagtgttcatggactcctgatgtgtcggggtcgacgaagagaggtttagcagggagctttgctgttcaggatgatggttcttcatcccacacttgtattttgattgatgaatcacaagtacgtcgggaggcagggtaccttcgacttttctgacgttgaactcaggcttcgttttgttttgctcttgaaggaatttccagtggtctaaggtgctttcctgagtggctctttccaccaagtgctcgtccaactcgggggcctggaggcaggggtggtctctcttgagctctccttgcgttgctcgcctgtctgtgtcttctgcgccaagggctcttggttctctgcctcttgacacactctcactgtgtctttcccattcactcttctggatgtaaaagaggacgtaggcctgttgactcaggacagaagtgatgctagaggcggtgacctcggcatcatccattttataccactggccttcttgagctttgacataagagaagtaatgtccgttgtgacaactccacccagcgtggaccagcacagcatagaggacatagacgagaggtcctgtgttcggctgagacatgtatggctgcatgtcaaggcactcaggatattgcacattcttggcaatcttgttgcctgtgacatcggagaatctcttcaatacaaggatgaggaccttggcagaggtgagtaaagttaacatcttggaggccggcgccctctggagacaaacaccacaatgataggcattctctccattgagttcttcgggcttcaccaactgttccaaagcttgctggacactctgagctgcctggatatccagggcgatgtccaggtaagggtcaaaagtgtctgaaatgccgtggcagtggagacacttgatttgagatctccagtagcctccaaatatttggtggatgagggtggtgtccttagagtgatgatccacctgcttgtgcccgggaaggcatgcctttttcatggcatccacagtgaacatgagaaattcatgggcatcttcctgcttgcctctatggaagccagcagccaatgcctgtgagggctggatgacgtggccaggattgtggagggcccgtgtgatgtgagcttgcatcgtacagagcatgcagcccttgtgacgatgacacgtttgagagtgctcccgggacagcatgtagttggcaaggggcggtgtgtatgtcaggcactgcaaggaagcgttcacgtagcaggtatttcccatattctggagcccagcccccaccgcagcaggtctcctgttactcagaggaagcttctccctgggagcaagctgtcttgccacaggagccaaatcatcacagaggtcgacacgggtctcacatgagagtggtgacttctcagggagagaagtccgctggatttcagcaaaagctgcatcgggccgagaagatgtgagttttgaaaagtggttgaactgccactcacctcccaagtagagtgagtcttcctccatgtcgactggaacaaggatcacaaggtttttctgctgggaccgcaggttgcagaaagacgctatcccttccgagagagtcttcaaatgacgagctctctggcgcatcagcccttctgtaagtcaaccccaccaaccgcgaacaccccacccactcatcaggtgcgcgataagccaatcaaatatcagcactcaattcaggaaggagtcacagggtgtgtccccttgcatcgctgggaattcaacagacacagcccacagcatgacttccagaacacctgaatcaaattactcctcaggatgataggcacatataataggagtgtaaccgggttgggacagtggccacacagttgccttattttaggtaaagcaatgacagggaagaaatctttacgtaggaaaccgtgtgagtgtgtgtgtgtgattgtgttcgtgtgtgtgtgtgtggggggggcgcgtgtgtgtgtgtgtttgtgctgggatgaacttccaagtatgtacttttggcaactgccatcatcctctcagcgacggaaagacaagaagtcgaaagtgcgctttctgacctgagaatagtcaatgaagtatagtatttagcacagcgtattttcttccctagtgagaaaggagagatccgtggaatcaaacagaccttccagcgataacctttccacgttgagcctattgattctctatctgagtgaaattacctgccagtggagaacaagacaagtctttgcatgaaatgctcttgtggaagctagattgccaaataagaaagcatgaaatggtagaaacatgcactgaagtttgaagagatactcagtgcacaaagtagactgtgaaagcctttggggaaatcatgcaatccccgagagactaattgatgacaatccccaaatttatgtttgccagaaaagagagacggtcatgacactgcatagtgagcggtttcggacgtgcgacggcagtttaagaaaacacgaaacaaaaaacttgagaactcagaaggtatcccagctataaccgtttgtttattaaagaattgatgaaaataaaaacaacgtatctcacagcatgtgtgataatatttccatacgtatgtgataatggatcaacgtttcctagaggtgaaataaaaagttctaatttggacaaaagcaaacaaggaaaattataccgtagaaaagcccggctgacggaagtgaggccctgtctcagggagaaacatcggagacgtttaaaagcagggagtgaaacagaggatagcgtgccatttttaatactggcccttgtttcagtgggaaaaggccaaaataagccgtgcatatcctggattctcgcatcgatcgttcaggatcggagatgttgcctccatttccagttacgcattgtatggtggaattgcagttagcacatttggtgccaaaattgtaatgctgccgaaagtggacatgttccctgaagtaagagggacagaatttgggtgtgtcttccggctgtctggcttagcaggaatgaagatcctggctctagggattttcccaacatgtcttagacggtaaggaacagggcggaattgaggcccggcgccaaggcctctaggtgtaaagaaacagccctggcttcagggcccatgaaattaggatgattttaaggaggatgatgggatgagaggactgtgacctttggccccgtttctttcccttgtcttttcatgggccaggtgtgctccatcagaaggcttcctgtgccggatgtaaagtgtcctgggggaagaaaagagcactgcttagaaagatgctccacagggagaaaggagccaccattttcaggagaatgatccccagaagcatgagcaatgcagatgccgaggcttcacacaagaccctggagggtcttattcctgcagccgggacctgggcatcggtgtgcttgaatgctcataaccgattttgaggggagcccaatcgataagctgtctgccagtcatgctcatc

SEQ ID NO: 317530 - DNA, 4001 bp, Homo sapiens
acgaatgaaacacaccccaagagaaaatacgaaaccgagtcccctgcaattacctcacacgcaaacctacacgtcggtaggtcatattcagaaatacacactgaatgtcacctatcatgaacacaaacactcagacagtccctccagaggttcggaagactcacgaccccaaaacttgatgtttcccatatgcgggctcatcctgagatgtagccatcactatccagttgtccctgttgtagagacagaaacttgggctcctcattagtttatgtaggattgacggtgttcgtgtttgtgtgggtgtgtgtgtgtttgcgtgcgcgcttctgggtgtagttatgtgtgtgtctgtgtgtgtgcgtgtgtgtgtgcacccctacgtgtgggtcggtacttccactgagatcactggcacacaagcagagccctcttgctgtgtttgttcttccctttggatctcctggccctccctcgcagggaagcgagtgtgccagtgttcatggactcctgatgtgtcggggtcgacgaagagaggtttagcagggagctttgctgttcaggatgatggttcttcatcccacacttgtattttgattgatgaatcacaagtacgtcgggaggcagggtaccttcgacttttctgacgttgaactcaggcttcgttttgttttgctcttgaaggaatttccagcggtctaaggtgctttcctgagtggctctttccaccaagtgctcgtccaactcgggggcctggaggcaggggtggtctctcttgagctctccttgcgttgctcgcctgtctgtgtcttctgcgccaagggctcttggttccctgcctcttgacacactctcactgtgtctttcccattcactcttctggatgtaaaagaggacgtaggcctgttgactcaggacagaagtgatgctagcggcggtgacctcggcatcatccattttataccattggccttcttgagctttgacataagagaagtaatgtccgttgtgacaactccacccagcgtggaccagcacagcatagaggacatagacaagaggtcctgtgttctgctgagacatgtatggctgcatgtcaaggcactcaggatattgcacattcttggcaatcttgttgcctgtcacatcggagaatctcttcaatacaaggatgaggaccttggcagaggtgtgtaaagttaacgtcttggaggccggcgccctctggagacaaacaccacaatgataggcattctctccattgagttcttcgggcttcaccaactgttccaaagcttgctggacactctgagctgcctggatatccagggcgatgtccaggtaagggtcaaaagtgtctgaaatgccgtggcagtggagacacttgatttgagatctccagtagcctccaaatatttggtggatgagggtggtgtccttagagggatgatctacctgcttgtgcccgggaaggcatgcctttttcatggcatccacagtgaacatgagaaattcatgggcatcttcctgcttgcctctatggaagccagcagccaatgcctgtgagggctggatgacgtggccaggattgtggagggcccgtgtgatgtgagcttgcatagtacagagcatgcagcccttgtgacgatgacacgtttgagagtgctcccgggacagcatgtagttggcaaggggcggtgtgtatgtcaggcactgcaaggaagcgttcacgtagcaggtatttcccatattctggagcccagcccccaccgcagcaggtctcctgctactcagaggaagcttctccctgggagcaagctgtcttgcctcaggaaccaaatcatcacagaggtcgacacgggtctcacatgagagtggtgacttctcagggagagaagtccgctggatttcagcaaaagctgcatcgagccgagaagatgtgagttttgaaaagtggttgaactgccactcaccacccaagtagagtgagtcctcctccatgtcgactggaacaaggatcacaaggtttgtctgctgggaccgcaggttgcagaaagacgctatcccttccgagagagtcttcaaatgacgagctctctggccgcatcagcccttctgtaagtcacccccacgaaccgcgaacaccccacccactcatcaggtgcgcgataagccaatcaaatatcagcactcaattcaggaaggagtcacagggtgtgtcccctggcatcgctgggaattcaacagacacagcccacagcatgacttccagaacacctgaatcaaattactcctcaggatgataggcacatataataggagtgtaaccgggttgggacagtggcctcacagttgccttattttaggtaaagcaatggcagggaagaaatctttacctaggaaaccgtgtgcgtgtgtgtgtgtgagtgtgtttgtgtgtgtgtggggggggcatgtgtgtgtgtgtgtttgtgctgggatgaacctccaagtagttacttttggcagctgccatcatcctctcagcgacggaaggacaagaagtcgaaagtgcgctttctgacctgagaatagtcaatgaagtatagtatttagcacagcgtattttcttccctagtgagaaaggagagatccgtggaatcaaacagaccttccagcgataacctttccacgttgagcctattgattctctgtccgagtgaaattacctgccagtggagaagaagacaagtctttgcatgaaatgctcttgtggaagctagattgccaaataataaagcatcaaatggtagaaacatgcactgaagtttgaagagatactcagtgcacaaagtagacagtgaaagcctttggggaaatcatgcaatccccgagagactaattgatgacaatccccaaatttatgtttgccagaaaagagagacggtcatgacactgcatagtgagcggtttcggacgtgcgacggcagtttaagaaaacacgaaacaaaaaacttgagaactcagaaggtatcccagctataaccttttgtttattaagaattgatgaaaataaaaacaacgtatctcacagcatgtgtgataatatttccatacgtatgtgataatggatcaacgtttcctagagataaaataaaaagttctaatttggacaaaagcaaacaaggaaaattataccgtagaaaagcccggctgacggaagtgaggccctgtctcagggagaaacatcagagacgtttaaaagcagggagtgaaacagaggatagcgtgccatttttaatactggcccttgtttcagtgggaaaaggccaaaataagccgtgcatatcctggattctcgcatcgatcgttcaggatcggagatgttgcctccatttccagttacgcattgtatggtggaattgcagttagcacatttggtgccaaaattgtaatgctgccgaaagtggacatgttccctgaagtaagagggacagaatttgggtgtgtcttccggctgtctggcttagcaggaatgaagatcctggctctagggattttcccaacatgtcttagacggtaaggaacagggcggaattgaggcccggcgccaaggcctctaggtgtaaagaaacagccctggcttcagggcccatgaaattaggatgattttaaggaggatgatgggatgagaggactgtgacctttggccccgtttctttcccttgtcttttcatgggccaggtgtgctccatcagaaggcttcctgtgccggatgtaaagtgtcctgggggaagaaaagagcactgcttagaaagatgctccacagggagaaaggagccaccattttcaggagaatgatccccagaagcatgagcaatgcagatgccgaggcttcacacaagaccctggagggtcttattcctgcagccgggacctgggcatcggtgtgcttgaatgctcataaccgattttgaggggagcccaatcgataagctgtctgccagtcatgctcatcacac

SEQ ID NO: 317531 - DNA, 4001 bp, Homo sapiens
tgacgaatgaaacacaccccaagagaaaatacgaaaccgagtcccctgcaattacctcacacgcaaacctacacgtcggtaggtcatattcagaaatacacactgaatgtcacctatcatgaacacaaacactcagacagtcccaccagaggttcggaagactcacgaccccaaaacttgatgtttcccatatgcgggctcatcctgagatgtagccatcactatccagttgtccctgttgtagagacagaaacttgggctcctcattagtttatgtaggattgacggtgttcgtgtttgggtgggtgtgtgtgtttgcgtgtgcgcttctgggtgtagttatgtgtgtgtctgtgtgtgtgcgtgtgtgtgtgcacccctacgtgtgggtcggtacttccactgagaccactggcacacaagcagagccctcttgctgtgtttgttcttccctttggatctcctggccctccctcgcagggaagcgagtgtgccagtgttcatggactcctgatgtgtcggggtcgtcgaagagaggtttagcagggagctttgctgttcaggatgatggttcttcatcccacacttgtattttgattgatgaatcacaagtacgtcgggaggcagggtaccttcgacttttctgacgttgaactcaggcttcgttttgttttgctcttgaaggaatttccagtggtctaaggtgctttcctgagtggctctttccaccaagtgctcgtccaactcgggggcctggaggcaggggtggtctctcttgagctctccttgcgttgctcgcctgtctgtgtcttctgcgccaagggctcttggttccctgcctcttgacacactctcactgtgtctttcccattcactcttctggatgtaaaagaggacgtaggcctgttgactcaggacagaagtgatgctagaggcggtgacctcggcatcatccattttataccactggccttcttgagctttgacataagagaagtaatgtccgttgtgacaactccacccagcgtggaccagcacagcatagaggacatagacgagaggtcctgagttcgtctgagacatgtatagcttcatgtcaaggcactcaggatattgcacattcttgtcaatcttgttgcctgtgacatcggagaatctcttcaatacaaggatgaggaccttggcagaggtgtgtaaagttaacgtcttggaggccggcgccctctggagacaaacaccacaatgataggcattctctccattgagttcttcgggcttcaccaactgttccaaagcttgctggacactctgagctgcctggatatccagggcgatgtccaggtaagggtcaaaagtgtctgaaatgccgtggcagtggagacacttgatttgagatctccagtagcctccaaatatttggtggatgagggtggtgtccttagagtgatgatccacctgcttgtgcccgggaaggcatgcctttttcatggcatccacagtgaacatgagaaattcatgggcatcttcctgcttgcctctatggaagccagcagccaatgcctgtgagggctggatgacgtggccaggattgtggagggcccgtgtgatgtgagcttgcatcgtacagagcatgcagcccttgtgacgatgacacgtttgagagtgctcccgggacagcatgtagttggcaaggggcggtgtgtatgtcaggcactgcaaggaagcgttcacgtagcaggtatttcccatattctggagcccagcccccaccgcagcaggtctcctgctactcagaggaagcttctccctgggagcaagctgtcttgccacaggagccaaatcatcacagaggtcgacacgggtctcacatgagagtggtgacttctcagggagagaagtccgctggatttcagcaaaagctgcatcgggccgagaagatgtgagttttgaaaagtggttgaactgccactcacctcccaagtagagtgagtcgtcctccatgtcgactggaacgaggatcacaaggtttgtctgctgggaccgcaggttgcagaaagacgctatcccttccgagagagtcttcaaatgacgagctctctggccgcatcagcccttctgtaagtcacccccaccaaccgcgaacaccccacccactcatcaggtgcgcgataagccaatcaaatatcagcactcaattcaggaaggagtcacagggtgtgtcccctggcatcgctgggaattcaacagacacagcccacagcatgacttccagaacacctgaatcaaattactcctcaggatgataggcacatataataggagtgtaaccgggttgggacagtggcctcacagttgccttattttaggtaaagcaatggcagggaagaaatctttacctaggaaaccgtgtgcgtgtgtgtgtgtgagtgtgtttgtgtgtgtgtgggggggggcgtgtgtgtgtgtgtgtttgtgctgggatgaacctccaagtaggtacttttggcagctgccatcatcctctcagcgacggaaggacaagaagtcgaaagtgcgctttctgacctgagaatagtcaatgaagtatagtatttagcacagcgtattttcttccctagtgagaaaggagagatccgtggaatcaaacagaccttccagcgataacctttccacgttgagcctattgattctctgtccgagtgaaattacctgccagtggagaacaagacaagtctttgcatgaaatgctcttgtggaagctagattgccaaataagaaagaatcaaatggtagaaacatgcactgaagtttgaagagatactcagtgcacaaagtagactgtgaaagcctttggggaaatcatgcaatccccgagagactaattgatgacaatccccaaatttatgtttgccagaaaagagagacggtcatgacactgcatagtgagcggtttcggacgtgcgacggcagtttaagaaaacacgaaacaaaaaacttgagaactcagaaggtatcccagctatacccttttgtttattaaagaattgatgaaaataaaaacaacgtatctcacagcatgtgtgataatatttccatacgtatgtgataatggatcaacgtttcctagagatgaaataaaaagttctaatttggacaaaagcaaacaaggaaaattataccgtagaaaagcccggctgacggaagtgaggccctgtctcagggagaaacatcggagacgtttaaaagcagggagtgaaacagaggatagcgtgccatttttaatactggcccttgtatcagtgggaaaaggccaaaataagccgtgcatatcctggattctcgcatcgatcgttcaggatcggagatgttgcctccatttccagttacgcattgtatggtggaattgcagttagcacatttggtgccaaaattgtaatgctgccgaaagtggacatgttccctaagtaagagggacagaatttgggtgtgtcttccggctgtctggcttagcaggaatgaagatcctggctctagggattttcccaacacgtcttagacggtaaggaacagggcggaattgaggcccggcgccaaggcctctaggtgtaaagaaacagccctggcttcagggcccatgaaattaggatgattttaaggaggatgatgggatgagaggactgtgacctttggccccgtttctttcccttgtcttttcatgggccaggtgtgctccatcagaaggcttcctgtgccggatgtaaagtgtcctgggggaagaaaagagcactgcttagaaagatgctccacagggagaaaggagccaccattttcaggagaatgatccccagaagcatgagcaatgcagatgccgaggcttcacacaagaccctggagggtcttattcctgcagccgggacctgggcatcggtgtgcttgaatgctcataaccgattttgaggggagcccaatcgataagctgtctgccagtcatgctcatcaca

SEQ ID NO: 317532 - DNA, 4001 bp, Homo sapiens
acgaatgaaacacaccccaagagaaaatacgaaaccgagtcccctgcaattacctcacacgcaaacctacacgtcggtaggtcatattcagaaatacacactgaatgtcacctatcatgaacacaaacactcagacagtccctccagaggttcggaagactcacgaccccaaaacttgatgtttcccatatgcgggctcatcctgagatgtagccatcactatccagttgtccctgttgtagagacagaaacttgggctcctcattagtttatgtaggattgacggtgttcgtgtttgtgtgggtgtgtgtgtgtttgcgtgcgcgcttctgggtgtagttatgtgtgtgtctgtgtgtgtgcgtgtgtgtgtgcacccctacgtgtgggtcggtacttccactgagatcactggcacacaagcagagccctcttgctgtgtttgttcttccctttggatctcctggccctccctcgcagggaagcgagtgtgccagtgttcatggactcctgatgtgtcggggtcgacgaagagaggtttagcagggagctttgctgttcaggatgatggttcttcatcccacacttgtattttgattgatgaatcacaagtacgtcgggaggcagggtaccttcgacttttctgacgttgaactcaggcttcgttttgttttgctcttgaaggaatttccagtggtctaaggtgctttcctgagtggctctttccaccaagtgctcgtccaactcgggggcctggaggcaggggtggtctctcttgagctctccttgcgttgctcgcctgtctgtgtcttctgcgccaagggctcttggttccctgcctcttgacacactctcactgtgtctttcccattcactcttctggatgtaaaagaggacgtaggcctgttgactcaggacagaagtgatgctagcggcggtgacctcggcatcatccattttataccattggccttcttgagctttgacataagagaagtaatgtccgttgtgacaactccacccagcgtggaccagcacagcatagaggacatagacaagaggtcctgtgttctgctgagacatgtatggctgcatgtcaaggcactcaggatattgcacattcttggcaatcttgttgcctgtcacatcggagaatctcttcaatacaaggatgaggaccttggcagaggtgtgtaaagttaacgtcttggaggccggcgccctctggagacaaacaccacaatgataggcattctctccattgagttcttcgggcttcaccaactgttccaaagcttgctggacactctgagctgcctggatatccagggcgatgtccaggtaagggtcaaaagtgtctgaaatgccgtggcagtggagacacttgatttgagatctccagtagcctccaaatatttggtggatgagggtggtgtccttagagtgatgatctacctgcttgtgcccgggaaggcatgcctttttcatggcatccacagtgaacatgagaaattcatgggcatcttcctgcttgcctctatggaagccagcagccaatgcctgtgagggctggatgacgtggccaggattgtggagggcccgtgtgatgtgagcttgcatcgtacagagcatgcagcccttgtgacgatgacacgtttgagagtgctcccgggacagcatgtagttggcaaggggcggtgtgtatgtcaggcactgcaaggaagcgttcacgtagcaggtatttcccatattctggagcccagcccccaccgcagcaggtctcctgctactcagaggaagcttctccctgggagcaagctgtcttgccacaggagccaaatcatcacagaggtcgacacgggtctcacatgagagtggtgacttctcagggagagaagtccgctggatttcagcaaaagctgcatcgggccgagaagatgtgagttttgaaaagtggttgaactgccactcacctcccaagtagagtgagtcgtcctccatgtcgactggaacaaggatcacaaggtttgtctgctgggaccgcaggttgcagaaagacgctatcccttccgagagagtcttcaaatgacgagctctctggccgcatcagcccttctgtaagtcacccccaccaaccgcgaacaccccacccactcatcaggtgcgcgataagccaatcaaatatcagcactcaattcaggaaggagtcacagggtgtgtccccttgcatcgctgggaattcaacagacacagcccacagcatgacttccagaacacctgaatcaaattactcctcaggatgataggcacatataataggagtgtaaccgggttgggacagtggccacacagttgccttattttaggtaaagcaatggcagggaagaaatctttacgtaggaaaccgtgtgagtgtgtgtgtgtgattgtgttcgtctgtgtgtgtgtggggggggcgcgtgtgtgtgtgtgtttgtgctgggatgaacttccaagtatgtacttttggcaactgccatcatcctctcagcgacggaaagacaagaagtcgaaagtgcgctttctgacctgagaatagtcaatgaagtatagtatttagcacagcgtattttcttccctaatgagaaaggagagatccgtggaatcaaacagaccttccagcgataacctttccacgttgagcctattgattctctatctgagtgaaattacctgccagtggagaacaagacaagtctttgcatgaaatgctcttgtggaagctagattgccaaataagaaagcatgaaatggtagaaacatgcactgaagtttgaagagatactcagtgcacaaagtagactgtgaaagcctttggggaaatcatgcaatccccgagagactaattgatgacaatccccaaatttatgtttgccagaaaagagagacggtcatgacactgcatagtgagcggtttcggacgtgcgacggcagtttaagaaaacacgaaacaaaaaacttgagaactcagaaggtatcccagctataaccgtttgtttattaaagaattgatgaaaataaaaacaacgtatctcacagcatgtgtgataatatttccatacgtatgtgataatggatcaacgtttcctagaggtgaaataaaaagttctaatttggacaaaagcaaacaaggaaaattataccgtggaaaagcccggctgacggaagtgaggccctgtctcagggagaaacatcggagacgtttaaaagcagggagtgaaacagaggatagcgtgccatttttaatactggcccttgtttcagtgggaaaaggccaaaataagccgtgcatatcctggattctcgcatcgatcgttcaggatcggagatgttgcctccatttccagttacgcattgtatggtggaattgcagttagcacatttggtgccaaaattgtaatgctgccgaaagtggacatgttccctgaagtaagagggacagaatttgggtgtgtcttccggctgtctggcttagcaggaatgaagatcctggctctagggattttcccaacatgtcttagacggtaaggaacagggcggaattgaggcccggcgccaaggcctctaggtgtaaagaaacagccctggcttcagggcccatgaaattaggatgattttaaggaggatgatgggatgagaggactgtgacctttggccccgtttctttcccttgtcttttcatgggccaggtgtgctccatcagaaggcttcctgtgccggatgtaaagtgtcctgggggaagaaaagagcactgcttagaaagatgctccacagggagaaaggagccaccattttcaggagaatgatccccagaagcatgagcaatgcagatgccgaggcttcacacaagaccctggagggtcttattcctgcagccgggacctgggcatcggtgtgcttgaatgctcataaccgattttgaggggagcccaatcgataagctgtctgccagtcatgctcat

SEQ ID NO: 317533 - DNA, 4001 bp, Homo sapiens; identical to SEQ ID NO: 317525

SEQ ID NO: 317534 - DNA, 4001 bp, Homo sapiens; identical to SEQ ID NO: 317526

SEQ ID NO: 317535 - DNA, 4001 bp, Homo sapiens
acgaatgaaacacaccccaagagaaaatacgaaaccgagtcccctgcaattacctcacacgcaaacctacgcgtcggtaggtcatattcagaaatacacactgaatgtcacctatcatgaacacaaacactcagacagtccctccagaggttcggaagactcacgaccccaaaacttgatgtttcccatatgcgggctcatcctgagatgtagccatcactatccagttgtccctgttgtagagacagaaagttgggctcctcattagtttatgtaggattgacggtgttcgtgtttgtgtgggtgtgtgtgtgtttgcgtgcgcgcttctgggtgtagttatgtgtgtgtctgtgtgtgtgcgtgtgtgtgtgcacccctacgtgtgggtcggtacttccactgagatcactggcacacaagcagagccctcttgctgtgtttgttcttccctttggatctcctggccctccctcgcagggaagcgagtgtgccagtgttcatggactcctgatgtgtcggggtcgtcgaagagagttttagcagggagctttgctgttcaggatgatggttcttcatcccacacttgtattttgattgatgaatcacaagtacgtcgggaggcagggtaccttcgacttttctgacgttgaactcaggcttcgttttgttttgctcttgaaggaatttccagtggtctaaggtgctttcctgagtggctctttccaccaagtgctcgtccaactcgggggcctggaggcaggggtggtctctcttgagctctccttgcgttgctcgcctgtctgtgtcttctgcgccaagggctcttggttctctgcctcttgacacactctcactgtgtctttcccattcactcttctggatgtaaaagaggacgtaggcctgttgactcaggacagaagtgatgctagaggcggtgacctcggcatcatccattttataccactggccttcttgagctttgacataagagaagtaatgtccgttgtgacaactccacccagcgtggaccagcacagcatagaggacatagacgagaggtcctgtgttcgtctgagacatgtatggctgcatgtcaaggcactcaggatattgcacattcttggcaatcttgttgcctgtgacatcggagaatctcttcaatacaaggatgaggaccttggcagaggtgtgtaaagttaacgtcttggaggccggcgccctctggagacaaacaccacaatgataggcattctctccattgagttcttcgggcttcaccaactgttccaaagcttgctggacactctgagctgcctggatatccagggcgatgtccaggtaagggtcaaaagtgtctgaaatgccgtggcagtggagacacttgatttgagatctccagtagcctccaaatatttggtggatgagggtggtgtccttagagtgatgatccacctgcttgtgcccgggaaggcatgcctttttcatggcatccacagtgaacatgagaaattcatgggcatcttcctgcttgcctctatggaagccagcagccaatgcctgtgagggctggatgacgtggccaggattgtggagggcccgtgtgatgtgagcttgcatcgtacagagcatacagcccttgtgacgatgacacgtttgagagtgctcccgggacagcatgtagttggcaaggggcggtgtgtatgtcaggcactgcaaggaagcgttcacgtagcaggtatttcccatattctggagcccagcccccaccgcagcaggtctcctgctactcagaggaagcttctccctgggagcaagctgtcttgccacaggagccaaatcatcacagaggtcgacacgggtctcacatgagagtggtgacttctcagggagagaagtccgctggatttcagcaaaagctgcatcgggccgagaagatgtgagttttgaaaagtggttgaactgccactcacctcccaagtagagtgagtcttcctccatgtcgactggaacaaggatcacaaggtttttctgctgggaccgcaggttgcagaaagacgctatcccttccgagagagtcttcaaatgacgagctctctggcgcatcagcccttctgtaagtcaaccccaccaaccgcgaacaccccacccactcatcaggtgcgcgataagccaatcaaatatcagcactcaattcaggaaggagtcacagggtgtgtccccttgcatcgctgggaattcaacagacacagcccacagcatgacttccagaacacctgaatcaaattactcctcaggatgataggcacatataataggagtgtaaccgggttgggacagtggccacacagttgccttattttaggtaaagcaatggcagggaagaaatctttacgtaggaaaccgtgtgagtgtgtgtgtgtgattgtgttcgtgtgtgtgtgtgtgggggggggcgcgtgtgtgtgtgtgtttgtgctgggatgaacttccaagtatgtacttttggcaactgccatcatcctctcagcgacggaaagacaagaagtcgaaagtgcgctttctgacctgagaatagtcaatgaagtatagtatttagcacagcgtattttcttccctagtgagaaaggagagatccgtggaatcaaacagaccttccagcgataacctttccacgttgagcctattgattctctatctgagtgaaattacctgccagtggagaacaagacaagtctttgcatgaaatgctcttgtggaagctagattgccaaataagaaagcatgaaatggtagaaacatgcactgaagtttgaagagatactcagtgcacaaagtagactgtgaaagcctttggggaaatcatgcaatccccgagagactaattgatgacaatccccaaatttatgtttgccagaaaagagagacggtcatgacactgcatagtgagcggtttcggacgtgcgacggcagtttaagaaaacacgaaacaaaaaacttgagaactcagaaggtatcccagctataaccgtttgtttattaaagaattgatgaaaataaaaacaacgtatctcacagcatgtgtgataatatttccatacgtatgtgataatggatcaacgtttcctagaggtgaaataaaaagttctaatttggacaaaagcaaacaaggaaaattataccgtggaaaagcccggctgacggaagtgaggccctgtctcagggagaaacatcggagacgtttaaaagcagggagtgaaacagaggatagcgtgccatttttaatactggcccttgtttcagtgggaaaaggccaaaataagccgtgcatatcctggattctcgcatcgatcgttcaggatcggagatgttgcctccatttccagttacgcattgtatggtggaattgcagttagcacatttggtgccaaaattgtaatgctgccgaaagtggacatgttccctgaagtaagagggacagaatttgggtgtgtcttccggctgtctggcttagcaggaatgaagatcctggctctagggattttcccaacatgtcttagacggtaaggaacagggcggaattgaggcccggcgccaaggcctctaggtgtaaagaaacagccctggcttcagggcccatgaaattaggatgattttaaggaggatgatgggatgagaggactgtgacctttggccccgtttctttcccttgtcttttcatgggccaggtgtgctccatcagaaggcttcctgtgccggatgtaaagtgtcctgggggaagaaaagagcactgcttagaaagatgctccacagggagaaaggagccaccattttcaggagaatgatccccagaagcatgagcaatgcagatgccgaggcttcacacaagaccctggagggtcttattcctgcagccgggacctgggcatcggtgtgcttgaatgctcataaccgattttgaggggagcccaatcgataagctgtctgccagtcatgctcat

SEQ ID NO: 317536 - DNA, 4001 bp, Homo sapiens; identical to SEQ ID NO: 317525

SEQ ID NO: 317537 - DNA, 4001 bp, Homo sapiens; identical to SEQ ID NO: 317527

SEQ ID NO: 317538 - DNA, 4001 bp, Homo sapiens
acgaatgaaacacaccccaagagaaaatacgaaaccgagtcccctgcaattacctcacacgcaaacctacacgtcggtaggtcatattcagaaatacacactgaatgtcacctatcatgaacacaaacactcagacagtcccaccagaggttcggaagactcacgaccccaaaacttgatgtttcccatatgcgggctcatcctgagatgtagccatcactatccagttgtccctgttgtagagacagaaacttgggctcctcattagtttatgtaggattgacggtgttcgtgtttgtgtgggtgtgtgtgtgtttgcgtgcgcgcttctgggtgtagttatgtgtgtgtctgtgtgtgtgcgtgtgtgtgtgcacccctacgtgtgggtcggtacttccactgagatcactggcacacaagcagagccctcttgctgtgtttgttcttccctttggatctcctggccctccctcgcagggaagcgagtgtgccagtgttcatggactcctgatgtgtcggggtcgtcgaagagagttttagcagggagctttgctgttcaggatgatggttcttcatcccacacttgtattttgattgatgaatcacaagtacgtcgggaggcagggtaccttcgacttttctgacgttgaactcaggcttcgttttgttttgctcttgaaggaatttccagtggtctaaggtgctttcctgagtggctctttccaccaagtgctcgtccaactcgggggcctggaggcaggggtggtctctcttgagctctccttgcgttgctcgcctgtctgtgtcttctgcgccaagggctcttggttctctgcctcttgacacactctcactgtgtctttcccattcactcttctggatgtaaaagaggacgtaggcctgttgactcaggacagaagtgatgctagaggcggtgacctcggcatcatccattttataccactggccttcttgagctttgacataagagaagtaatgtccgttgtgacaactccacccagcgtggaccagcacagcatagaggacatagacgagaggtcctgtgttctgctgagacatgtatggctgcatgtcaaggcactcaggatattgcacattcttggcaatcttgttgcctgtgacatcggagaatctcttcaatacaaggatgaggaccttggcagaggtgtgtaaagttaacgtcttggaggccggcgccctctggagacaaacaccacaatgataggcattctctccattgagttcttcgggcttcaccaactgttccaaagcttgctggacactctgagctgcctggatatccagggcgatgtccaggtaagggtcaaaagtgtctgaaatgccgtggcagtggagacacttgatttgagatctccagtagcctccaaatatttggtggatgagggtggtgtccttagagtgatgatccacctgcttgtgcccgggaaggcatgcctttttcatggcatccacagtgaacatgagaaattcatgggcatcttcctgcttgcctctatggaagccagcagccaatgcctgtgagggctggatgacgtggccaggattgtggagggcccgtgtgatgtgagcttgcatcgtacagagcatgcagcccttgtgacgatgacacgtttgagagtgctcccgggacagcatgtagttggcaaggggcggtgtgtatgtcaggcactgcaaggaagcgttcacgtagcaggtatttcccatattctggagcccagcccccaccgcagcaggtctcctgctactcagaggaagcttctccctgggagcaagctgtcttgccacaggagccaaatcatcacagaggtcgacacgggtctcacatgagagtggtgacttctcagggagagaagtccgctggatttcagcaaaagctgcatcgggccgagaagatgtgagttttgaaaagtggttgaactgccactcacctcccaagtagagtgagtcgtcctccatgtcgactggaacgaggatcacaaggtttttctgctgggaccgcaggttgcagaaagacgctatcccttccgagagagtcttcaaatgacgagctctctggccgcatcagcccttctataagtcacccccaccaaccgcgaacaccccacccactcatcaggtgcgcgataagccaatcaaataacagcactcaattcaggaaggagtcacagggtgtgtcccctggcatcgctgggaattcaacagacacagcccacagcatgacttccagaacacctgaatcaaattactcctcaggatgataggcacatataataggagtgtaaccgggttgggacagtggcctcacagttgccttattttaggtaaagcaatggcagggaagaaatctttacctaggaaaccgtgtgcgtgtgtgtgtgtgagtgtgtttgtgtgtgtgtgggggggggcgtgtgtgtgtgtgtgtttgtgctgggatgaacctccaagtaggtacttttggcagctgccatcatcctctcagcgacggaaggacaagaagtcgaaagtgcgctttctgacctgagaatagtcaatgaagtatagtatttagcacagcgtattttcttccctagtgagaaaggagagatccgtggaatcaaacagaccttccagcgataacctttccacgttgagcctattgattctctgtccgagtgaaattacctgccagggggagaacaagacaagtctttgcatgaaatgctcttgtggaagctagattgccaaataagaaagaatcaaatggtagaaacatgcactgaagtttgaagagatactcagtgcacaaagtagactgtgaaagcctttggggaaatcatgcaatccccgagagactaattgatgacaatccccaaatttatgtttgccagaaaagagagacggtcatgacactgcatagtgagcggtttcggacgtgcgacggcagtttaagaaaacacgaaacaaaaaacttgagaactcagaaggtatcccagctatacccttttgtttattaaagaattgatgaaaataaaaacaacgtatctcacagcatgtgtgataatatttccatacgtatgtgataatggatcaacgtttcctagagatgaaataaaaagttctaatttggacaaaagcaaacaaggaaaattataccgtagaaaagcccggctgacggaagtgaggccctgtctcagggagaaacatcggagacgtttaaaagcagggagtgaaacagaggatagcgtgccatttttaatactggcccttgtttcagtgggaaaaggccaaaataagccgtgcatatcctggattctcgcatcgatcgttcaggatcggagatgttgcctccatttccagttacgcattgtatggtggaattgcagttagcacatttggtgccaaaattgtaatgctgccgaaagtggacatgttccctgaagtaagagggacagaatttgggtgtgtcttccggctgtctggcttagcaggaatgaagatcctggctctagggattttcccaacatgtcttagacggtaaggaacagggcggaattgaggcccggcgccaaggcctctaggtgtaaagaaacagccctggcttcagggcccatgaaattaggatgattttaaggaggatgatgggatgagaggactgtgacctttggccccgtttctttcccttgtcttttcatgggccaggtgtgctccatcagaaggcttcctgtgccggatgtaaagtgtcctgggggaagaaaagagcactgcttagaaagatgctccacagggagaaaggagccaccattttcaggagaatgatccccagaagcatgagcaatgcagatgccgaggcttcacacaagaccctggagggtcttattcctgcagccgggacctgggcatcggtgtgcttgaatgctcataaccgattttgaggggagcccaatcgataagctgtctgccagtcatgctcatca

SEQ ID NO: 317539 - DNA, 4001 bp, Homo sapiens; identical to SEQ ID NO: 317528

SEQ ID NO: 317540 - DNA, 4001 bp, Homo sapiens; identical to SEQ ID NO: 317529

SEQ ID NO: 317541 - DNA, 4001 bp, Homo sapiens; identical to SEQ ID NO: 317527

SEQ ID NO: 317542 - DNA, 4001 bp, Homo sapiens; identical to SEQ ID NO: 317538

SEQ ID NO: 317543 - DNA, 4001 bp, Homo sapiens
acgaatgaaacacaccccaagagaaaatacgaaaccgagtcccctgcaattacctcacacgcaaacctacacgtcggtaggtcatattcagaaatacacactgaatgtcacctatcatgaacacaaacactcagacagtccctccagaggttcggaagactcacgaccccaaaacttgatgtttcccatatgcgggctcatcctgagatgtagccatcactatccagttgtccctgttgtagagacagaaagttgggctcctcattagtttatgtaggattgacggtgttcgtgtttgtgtgggtgtgtgtgtgtttgcgtgcgcgcttctgggtgtagttatgtgtgtgtctgtgtgtgtgcgtgtgtgtgtgcacccctacgtgtgggtcggtacttccactgagatcactggcacacaagcagagccctcttgctgtgtttgttcttccctttggatctcctggccctccctcgcagggaagcgagtgtgccagtgttcatggactcctgatgtgtcggggtcgacgaagagaggtttagcagggagctttgctgttcaggatgatggttcttcatcccacacttgtattttgattgatgaatcacaagtacgtcgggaggcagggtaccttcgacttttctgacgttgaactcaggcttcgttttgttttgctcttgaaggaatttccagtggtctaaggtgctttcctgagtggctctttccaccaagtgctcgtccaactcgggggcctggaggcaggggtggtctctcttgagctctccttgcgttgctcgcctgtcggtgtcttctgcgccaagggctcttggttccctgcctcttgacacactctcactgtgtctttcccattcactcttctggatgtaaaagaggacgtaggcctgttgactcaggacagaagtgatgctagaggcggtgacctcggcatcatccattttataccactggccttcttgagctttgacataagagaagtaatgtccgttgtgacaactccacccagcgtggaccagcacagcatagaggacatagacgagaggtcctgtgttcggctgagacatgtatggctgcatgtcaaggcactcaggatattgcacattcttggcaatcttgttgcctgtgacatcggagaatctcttcaatacaaggatgaggaccttggcagaggtgtgtaaagttaacgtcttggaggccggcgccctctggagacaaacaccacaatgataggcattctctccattgagttcttcgggcttcaccaactgttccaaagcttgctggacactctgagctgcctggatatccagggcgatgtccaggtaagggtcaaaagtgtctgaaatgccgtggcagtggagacacttgatttgagatctccagtagcctccaaatatttggtggatgagggtggtgtccttagagtgatgatctacctgcttgtgcccgggaaggcatgcctttttcatggcatccacagtgaacatgagaaattcatgggcatcttcctgcttgcctctatggaagccagcagccaatgcctgtgagggctggatgacgtggccaggattgtggagggcccgtgtgatgtgagcttgcatagtacagagcatgcagcccttgtgacgatgacacgtttgagagtgctcccgggacagcatgtagttggcaaggggcggtgtgtatgtcaggcactgcaaggaagcgttcacgtagcaggtatttcccatattctggagcccagcccccaccgcagcaggtctcctgctactcagaggaagcttctccctgggagcaagctgtcttgccacaggagccaaatcatcacagaggtcgacacgggtctcacatgagagtggtgacttctcagggagagaagtccgctggatttcagcaaaagctgcatcgggccgagaagatgtgagttttgaaaagtggttgaactgccactcacctctcaagtagagtgagtcgtcctccatgtcgactggaacgaggatcacaaggtttgtctgctgggaccgcaggttgcagaaagacgctatcccttccgagagagtcttcaaatgacgagctctctggccgcatcagcccttctgtaagtcacccccaccaaccgcgaacaccccacccactcatcaggtgcgcgataagccaatcaaatatcagcactcaattcaggaaggagtcacagggtgtgtcccctggcatcgctgggaattcaacagacacagcccacagcatgacttccagaacacctgaatcaaattactcctcaggatgataggcacatataataggagtgtaaccgggttgggacagtggcctcacagttgccttattttaggtaaagcaatggcagggaagaaatctttacctaggaaaccgtgtgcgtgtgtgtgtgtgagtgtgtttgtgtgtgtgtggggggggcgtgtgtgtgtgtgtgtttgtgctgggatgaacctccaagtaggtacttttggcagctgccatcatcctctcagcgaaggaaggacaagaagtcgaaagtgcgctttctgacctgagaatagtcaatgaagtatagtatttagcacagcgtattttcttccctagtgagaaaggagagatccgtggaatcaaacagaccttccagcgataacctttccacgttgagcctattgattctctgtccgagtgaaattacctgccagtggagaacaagacaagtctttgcatgaaatgctcttgtggaagctagattgccaaataagaaagcatcaaatggtagaaacatgcactgaagtttgaagagatactcagtgcacaaagtagactgtgaaagcctttggggaaatcatgcaatccccgagagactaattgatgacaatccccaaatttatgtttgccagaaaagagagacggtcatgacaccgcatagtgagcggtttcggacgtgcgacggcagtttaagaaaacacgaaacaaaaaacttgagaactcagaaggtatcccagctataaccttttgtttattaaggaattgatgaaaataaaaacaacgtatctcacagcatgtgtgataatatttccatacgtatgtgataatggatcaacgtttcctagagatgaaataaaaagttctaatttggacaaaagcaaacaaggaaaattataccgtagaaaagcccggctgacggaagtgaggccctgtctcagggagaaacatcggagacgtttaaaagcagggagtgaaacagaggatagcgtgccatttttaatactggcccttgtttcagtgggaaaaggccaaaataagccgtgcatatcctggattctcgcatcgatcgttcaggatcggagatgttgcctccatttccagttacgcattgtatggtggaattgcagttagcacatttggtgccaaaattgtaatgctgccgaaagtggacatgttccctgaagtaagagggacagaatttgggtgtgtcttccggctgtctggcttagcaggaatgaagatcctggctctagggattttcccaacatgtcttagacggtaaggaacagggcggaattgaggcccggcgccaaggcctctaggtgtaaagaaacagccctggcttcagggcccatgaaattaggatgattttaaggaggatgatgggatgagaggactgtgacctttggccccgtttctttcccttgtcttttcatgggccaggtgtgctccatcagaaggcttcctgtgccggatgtaaagtgtcctgggggaagaaaagagcactgcttagaaagatgctccacagggagaaaggagccaccattttcaggagaatgatccccagaagcatgagcaatgcagatgccgaggcttcacacaagaccctggagggtcttattcctgcagccgggacctgggcatcggtgtgcttgaatgctcataaccgattttgaggggagcccaatcgataagctgtctgccagtcatgctcatcaca

SEQ ID NO: 317544 - DNA, 4001 bp, Homo sapiens
acgaatgaaacacaccccaagagaaaatacgaaaccgagtcccctgcaattacctcacacgcaaacctacacgtcggtaggtcatattcagaaatacacactgaatgtcacctatcatgaacacaaacactcagacagtccctccagaggttcggaagactcacgaccccaaaacttgatgtttcccatatgcgggctcatcctgagatgtagccatcactatccagttgtccctgttgtagagacagaaacttgggctcctcattagtttatgtaggattgacggtgttcgtgtttgtgtgggtgtgtgtgtgtttgcgtgcgcgcttctgggtgtagttatgtgtgtgtctgtgtgtgtgcgtgtgtgtgtgcacccctacgtgtgggtcggtacttccactgagatcactggcacacaagcagagccctcttgctgtgtttgttcttccctttggatctcctggccctccctcgcagggaagcgagtgtgccagtgttcatggactcctgatgtgtcggggtcgacgaagagaggtttagcagggagctttgctgttcaggatgatggttcttcatcccacacttgtattttgattgatgaatcacaagtacgtcgggaggcagggtaccttcgacttttctgacgttgaactcaggcttcgttttgttttgctcttgaaggaatttccagtggtctaaggtgctttcctgagtggctctttccaccaagtgctcgtccaactcgggggcctggaggcaggggtggtctctcttgagctctccttgcgttgctcgcctgtcggtgtcttctgcgccaagggctcttggttccctgcctcttgacacactctcactgtgtctttcccattcactcttctggatgtaaaagaggacgtaggcctgttgactcaggacagaagtgatgctagaggcggtgacctcggcatcatccattttataccactggccttcttgagctttgacataagagaagtaatgtccgttgtgacaactccacccagcgtggaccagcacagcatagaggacatagacgagaggtcctgtgttcggctgagacatgtatggctgcatgtcaaggcactcaggatattgcacattcttggcaatcttgttgcctgtgacatcggagaatctcttcaatacaaggatgaggaccttggcagaggtgtgtaaagttaacgtcttggaggccggcgccctctggagacaaacaccacaatgataggcattctctccattgagttcttcgggcttcaccaactgttccaaagcttgctggacactctgagctgcctggatatccagggcgatgtccaggtaagggtcaaaagtgtctgaaatgccgtggcagtggagacacttgatttgagatctccagtagcctccaaatatttggtggatgagggtggtgtccttagagtgatgatctacctgcttgtgcccgggaaggcatgcctttttcatggcatccacagtgaacatgagaaattcatgggcatcttcctgcttgcctctatggaagccagcagccaatgcctgtgagggctggatgacgtggccaggattgtggagggcccgtgtgatgtgagcttgcatagtacagagcatgcagcccttgtgacgatgacacgtttgagagtgctcccgggacagcatgtagttggcaaggggcggtgtgtatgtcaggcactgcaaggaagcgttcacgtagcaggtatttcccatattctggagcccagcccccaccgcagcaggtctcctgctactcagaggaagcttctccctgggagcaagctgtcttgccacaggagccaaatcatcacagaggtcgacacgggtctcacatgagagtggtgacttctcagggagagaagtccgctggatttcagcaaaagctgcatcgggccgagaagatgtgagttttgaaaagtggttgaactgccactcacctctcaagtagagtgagtcgtcctccatgtcgactggaacgaggatcacaaggtttgtctgctgggaccgcaggttgcagaaagacgctatcccttccgagagagtcttcaaatgacgagctctctggccgcatcagcccttctgtaagtcacccccaccaaccgcgaacaccccacccactcatcaggtgcgcgataagccaatcaaatatcagcactcaattcaggaaggagtcacagggtgtgtcccctggcatcgctgggaattcaacagacacagcccacagcatgacttccagaacacctgaatcaaattactcctcaggatgataggcacatataataggagtgtatccgggttgggacagtggcctcacagttgccttattttaggtaaagcaatggcagggaagaaatctttacctaggaaaccgtgtgcgtgtgtgtgtgtgagtgtgtttgtgtgtgtgggggggggggcgtgtgtgtgtgtgtgtttgtgctgggatgaacctccaagtaggtacttttggcagctgccatcatcctctcagcgaaggaaggacaagaagtcgaaagtgcgctttctgacctgagaatagtcaatgaagtatagtatttagcacagcgtattttcttccctagtgagaaaggagagatccgtggaatcaaacagaccttccagcgataacctttccacgttgagcctattgattctctgtccgagtgaaattacctgccagtggagaacaagacaagtctttgcatgaaatgctcttgtggaagctagattgccaaataataaagcatcaaatggtagaaacatgcactgaagtttgaagagatactcagtgcacaaagtagactgtgaaagcctttggggaaatcatgcaatccccgagagactaattgatgacaatccccaaatttatgtttgccagaaaagagagacggtcatgacaccgcatagtgagcggtttcggacgtgcgacggcagtttaagaaaacacgaaacaaaaaacttgagaactcagaaggtatcccagctataaccttttgtttattaaggaattgatgaaaataaaaacaacgtatctcacagcatgtgtgataatatttccatacgtatgtgataatggatcaacgtttcctagagatgaaataaaaagttctaatttggacaaaagcaaacaaggaaaattataccgtagaaaagcccggctgacggaagtgaggccctgtctcagggagaaacatcggagacgtttaaaagcagggagtgaaacagaggatagcgtgccatttttaatactggcccttgtttcagtgggaaaaggccaaaataagccgtgcatatcctggattctcgcatcgatcgttcaggatcggagatgttgcctccatttccagttacgcattgtatggtggaattgcagttagcacatttggtgccaaaattgtaatgctgccgaaagtggacatgttccctgaagtaagagggacagaatttgggtgtgtcttccggctgtctggcttagcaggaatgaagatcctggctctagggattttcccaacatgtcttagacggtaaggaacagggcggaattgaggcccggcgccaaggcctctaggtgtaaagaaacagccctggcttcagggcccatgaaattaggatgattttaaggaggatgatgggatgagaggactgtgacctttggccccgtttctttcccttgtcttttcatgggccaggtgtgctccatcagaaggcttcctgtgccggatgtaaagtgtcctgggggaagaaaagagcgctgcttagaaagatgctccacagggagaaaggagccaccattttcaggagaatgatccccagaagcatgagcaatgcagatgccgaggcttcacacaagaccctggagggtcttattcctgcagccgggacctgggcatcggtgtgcttgaatgctcataaccgattttgaggggagcccaatcgataagctgtctgccagtcatgctcatcac

SEQ ID NO: 317545 - DNA, 4001 bp, Homo sapiens
acgaatgaaacacaccccaagagaaaatacgaaaccgagtcccctgcaattacctcacacgcaaacctacacgtcggtaggtcatattcagaaatacacactgaatgtcacctatcatgaacacaaacactcagacagtccctccagaggttcggaagactcacgaccccaaaacttgatgtttcccatatgcgggctcatcctgagatgtagccatcactatccagttgtccctgttgtagagacagaaacttgggctcctcattagtttatgtaggattgacggtgttcgtgtttgtgtgggtgtgtgtgtgtttgcgtgcgcgcttctgggtgtagttatgtgtgtgtctgtgtgtgtgcgtgtgtgtgtgcacccctacgtgtgggtcggtacttccactgagatcactggcacacaagcagagccctcttgctgtgtttgttcttccctttggatctcctggccctccctcgcagggaagcgagtgtgccagtgttcatggactcctgatgtgtcggggtcgacgaagagaggtttagcagggagctttgctgttcaggatgatggttcttcatcccacacttgtattttgattgatgaatcacaagtacgtcgggaggcagggtaccttcgacttttctgacgttgaactcaggcttcgttttgttttgctcttgaaggaatttccagtggtctaaggtgctttcctgagtggctctttccaccaagtgctcgtccaactcgggggcctggaggcaggggtggtctctcttgagctctccttgcgttgctcgcctgtcggtgtcttctgcgccaagggctcttggttccctgcctcttgacacactctcactgtgtctttcccattcactcttctggatgtaaaagaggacgtaggcctgttgactcaggacagaagtgatgctagaggcggtgacctcggcatcatccattttataccactggccttcttgagctttgacataagagaagtaatgtccgttgtgacaactccacccagcgtggaccagcacagcatagaggacatagacgagaggtcctgtgttcggctgagacatgtatggctgcatgtcaaggcactcaggatattgcacattcttggcaatcttgttgcctgtgacatcggagaatctcttcaatacaaggatgaggaccttggcagaggtgtgtaaagttaacgtcttggaggccggcgccctctggagacaaacaccacaatgataggcattctctccattgagttcttcgggcttcaccaactgttccaaagcttgctggacactctgagctgcctggatatccagggcgatgtccaggtaagggtcaaaagtgtctgaaatgccgtggcagtggagacacttgatttgagatctccagtagcctccaaatatttggtggatgagggtggtgtccttagagtgatgatctacctgcttgtgcccgggaaggcatgcctttttcatggcatccacagtgaacatgagaaattcatgggcatcttcctgcttgcctctatggaagccagcagccaatgcctgtgagggctggatgacgtggccaggattgtggagggcccgtgtgatgtgagcttgcatagtacagagcatgcagcccttgtgacgatgacacgtttgagagtgctcccgggacagcatgtagttggcaaggggcggtgtgtatgtcaggcactgcaaggaagcgttcacgtagcaggtatttcccatattctggagcccagcccccaccgcagcaggtctcctgctactcagaggaagcttctccctgggagcaagctgtcttgccacaggagccaaatcatcacagaggtcgacacgggtctcacatgagagtggtgacttctcagggagagaagtccgctggatttcagcaaaagctgcatcgggccgagaagatgtgagttttgaaaagtggttgaactgccactcacctctcaagtagagtgagtcgtcctccatgtcgactggaacgaggatcacaaggtttgtctgctgggaccgcaggttgcagaaagacgatatcccttccgagagagtcttcaaatgacgagctctctggccgcatcagcccttctgtaagtcacccccaccaaccgcgaacaccccacccactcatcaggtgcgcgataagccaatcaaatatcagcactcaattcaggaaggagtcacagggtgtgtcccctggcatcgctgggaattcaacagacacagcccacagcatgacttccagaacacctgaatcaaattactcctcaggatgataggcacatataataggagtgtatccgggttgggacagtggcctcacagttgccttattttaggtaaagcaatggcagggaagaaatctttacctaggaaaccgtgtgcgtgtgtgtgtgtgagtgtgtttgtgtgtgtggggggggggggcgtgtgtgtgtgtgtgtttgtgctgggatgaacctccaagtaggtacttttggcagctgccatcatcctctcagcgaaggaaggacaagaagtcgaaagtgcgctttctgacctgagaatagtcaatgaagtatagtatttagcacagcgtattttcttccctagtgagaaaggagagatccgtggaatcaaacagaccttccagcgataacctttccacgttgagcctattgattctctgtccgagtgaaattacctgccagtggagaacaagacaagtctttgcatgaaatgctcttgtggaagctagattgccaaataataaagcatcaaatggtagaaacatgcactgaagtttgaagagatactcagtgcacaaagtagactgtgaaagcctttggggaaatcatgcaatccccgagagactaattgatgacaatccccaaatttatgtttgccagaaaagagagacggtcatgacaccgcatagtgagcggtttcggacgtgcgacggcagtttaagaaaacacgaaacaaaaaacttgagaactcagaaggtatcccagctataaccttttgtttattaaggaattgatgaaaataaaaacaacgtatctcacagcatgtgtgataatatttccatacgtatgtgataatggatcaacgtttcctagagatgaaataaaaagttctaatttggacaaaagcaaacaaggaaaattataccgtagaaaagcccggctgacggaagtgaggccctgtctcagggagaaacatcggagacgtttaaaagcagggagtgaaacagaggatagcgtgccatttttaatactggcccttgtttcagtgggaaaaggccaaaataagccgtgcatatcctggattctcgcatcgatcgttcaggatcggagatgttgcctccatttccagttacgcattgtatggtggaattgcagttagcacatttggtgccaaaattgtaatgctgccgaaagtggacatgttccctgaagtaagagggacagaatttgggtgtgtcttccggctgtctggcttagcaggaatgaagatcctggctctagggattttcccaacatgtcttagacggtaaggaacagggcggaattgaggcccggcgccaaggcctctaggtgtaaagaaacagccctggcttcagggcccatgaaattaggatgattttaaggaggatgatgggatgagaggactgtgacctttggccccgtttctttcccttgtcttttcatgggccaggtgtgctccatcagaaggcttcctgtgccggatgtaaagtgtcctgggggaagaaaagagcgctgcttagaaagatgctccacagggagaaaggagccaccattttcaggagaatgatccccagaagcatgagcaatgcagatgccgaggcttcacacaagaccctggagggtcttattcctgcagccgggacctgggcatcggtgtgcttgaatgctcataaccgattttgaggggagcccaatcgataagctgtctgccagtcatgctcatca

SEQ ID NO: 317546 - DNA, 4001 bp, Homo sapiens
acgaatgaaacacaccccaagagaaaatacgaaaccgagtcccctgcaattacctcacacgcaaacctacacgtcggtaggtcatattcagaaatacacactgaatgtcacctatcatgaacacaaacactcagacagtccctccagaggttcggaagactcacgaccccaaaacttgatgtttcccatatgcgggctcatcctgagatgtagccatcactatccagttgtccctgttgtagagacagaaacttgggctcctcattagtttatgtaggattgacggtgttcgtgtttgtgtgggtgtgtgtgtgtttgcgtgcgcgcttctgggtgtagttatgtgtgtgtctgtgtgtgtgcgtgtgtgtgtgcacccctacgtgtgggtcggtacttccactgagatcactggcacacaagcagagccctcttgctgtgtttgttcttccctttggatctcctggccctccctcgcagggaagcgagtgtgccagtgttcatggactcctgatgtgtcggggtcgacgaagagaggtttagcagggagctttgctgttcaggatgatggttcttcatcccacacttgtattttgattgatgaatcacaagtacgtcgggaggcagggtaccttcgacttttctgacgttgaactcaggcttcgttttgttttgctcttgaaggaatttccagtggtctaaggtgctttcctgagtggctctttccaccaagtgctcgtccaactcgggggcctggaggcaggggtggtctctcttgagctctccttgcgttgctcgcctgtcggtgtcttctgcgccaagggctcttggttccctgcctcttgacacactctcactgtgtctttcccattcactcttctggatgtaaaagaggacgtaggcctgttgactcaggacagaagtgatgctagaggcggtgacctcggcatcatccattttataccactggccttcttgagctttgacataagagaagtaatgtccgttgtgacaactccacccagcgtggaccagcacagcatagaggacatagacgagaggtcctgtgttcggctgagacatgtatggctgcatgtcaaggcactcaggatattgcacattcttggcaatcttgttgcctgtgacatcggagaatctcttcaatacaaggatgaggaccttggcagaggtgtgtaaagttaacgtcttggaggccggcgccctctggagacaaacaccacaatgataggcattctctccattgagttcttcgggcttcgccaactgttccaaagcttgctggacactctgagctgcctggatatccagggcgatgtccaggtaagggtcaaaagtgtctgaaatgccgtggcagtggagacacttgatttgagatctccagtagcctccaaatatttggtggatgagggtggtgtccttagagtgatgatctacctgcttgtgcccgggaaggcatgcctttttcatggcatccacagtgaacatgagaaattcatgggcatcttcctgcttgcctctatggaagccagcagccaatgcctgtgagggctggatgacgtggccaggattgtggagggcccgtgtgatgtgagcttgcatagtacagagcatgcagcccttgtgacgatgacacgtttgagagtgctcccgggacagcatgtagttggcaaggggcggtgtgtatgtcaggcactgcaaggaagcgttcacgtagcaggtatttcccatattctggagcccagcccccaccgcagcaggtctcctgctactcagaggaagcttctccctgggagcaagctgtcttgccacaggagccaaatcatcacagaggtcgacacgggtctcacatgagagtggtgacttctcagggagagaagtccgctggatttcagcaaaagctgcatcgggccgagaagatgtgagttttgaaaagtggttgaactgccactcacctctcaagtagagtgagtcgtcctccatgtcgactggaacgaggatcacaaggtttgtctgctgggaccgcaggttgcagaaagacgctatcccttccgagagagtcttcaaatgacgagctctctggccgcatcagcccttctgtaagtcacccccaccaaccgcgaacaccccacccactcatcaggtgcgcgataagccaatcaaatatcagcactcaattcaggaaggagtcacagggtgtgtcccctggcatcgctgggaattcaacagacacagcccacagcatgacttccagaacacctgaatcaaattactcctcaggatgataggcacatataataggagtgtatccgggttgggacagtggcctcacagttgccttattttaggtaaagcaatggcagggaagaaatctttacctaggaaaccgtgtgcgtgtgtgtgtgtgagtgtgtttgtgtgtgtggggggggggcgtgtgtgtgtgtgtgtttgtgctgggatgaacctccaagtaggtacttttggcagctgccatcatcctctcagcgaaggaaggacaagaagtcgaaagtgcgctttctgacctgagaatagtcaatgaagtatagtatttagcacagcgtattttcttccctagtgagaaaggagagatccgtggaatcaaacagaccttccagcgataacctttccacgttgagcctattgattctctgtccgagtgaaattacctgccagtggagaacaagacaagtctttgcatgaaatgctcttgtggaagctagattgccaaataataaagcatcaaatggtagaaacatgcactgaagtttgaagagatactcagtgcacaaagtagactgtgaaagcctttggggaaatcatgcaatccccgagagactaattgatgacaatccccaaatttatgtttgccagaaaagagagacggtcatgacaccgcatagtgagcggtttcggacgtgcgacggcagtttaagaaaacacgaaacaaaaaacttgagaactcagaaggtatcccagctataaccttttgtttattaaggaattgatgaaaataaaaacaacgtatctcacagcatgtgtgataatatttccatacgtatgtgataatggatcaacgtttcctagagatgaaataaaaagttctaatttggacaaaagcaaacaaggaaaattataccgtagaaaagcccggctgacggaagtgaggccctgtctcagggagaaacatcggagacgtttaaaagcagggagtgaaacagaggatagcgtgccatttttaatactggcccttgtttcagtgggaaaaggccaaaataagccgtgcatatcctggattctcgcatcgatcgttcaggatcggagatgttgcctccatttccagttacgcattgtatggtggaattgcagttagcacatttggtgccaaaattgtaatgctgccgaaagtggacatgttccctgaagtaagagggacagaatttgggtgtgtcttccggctgtctggcttagcaggaatgaagatcctggctctagggattttcccaacatgtcttagacggtaaggaacagggcggaattgaggcccggcgccaaggcctctaggtgtaaagaaacagccctggcttcagggcccatgaaattaggatgattttaaggaggatgatgggatgagaggactgtgacctttggccccgtttctttcccttgtcttttcatgggccaggtgtgctccatcagaaggcttcctgtgccggatgtaaagtgtcctgggggaagaaaagagcgctgcttagaaagatgctccacagggagaaaggagccaccattttcaggagaatgatccccagaagcatgagcaatgcagatgccgaggcttcacacaagaccctggagggtcttattcctgcagccgggacctgggcatcggtgtgcttgaatgctcataaccgattttgaggggagcccaatcgataagctgtctgccagtcatgctcatcaca

SEQ ID NO: 317547 - DNA, 4001 bp, Homo sapiens
acgaatgaaacacaccccaagagaaaatacgaaaccgagtcccctgcaattacctcacacgcaaacctacacgtcggtaggtcatattcagaaatacacactgaatgtcacctatcatgaacacaaacactcagacagtccctccagaggttcggaagactcacgaccccaaaacttgatgtttcccatatgcgggctcatcctgagatgtagccatcactatccagttgtccctgttgtagagacagaaacttgggctcctcattagtttatgtaggattgacggtgttcgtgtttgtgtgggtgtgtgtgtgtttgcgtgcgcgcttctgggtgtagttatgtgtgtgtctgtgtgtgtgcgtgtgtgtgtgcacccctacgtgtgggtcggtacttccactgagatcactggcacacaagcagagccctcttgctgtgtttgttcttccctttggatctcctggccctccctcgcagggaagcgagtgtgccagtgttcatggactcctgatgtgtcggggtcgacgaagagaggtttagcagggagctttgctgttcaggatgatggttcttcatcccacacttgtattttgattgatgaatcacaagtacgtcgggaggcagggtaccttcgacttttctgacgttgaactcaggcttcgttttgttttgctcttgaaggaatttccagtggtctaaggtgctttcctgagtggctctttccaccaagtgctcgtccaactcgggggcctggaggcaggggtggtctctcttgagctctccttgcgttgctcgcctgtcggtgtcttctgcgccaagggctcttggttccctgcctcttgacacactctcactgtgtctttcccattcactcttctggatgtaaaagaggacgtaggcctgttgactcaggacagaagtgatgctagaggcggtgacctcggcatcatccattttataccactggccttcttgagctttgacataagagaagtaatgtccgttgtgacaactccacccagcgtggaccagcacagcatagaggacatagacgagaggtcctgtgttcggctgagacatgtatggctgcatgtcaaggcactcaggatattgcacattcttggcaatcttgttgcctgtgacatcggagaatctcttcaatacaaggatgaggaccttggcagaggtgtgtaaagttaacgtcttggaggccggcgccctctggagacaaacaccacaatgataggcattctctccattgagttcttcgggcttcaccaactgttccaaagcttgctggacactctgagctgcctggatatccagggcgatgtccaggtaagggtcaaaagtgtctgaaatgccgtggcagtggagacacttgatttgagatctccagtagcctccaaatatttggtggatgagggtggtgtccttagagtgatgatctacctgcttgtgcccgggaaggcatgcctttttcatggcatccacagtgaacatgagaaattcatgggcatcttcctgcttgcctctatggaagccagcagccaatgcctgtgagggctggatgacgtggccaggattgtggagggcccgtgtgatgtgagcttgcatagtacagagcatgcagcccttgtgacgatgacacgtttgagagtgctcccgggacagcatgtagttggcaaggggcggtgtgtatgtcaggcactgcaaggaagcgttcacgtagcaggtatttcccatattctggagcccagcccccaccgcagcaggtctcctgctactcagaggaagcttctccctgggagcaagctgtcttgccacaggagccaaatcatcacagaggtcgacacgggtctcacatgagagtggtgacttctcagggagagaagtccgctggatttcagcaaaagctgcatcgggccgagaagatgtgagttttgaaaagtggttgaactgccactcacctctcaagtagagtgagtcgtcctccatgtcgactggaacgaggatcacaaggtttgtctgctgggaccgcaggttgcagaaagacgctatcccttccgagagagtcttcaaatgacgagctctctggccgcatcagcccttctgtaagtcacccccaccaaccgcgaacaccccacccactcatcaggtgcgcgataagccaatcaaatatcagcactcaattcaggaaggagtcacagggtgtgtcccctggcatcgctgggaattcaacagacacagcccacagcatgacttccagaacacctgaatcaaattactcctcaggatgataggcacatataataggagtgtatccgggttgggacagtggcctcacagttgccttattttaggtaaagcaatggcagggaagaaatctttacctaggaaaccgtgtgcgtgtgtgtgtgtgagtgtgtttgtgtgtgtggggggggggcgtgtgtgtgtgtgtgtttgtgctgggatgaacctccaagtaggtacttttggcagctgccatcatcctctcagcgaaggaaggacaagaagtcgaaagtgcgctttctgacctgagaatagtcaatgaagtatagtatttagcacagcgtattttcttccctagtgagaaaggagagatccgtggaatcaaacagaccttccagcgataacctttccacgttgagcctattgattctctgtccgagtgaaattacctgccagtggagaacaagacaagtctttgcatgaaatgctcttgtggaagctagattgccaaataataaagcatcaaatggtagaaacatgcactgaagtttgaagagatactcagtgcacaaagtagactgtgaaagcctttggggaaatcatgcaatccccgagagactaattgatgacaatccccaaatttatgtttgccagaaaagagagacggtcatgacaccgcatagtgagcggtttcggacgtgcgacggcagtttaagaaaacacgaaacaaaaaacttgagaactcagaaggtatcccagctataaccttttgtttattaaggaattgatgaaaataaaaacaacgtatctcacagcatgtgtgataatatttccatacgtatgtgataatggatcaacgtttcctagagatgaaataaaaagttctaatttggacaaaagcaaacaaggaaaattataccgtagaaaagcccggctgacggaagtgaggccctgtctcagggagaaacatcggagacgtttaaaagcagggagtgaaacagaggatagcgtgccatttttaatactggcccttgtttcagtgggaaaaggccaaaataagccgtgcatatcctggattctcgcatcgatcgttcaggatcggagatgttgcctccatttccagttacgcattgtatggtggaattgcagttagcacatttggtgccaaaattgtaatgctgccgaaagtggacatgttccctgaagtaagagggacagaatttgggtgtgtcttccggctgtctggcttagcaggaatgaagatcctggctctagggattttcccaacatgtcttagacggtaaggaacagggcggaattgaggcccggcgccaaggcctctaggtgtaaagaaacagccctggcttcagggcccatgaaattaggatgattttaaggaggatgatgggatgagaggactgtgacctttggccccgtttctttcccttgtcttttcatgggccaggtgtgctccatcagaaggcttcctgtgccggatgtaaagtgtcctgggggaagaaaagagcgctgcttagaaagatgctccacagggagaaaggagccaccattttcaggagaatgatccccagaagcatgagcaatgcagatgccgaggcttcacacaagaccctggagggtcttattcctgcagccgggacctgggcatcggtgtgcttgaatgctcataaccgattttgaggggagcccaatcgataagctgtctgccagtcatgctcatcaca

SEQ ID NO: 317548 - DNA, 4001 bp, Homo sapiens
acgaatgaaacacaccccaagagaaaatacgaaaccgagtcccctgcaattacctcacacgcaaacctacacgtcggtaggtcatattcagaaatacacactgaatgtcacctatcatgaacacaaacactcagacagtccctccagaggttcggaagactcacgaccccaaaacttgatgtttcccatatgcgggctcatcctgagatgtagccatcactatccagttgtccctgttgtagagacagaaagttgggctcctcattagtttatgtaggattgacggtgttcgtgtttgtgtgggtgtgtgtgtgtttgcgtgcgcgcttctgggtgtagttatgtgtgtgtctgtgtgtgtgcgtgtgtgtgtgcacccctacgtgtgggtcggtacttccactgagatcactggcacacaagcagagccctcttgctgtgtttgttcttccctttggatctcctggccctccctcgcagggaagcgagtgtgccagtgttcatggactcctgatgtgtcggggtcgacgaagagaggtttagcagggagctttgctgttcaggatgatggttcttcatcccacacttgtattttgattgatgaatcacaagtacgtcgggaggcagggtaccttcgacttttctgacgttgaactcaggcttcgttttgttttgctcttgaaggaatttccagtggtctaaggtgctttcctgagtggctctttccaccaagtgctcgtccaactcgggggcctggaggcaggggtggtctctcttgagctctccttgcgttgctcgcctgtcggtgtcttctgcgccaagggctcttggttccctgcctcttgacacactctcactgtgtctttcccattcactcttctggatgtaaaagaggacgtaggcctgttgactcaggacagaagtgatgctagaggcggtgacctcggcatcatccattttataccactggccttcttgagctttgacataagagaagtaatgtccgttgtgacaactccacccagcgtggaccagcacagcatagaggacatagacgagaggtcctgtgttcggctgagacatgtatggctgcatgtcaaggcactcaggatattgcacattcttggcaatcttgttgcctgtgacatcggagaatctcttcaatacaaggatgaggaccttggcagaggtgtgtaaagttaacgtcttggaggccggcgccctctggagacaaacaccacaatgataggcattctctccattgagttcttcgggcttcaccaactgttccaaagcttgctggacactctgagctgcctggatatccagggcgatgtccaggtaagggtcaaaagtgtctgaaatgccgtggcagtggagacacttgatttgagatctccagtagcctccaaatatttggtggatgagggtggtgtccttagagtgatgatctacctgcttgtgcccgggaaggcatgcctttttcatggcatccacagtgaacatgagaaattcatgggcatcttcctgcttgcctctatggaagccagcagccaatgcctgtgagggctggatgacgtggccaggattgtggagggcccgtgtgatgtgagcttgcatagtacagagcatgcagcccttgtgacgatgacacgtttgagagtgctcccgggacagcatgtagttggcaaggggcggtgtgtatgtcaggcactgcaaggaagcgttcacgtagcaggtatttcccatattctggagcccagcccccaccgcagcaggtctcctgctactcagaggaagcttctccctgggagcaagctgtcttgccacaggagccaaatcatcacagaggtcgacacgggtctcacatgagagtggtgacttctcagggagagaagtccgctggatttcagcaaaagctgcatcgggccgagaagatgtgagttttgaaaagtggttgaactgccactcacctctcaagtagagtgagtcgtcctccatgtcgactggaacgaggatcacaaggtttgtctgctgggaccgcaggttgcagaaagacgctatcccttccgagagagtcttcaaatgacgagctctctggccgcatcagcccttctgtaagtcacccccaccaaccgcgaacaccccacccactcatcaggtgcgcgataagccaatcaaatatcagcactcaattcaggaaggagtcacagggtgtgtcccctggcatcgctgggaattcaacagacacagcccacagcatgacttccagaacacctgaatcaaattactcctcaggatgataggcacatataataggagtgtatccgggttgggacagtggcctcacagttgccttattttaggtaaagcaatggcagggaagaaatctttacctaggaaaccgtgtgcgtgtgtgtgtgtgagtgtgtttgtgtgtgtggggggggggcgtgtgtgtgtgtgtgtttgtgctgggatgaacctccaagtaggtacttttggcagctgccatcatcctctcagcgaaggaaggacaagaagtcgaaagtgcgctttctgacctgagaatagtcaatgaagtatagtatttagcacagcgtattttcttccctagtgagaaaggagagatccgtggaatcaaacagaccttccagcgataacctttccacgttgagcctattgattctctgtccgagtgaaattacctgccagtggagaacaagacaagtctttgcatgaaatgctcttgtggaagctagattgccaaataataaagcatcaaatggtagaaacatgcactgaagtttgaagagatactcagtgcacaaagtagactgtgaaagcctttggggaaatcatgcaatccccgagagactaattgatgacaatccccaaatttatgtttgccagaaaagagagacggtcatgacaccgcatagtgagcggtttcggacgtgcgacggcagtttaagaaaacacgaaacaaaaaacttgagaactcagaaggtatcccagctataaccttttgtttattaaggaattgatgaaaataaaaacaacgtatctcacagcatgtgtgataatatttccatacgtatgtgataatggatcaacgtttcctagagatgaaataaaaagttctaatttggacaaaagcaaacaaggaaaattataccgtagaaaagcccggctgacggaagtgaggccctgtctcagggagaaacatcggagacgtttaaaagcagggagtgaaacagaggatagcgtgccatttttaatactggcccttgtttcagtgggaaaaggccaaaataagccgtgcatatcctggattctcgcatcgatcgttcaggatcggagatgttgcctccatttccagttacgcattgtatggtggaattgcagttagcacatttggtgccaaaattgtaacgctgccgaaagtggacatgttccctgaagtaagagggacagaatttgggtgtgtcttccggctgtctggcttagcaggaatgaagatcctggctctagggattttcccaacatgtcttagacggtaaggaacagggcggaattgaggcccggcgccaaggcctctaggtgtaaagaaacagccctggcttcagggcccatgaaattaggatgattttaaggaggatgatgggatgagaggactgtgacctttggccccgtttctttcccttgtcttttcatgggccaggtgtgctccatcagaaggcttcctgtgccggatgtaaagtgtcctgggggaagaaaagagcgctgcttagaaagatgctccacagggagaaaggagccaccattttcaggagaatgatccccagaagcatgagcaatgcagatgccgaggcttcacacaagaccctggagggtcttattcctgcagccgggacctgggcatcggtgtgcttgaatgctcataaccgattttgaggggagcccaatcgataagctgtctgccagtcatgctcatcaca

SEQ ID NO: 317549 - DNA, 4001 bp, Homo sapiens
acgaatgaaacacaccccaagagaaaatacgaaaccgagtcccctgcaattacctcacacgcaaacctacacgtcggtaggtcatattcagaaatacacactgaatgtcacctatcatgaacacaaacactcagacagtccctccagaggttcggaagactcacgaccccaaaacttgatgtttcccatatgcgggctcatcctgagatgtagccatcactatccagttgtccctgttgtagagacagaaagttgggctcctcattagtttatgtaggattgacggtgttcgtgtttgtgtgggtgtgtgtgtgtttgcgtgcgcgcttctgggtgtagttatgtgtgtgtctgtgtgtgtgcgtgtgtgtgtgcacccctacgtgtgggtcggtacttccactgagatcactggcacacaagcagagccctcttgctgtgtttgttcttccctttggatctcctggccctccctcgcagggaagcgagtgtgccagtgttcatggactcctgatgtgtcggggtcgacgaagagaggtttagcagggagctttgctgttcaggatgatggttcttcatcccacacttgtattttgattgatgaatcacaagtacgtcgggaggcagggtaccttcgacttttctgacgttgaactcaggcttcgttttgttttgctcttgaaggaatttccagtggtctaaggtgctttcctgagtggctctttccaccaagtgctcgtccaactcgggggcctggaggcaggggtggtctctcttgagctctccttgcgttgctcgcctgtcggtgtcttctgcgccaagggctcttggttccctgcctcttgacacactctcactgtgtctttcccattcactcttctggatgtaaaagaggacgtaggcctgttgactcaggacagaagtgatgctagaggcggtgacctcggcatcatccattttataccactggccttcttgagctttgacataagagaagtaatgtccgttgtgacaactccacccagcgtggaccagcacagcatagaggacatagacgagaggtcctgtgttcggctgagacatgtatggctgcatgtcaaggcactcaggatattgcacattcttggcaatcttgttgcctgtgacatcggagaatctcttcaatacaaggatgaggaccttggcagaggtgtgtaaagttaacgtcttggaggccggcgccctctggagacaaacaccacaatgataggcattctctccattgagttcttcgggcttcaccaactgttccaaagcttgctggacactctgagctgcctggatatccagggcgatgtccaggtaagggtcaaaagtgtctgaaatgccgtggcagtggagacacttgatttgagatctccagtagcctccaaatatttggtggatgagggtggtgtccttagagtgatgatctacctgcttgtgcccgggaaggcatgcctttttcatggcatccacagtgaacatgagaaattcatgggcatcttcctgcttgcctctatggaagccagcagccaatgcctgtgagggctggatgacgtggccaggattgtggagggcccgtgtgatgtgagcttgcatagtacagagcatgcagcccttgtgacgatgacacgtttgagagtgctcccgggacagcatgtagttggcaaggggcggtgtgtatgtcaggcactgcaaggaagcgttcacgtagcaggtatttcccatattctggagcccagcccccaccgcagcaggtctcctgctactcagaggaagcttctccctgggagcaagctgtcttgccacaggagccaaatcatcacagaggtcgacacgggtctcacatgagagtggtgacttctcagggagagaagtccgctggatttcagcaaaagctgcatcgggccgagaagatgtgagttttgaaaagtggttgaactgccactcacctctcaagtagagtgagtcgtcctccatgtcgactggaacgaggatcacaaggtttgtctgctggaaccgcaggttgcagaaagacgctatcccttccgagagagtcttcaaatgacgagctctctggccgcatcagcccttctgtaagtcacccccaccaaccgcgaacaccccacccactcatcaggtgcgcgataagccaatcaaatatcagcactcaattcaggaaggagtcacagggtgtgtcccctggcatcgctgggaattcaacagacacagcccacagcatgacttccagaacacctgaatcaaattactcctcaggatgataggcacatataataggagtgtatccgggttgggacagtggcctcacagttgccttattttaggtaaagcaatggcagggaagaaatctttacctaggaaaccgtgtgcgtgtgtgtgtgtgagtgtgtttgtgtgtgtggggggggggcgtgtgtgtgtgtgtgtttgtgctgggatgaacctccaagtaggtacttttggcagctgccatcatcctctcagcgaaggaaggacaagaagtcgaaagtgcgctttctgacctgagaatagtcaatgaagtatagtatttagcacagcgtattttcttccctagtgagaaaggagagatccgtggaatcaaacagaccttccagcgataacctttccacgttgagcctattgattctctgtccgagtgaaattacctgccagtggagaacaagacaagtctttgcatgaaatgctcttgtggaagctagattgccaaataataaagcatcaaatggtagaaacatgcactgaagtttgaagagatactcagtgcacaaagtagactgtgaaagcctttggggaaatcatgcaatccccgagagactaattgatgacaatccccaaatttatgtttgccagaaaagagagacggtcatgacaccgcatagtgagcggtttcggacgtgcgacggcagtttaagaaaacacgaaacaaaaaacttgagaactcagaaggtatcccagctataaccttttgtttattaaggaattgatgaaaataaaaacaacgtatctcacagcatgtgtgataatatttccatacgtatgtgataatggatcaacgtttcctagagatgaaataaaaagttctaatttggacaaaagcaaacaaggaaaattataccgtagaaaagcccggctgacggaagtgaggccctgtctcagggagaaacatcggagacgtttaaaagcagggagtgaaacagaggatagcgtgccatttttaatactggcccttgtttcagtgggaaaaggccaaaataagccgtgcatatcctggattctcgcatcgatcgttcaggatcggagatgttgcctccatttccagttacgcattgtatggtggaattgcagttagcacatttggtgccaaaattgtaatgctgccgaaagtggacatgttccctgaagtaagagggacagaatttgggtgtgtcttccggctgtctggcttagcaggaatgaagatcctggctctagggattttcccaacatgtcttagacggtaaggaacagggcggaattgaggcccggcgccaaggcctctaggtgtaaagaaacagccctggcttcagggcccatgaaattaggatgattttaaggaggatgatgggatgagaggactgtgacctttggccccgtttctttcccttgtcttttcatgggccaggtgtgctccatcagaaggcttcctgtgccggatgtaaagtgtcctgggggaagaaaagagcgctgcttagaaagatgctccacagggagaaaggagccaccattttcaggagaatgatccccagaagcatgagcaatgcagatgccgaggcttcacacaagaccctggagggtcttattcctgcagccgggacctgggcatcggtgtgcttgaatgctcataaccgattttgaggggagcccaatcgataagctgtctgccagtcatgctcatcaca

SEQ ID NO: 317550 - DNA, 4001 bp, Homo sapiens
acgaatgaaacacaccccaagagaaaatacgaaaccgagtcccctgcaattacctcacacgcaaacctacacgtcggtaggtcatattcagaaatacacactgaatgtcacctatcatgaacacaaacactcagacagtccctccagaggttcggaagactcacgaccccaaaacttgatgtttcccatatgcgggctcatcctgagatgtagccatcactatccagttgtccctgttgtagagacagaaacttgggctcctcattagtttatgtaggattgacggtgttcgtgtttgtgtgggtgtgtgtgtgtttgcgtgcgcgcttctgggtgtagttatgtgtgtgtctgtgtgtgtgcgtgtgtgtgtgcacccctacgtgtgggtcggtacttccactgagatcactggcacacaagcagagccctcttgctgtgtttgttcttccctttggatctcctggccctccctcgcagggaagcgagtgtgccagtgttcatggactcctgatgtgtcggggtcgacgaagagaggtttagcagggagctttgctgttcaggatgatggttcttcatcccacacttgtattttgattgatgaatcacaagtacgtcgggaggcagggtaccttcgacttttctgacgttgaactcaggcttcgttttgttttgctcttgaaggaatttccagtggtctaaggtgctttcctgagtggctctttccaccaagtgctcgtccaactcgggggcctggaggcaggggtggtctctcttgagctctccttgcgttgctcgcctgtcggtgtcttctgcgccaagggctcttggttccctgcctcttgacacactctcactgtgtctttcccattcactcttctggatgtaaaagaggacgtaggcctgttgactcaggacagaagtgatgctagaggcggtgacctcggcatcatccattttataccactggccttcttgagctttgacataagagaagtaatgtccgttgtgacaactccacccagcgtggaccagcacagcatagaggacatagacgagaggtcctgtgttcggctgagacatgtatggctgcatgtcaaggcactcaggatattgcacattcttggcaatcttgttgcctgtgacatcggagaatctcttcaatacaaggatgaggaccttggcagaggtgtgtaaagttaacgtcttggaggccggcgccctctggagacaaacaccacaatgataggcattctctccattgagttcttcgggcttcaccaactgttccaaagcttgctggacactctgagctgcctggatatccagggcgatgtccaggtaagggtcaaaagtgtctgaaatgccgtggcagtggagacacttgatttgagatctccagtagcctccaaatatttggtggatgagggtggtgtccttagagtgatgatctacctgcttgtgcccgggaaggcatgcctttttcatggcatccacagtgaacatgagaaattcatgggcatcttcctgcttgcctctatggaagccagcagccaatgcctgtgagggctggatgacgtggccaggattgtggagggcccgtgtgatgtgagcttgcatagtacagagcatgcagcccttgtgacgatgacacgtttgagagtgctcccgggacagcatgtagttggcaaggggcggtgtgtatgtcaggcactgcaaggaagcgttcacgtagcaggtatttcccatattctggagcccagcccccaccgcagcaggtctcctgctactcagaggaagcttctccctgggagcaagctgtcttgccacaggagccaaatcatcacagaggtcgacacgggtctcacatgagagtggtgacttctcagggagagaagtccgctggatttcagcaaaagctgcatcgggccgagaagatgtgagttttgaaaagtggttgaactgccactcacctctcaagtagagtgagtcgtcctccatgtcgactggaacgaggatcacaaggtttgtctgctgggaccgcaggttgcagaaagacgctatcccttccgagagagtcttcaaatgacgagctctctggccgcatcagcccttctgtaagtcacccccaccaaccgcgaacaccccacccactcatcaggtgcgcgataagccaatcaaatatcagcactcaattcaggaaggagtcacagggtgtgtcccctggcatcgctgggaattcaacagacacagcccacagcatgacttccagaacacctgaatcaaattactcctcaggatgataggcacatataataggagtgtatccgggttgggacagtggcctcacagttgccttattttaggtaaagcaatggcagggaagaaatctttacctaggaaaccgtgtgcgtgtgtgtgtgtgagtgtgtttgtgtgtgggggggggggggcgtgtgtgtgtgtgtgtttgtgctgggatgaacctccaagtaggtacttttggcagctgccatcatcctctcagcgaaggaaggacaagaagtcgaaagtgcgctttctgacctgagaatagtcaatgaagtatagtatttagcacagcgtattttcttccctagtgagaaaggagagatccgtggaatcaaacagaccttccagcgataacctttccacgttgagcctattgattctctgtccgagtgaaattacctgccagtggagaacaagacaagtctttgcatgaaatgctcttgtggaagctagattgccaaataataaagcatcaaatggtagaaacatgcactgaagtttgaagagatactcagtgcacaaagtagactgtgaaagcctttggggaaatcatgcaatccccgagagactaattgatgacaatccccaaatttatgtttgccagaaaagagagacggtcatgacaccgcatagtgagcggtttcggacgtgcgacggcagtttaagaaaacacgaaacaaaaaacttgagaactcagaaggtatcccagctataaccttttgtttattaaggaattgatgaaaataaaaacaacgtatctcacagcatgtgtgataatatttccatacgtatgtgataatggatcaacgtttcctagagatgaaataaaaagttctaatttggacaaaagcaaacaaggaaaattataccgtagaaaagcccggctgacggaagtgaggccctgtctcagggagaaacatcggagacgtttaaaagcagggagtgaaacagaggatagcgtgccatttttaatactggcccttgtttcagtgggaaaaggccaaaataagccgtgcatatcctggattctcgcatcgatcgttcaggatcggagatgttgcctccatttccagttacgcattgtatggtggaattgcagttagcacatttggtgccaaaattgtaacgctgccgaaagtggacatgttccctgaagtaagagggacagaatttgggtgtgtcttccggctgtctggcttagcaggaatgaagatcctggctctagggattttcccaacatgtcttagacggtaaggaacagggcggaattgaggcccggcgccaaggcctctaggtgtaaagaaacagccctggcttcagggcccatgaaattaggatgattttaaggaggatgatgggatgagaggactgtgacctttggccccgtttctttcccttgtcttttcatgggccaggtgtgctccatcagaaggcttcctgtgccggatgtaaagtgtcctgggggaagaaaagagcgctgcttagaaagatgctccacagggagaaaggagccaccattttcaggagaatgatccccagaagcatgagcaatgcagatgccgaggcttcacacaagaccctggagggtcttattcctgcagccgggacctgggcatcggtgtgcttgaatgctcataaccgattttgaggggagcccaatcgataagctgtctgccagtcatgctcatcac

SEQ ID NO: 317551 - DNA, 4001 bp, Homo sapiens; identical to SEQ ID NO: 317543

SEQ ID NO: 317552 - DNA, 4001 bp, Homo sapiens; identical to SEQ ID NO: 317544

SEQ ID NO: 317553 - DNA, 4001 bp, Homo sapiens; identical to SEQ ID NO: 317545

SEQ ID NO: 317554 - DNA, 4001 bp, Homo sapiens; identical to SEQ ID NO: 317546

SEQ ID NO: 317555 - DNA, 4001 bp, Homo sapiens; identical to SEQ ID NO: 317547

SEQ ID NO: 317556 - DNA, 4001 bp, Homo sapiens; identical to SEQ ID NO: 317548

SEQ ID NO: 317557 - DNA, 4001 bp, Homo sapiens; identical to SEQ ID NO: 317549

SEQ ID NO: 317558 - DNA, 4001 bp, Homo sapiens; identical to SEQ ID NO: 317550

SEQ ID NO: 317559 - DNA, 4001 bp, Homo sapiens; identical to SEQ ID NO: 317543

SEQ ID NO: 317560 - DNA, 4001 bp, Homo sapiens; identical to SEQ ID NO: 317544

SEQ ID NO: 317561 - DNA, 4001 bp, Homo sapiens; identical to SEQ ID NO: 317545

SEQ ID NO: 317562 - DNA, 4001 bp, Homo sapiens; identical to SEQ ID NO: 317546

SEQ ID NO: 317563 - DNA, 4001 bp, Homo sapiens; identical to SEQ ID NO: 317547

SEQ ID NO: 317564 - DNA, 4001 bp, Homo sapiens; identical to SEQ ID NO: 317548

SEQ ID NO: 317565 - DNA, 4001 bp, Homo sapiens; identical to SEQ ID NO: 317549

SEQ ID NO: 317566 - DNA, 4001 bp, Homo sapiens; identical to SEQ ID NO: 317550

SEQ ID NO: 317567 - DNA, 4001 bp, Homo sapiens; identical to SEQ ID NO: 317543

SEQ ID NO: 317568 - DNA, 4001 bp, Homo sapiens; identical to SEQ ID NO: 317544

SEQ ID NO: 317569 - DNA, 4001 bp, Homo sapiens; identical to SEQ ID NO: 317545

SEQ ID NO: 317570 - DNA, 4001 bp, Homo sapiens; identical to SEQ ID NO: 317546

SEQ ID NO: 317571 - DNA, 4001 bp, Homo sapiens; identical to SEQ ID NO: 317547

SEQ ID NO: 317572 - DNA, 4001 bp, Homo sapiens; identical to SEQ ID NO: 317548

SEQ ID NO: 317573 - DNA, 4001 bp, Homo sapiens; identical to SEQ ID NO: 317549

SEQ ID NO: 317574 - DNA, 4001 bp, Homo sapiens; identical to SEQ ID NO: 317550

SEQ ID NO: 317575 - DNA, 4001 bp, Homo sapiens; identical to SEQ ID NO: 317543

SEQ ID NO: 317576 - DNA, 4001 bp, Homo sapiens; identical to SEQ ID NO: 317544

SEQ ID NO: 317577 - DNA, 4001 bp, Homo sapiens; identical to SEQ ID NO: 317545

SEQ ID NO: 317578 - DNA, 4001 bp, Homo sapiens; identical to SEQ ID NO: 317546

SEQ ID NO: 317579 - DNA, 4001 bp, Homo sapiens; identical to SEQ ID NO: 317547

SEQ ID NO: 317580 - DNA, 4001 bp, Homo sapiens; identical to SEQ ID NO: 317548

SEQ ID NO: 317581 - DNA, 4001 bp, Homo sapiens; identical to SEQ ID NO: 317549

SEQ ID NO: 317582 - DNA, 4001 bp, Homo sapiens; identical to SEQ ID NO: 317550

SEQ ID NO: 317583 - DNA, 4001 bp, Homo sapiens; identical to SEQ ID NO: 317543

SEQ ID NO: 317584 - DNA, 4001 bp, Homo sapiens; identical to SEQ ID NO: 317544

SEQ ID NO: 317585 - DNA, 4001 bp, Homo sapiens; identical to SEQ ID NO: 317545

SEQ ID NO: 317586 - DNA, 4001 bp, Homo sapiens; identical to SEQ ID NO: 317546

SEQ ID NO: 317587 - DNA, 4001 bp, Homo sapiens; identical to SEQ ID NO: 317547

SEQ ID NO: 317588 - DNA, 4001 bp, Homo sapiens; identical to SEQ ID NO: 317548

SEQ ID NO: 317589 - DNA, 4001 bp, Homo sapiens; identical to SEQ ID NO: 317549

SEQ ID NO: 317590 - DNA, 4001 bp, Homo sapiens; identical to SEQ ID NO: 317550

SEQ ID NO: 317591 - DNA, 4001 bp, Homo sapiens; identical to SEQ ID NO: 317543

SEQ ID NO: 317592 - DNA, 4001 bp, Homo sapiens; identical to SEQ ID NO: 317544

SEQ ID NO: 317593 - DNA, 4001 bp, Homo sapiens; identical to SEQ ID NO: 317545

SEQ ID NO: 317594 - DNA, 4001 bp, Homo sapiens; identical to SEQ ID NO: 317546

SEQ ID NO: 317595 - DNA, 4001 bp, Homo sapiens; identical to SEQ ID NO: 317547

SEQ ID NO: 317596 - DNA, 4001 bp, Homo sapiens; identical to SEQ ID NO: 317548

SEQ ID NO: 317597 - DNA, 4001 bp, Homo sapiens; identical to SEQ ID NO: 317549

SEQ ID NO: 317598 - DNA, 4001 bp, Homo sapiens; identical to SEQ ID NO: 317550

SEQ ID NO: 317599 - DNA, 4001 bp, Homo sapiens; identical to SEQ ID NO: 317543

SEQ ID NO: 317600 - DNA, 4001 bp, Homo sapiens; identical to SEQ ID NO: 317544

SEQ ID NO: 317601 - DNA, 4001 bp, Homo sapiens; identical to SEQ ID NO: 317545

SEQ ID NO: 317602 - DNA, 4001 bp, Homo sapiens; identical to SEQ ID NO: 317546

SEQ ID NO: 317603 - DNA, 4001 bp, Homo sapiens; identical to SEQ ID NO: 317547

SEQ ID NO: 317604 - DNA, 4001 bp, Homo sapiens; identical to SEQ ID NO: 317548

SEQ ID NO: 317605 - DNA, 4001 bp, Homo sapiens; identical to SEQ ID NO: 317549

SEQ ID NO: 317606 - DNA, 4001 bp, Homo sapiens; identical to SEQ ID NO: 317550

SEQ ID NO: 317607 - DNA, 4001 bp, Homo sapiens
ggtgttataaatgaaggagaatgcttgtaccaagtagagcggaaatgaacatgattttgaatctattcagacctgaaaggtccaagacagaacaacgaaggtagaggtactggtaaaattcctcggcgagaaagcattttctaggcaagtatcatgtgacccttctctgctttctgagaatgcagttcatgggcacaaaaacaaatatttaaatcctcgtactcttccttccctcattctatctgtattcctcctttgtctactagatactgtagacaaaaaatgtcactatttaaaaacttcatagttatctgggataatccagtaataaaacaaactgcacaatccattaattcaaaaatgaggaaatacaaaaatgggggaaaaactcattacaaaattagagacacgtacaataaatactatggtaaacatcatgctaccattagtcactaatgaatggaagctttctgcagtagctgtcatcctcaaagcattccaaataacttgagcagaggctgggtaattaagcaacttgtttagtgccaaaggtcttagacctggacgttctcaacctttaaaatgggaacgctgcctgtttttaaagtacgatgtgacgtcctgaataaggtagtgaatgtgaataaatttgggatgaggtattaggatttgctctcgcttaagaatgtttttagggcaggaggaaaacatggtgtgaatgtgtgtgtgcaagagagacatatactgattttttatgagatattctgaaagataatgacccttacctgtggaagagatgcttgcaaaaacttcttgcagggaaggcagtagtgtggcaggctcggccttccagatgttctgcagcaagttactcacttttgtcacctgggagacatattcccgcagctctctttcctgggtggacacgcactggaaatggcctatcgttcgaaccagctgttgacagaacgtgatggacaatttccccttggggatgcattgcacaaagtcggtcagaaggtcgctcagtcgggcacagagctgcggctccggcctctcacacaccatccgtaacacctctacctgcaggaggctaaagagatccagcaccgacggacagctcataatcagcttcaggccgttgtgaatgtagtccaggatggctacatccttcctgtccagagagtggtagccctgatgaaggaggcccaacacgaaggtcttgttgaagaaggactcgaactctggccggtggtatcgtgcgtaggcctccagcacctggtgccccacctgccgctggaaagggtcctggccctccaggatgagccgggtcgtcaggtcaaacatggcctcgcactgcgcctcgtctagccagtgctccgccgattccaccaccttccgcacaatcacccgcttgaggggcaggggatgcgaggaactcacaaggccctccaggatcttgtccattgtcgccacgctgcaaggccagggccaggggataaggagcgggtggcggcagccccgaggtggggcaggagagccccggggcggagatgaacttggagcgccgcagcagcagcgcgacgggccacggccaccgccgcctcagcagccacatttatggcgcagggagacccatccaagccggggcgggagctagcgagcctggagagcctaagaaccgacacctgcggctggcctaaggcgccagaggcccgtactccgccgccgccccgggccctcgatcccactcagcatcagcgccgaggggcctgtcgggccccccagcggcgtcggcgggagctcagggcccggggctgctagccggcgggtggaggaagcacgcctccgagttccgggtcaggtgtgggcgtccagtctccagcaggtcgtgagaagaagccggtcctgggctgagtcaggaggcgctgtcacggagagtgctgggatcagccggggagaagagaccgaagcgacaccctttgacccggattttgaagtgccggcaaacaggaagtgaaggacctaagaacctccggaaggaccgcccctccgcccctctgcccctccgcccctccgcctgtccgcctctctccttctcccttgttccctctctccctccctgctcccccacctccctcccgagtcgtagactcccttccccccggcgctgggagtctccttcccgccccgccgcgcaggtgcggcgacggccgcgtcactggagagtgtgtcgagtcacaggcggtcttccgcgcggagcgtccccggcggacgctgcgcagatggctgcgactgtaggattcttgccggctagtcttcgtcggttccgcctgcgtcaggttactcgtgaaaactcgaataagtgctatcgatgtgaaatccgaggaaaagagcatttgggggaaaagtaaggaaaactcaaaactcggattgagaagtctgccttggctcattaatcaagaattgcgcttgcgcgcctaaatgtgactgcctttatcctgcgatgtcggtattgaagtaagagcaatactggcggcgtacctagcatttagcgaccatcagtatcagtagcaggcctctagcaaagaaccagttagtgagctttgtaccatatcgaaaattataagccgtccaaaaaagtgtgagagtaaggaaaatggcagattagaatcaaaatatttttatacctgtgtcatacaagggtactttgaaaatagaaaaccaggtggaaataccacaaaacttattgtatatgttgacaccgaagatggtttacaatagggaagaacaggtgcaatcatgcttgttctgtttcatgccaaattccgaagattcacagtaagaatttaatcagaggtctttatattggaaaatattgcctaactgtagcctgcttcaggcttggttaatatagttgtgaaactagacattaaggccctgtaatacagacaaaactttaaagaaataggtcatttaaaatgtcccgtagaaaaatgaacaaaattctgttacttcagtttgctaaatagtgttttgtttttttaccaagttacaaacacgattacactaatatattcacacgtcgattatggtagtcttaagaagagcagtttagaggagacaggagcttgagtaaaagggaacttaagaccaagttgactcgtaggaagatacggaagataaaagagaattgaggtaattaatctatcagtcatgctagagacaggaatgatttttccaataggaggtgaaggtacacagatgtttgtctttactgggaataatgccacagtggaagacaaaggtaatatagaaaataaaatattaagaaggaattaagtattaagaaggatcgtggatttgaggtggagtggaggaaatttggaattaatctttgtgctaagaaactaacaggacgaatgaagattgctgaatagtaccagcgaagtgattattccaaagtagacaagaaaaaaatattggtaaatttaaaacttgacagattactttgaattgtctataacattttcttctttctgttaatattaggtcttgaaaaattgaatattacaaaataagatgtctgagagaacatagtgctattagtccatataaattacatgtcataatattagacttccaaaagcaccatgactctgtatttttaaaatacctcttgaatgatagatgcatgaaatgaaatactaggtttttataccaagatattcaacgcttatttccttcttttgccactggttaaaaaatgtatgtaatatgctcttttataagatttcaattgaaagtggccaactttaaatttattttatagcataactaaaagttctataataataccatgttcctttttaacattttaaaatattttcagaagtctgtggaagatttttttgcagtgaatcatgccactaatcattggattagtgggtgctattgtaatgggctttaaaatttcatataaagatttagtctaaggcctc

SEQ ID NO: 317608 - DNA, 4001 bp, Homo sapiens
actatgttgcctaggctgatcttgaattcctgggctcaaagaatcctcttgcctcggcctcccaaagtactggtattaccagtgagccaccatgcccagcctacctcatttatttaaaagaactaaaatctggcactcaaactgatgtcaaaaattatcctgaggctgttctacagacgctaaaatgctaacatgtcataagttcaatacagttttaaacaaggtagttaggtaatgaagtggttgctaaccaattaagaggtgcagattttcataaagcctttatctaaggaattctaccatgaagtttttcatgaccaaaaacagaaaatcagttttacaagatgagaaaaactaaggtctccggaaatacaacagtttgcccaaaagcaccattagattcatgcttaactggagagacacccaatggtgcagatttcaattctaactcacattgactacaatcatgtcctcatataaaataaaagccagaagcagaatgtgtatacaactttggtcaaacgagaatgtatttttgaaatgtcctgttgtgttaatcggtctttccactgtacagctgctgggagtttattcaacttctatctgtgctgatataacactgtattgaaattgtttcatctttaccaatgttaacacccacaagataaggaacagctgagccccttggggacagggactcacctcattcatttattaagcacttgagtatagtctgtgccaacaccaacatagcaggtcctcaacagatggccatttatcggaacaaaactcgtaatcatttgatacacagcattttctcagaggtacatcttacagcattattaacaaatgaaataagattagatgatctgaagcaacttgcattggtatgtcacatttggtttcttctaactaatgcttcctttttagaaaatttctcaagctcttcaaataggaaacttaaaaaacccaaaaacaaaaactttccatttgcagggccataaaaatatataggaagttaaatccattggtctggacaaaaatcagaggattatcaacagaagacatttcctcatgcttggtagcagctagtgcattatgaaaattacaacacaccagccaaacaagctttactatctctgaaccacacactgctgtgtggccaagctgccttgccctgagcaagttcatcaagaattaccatggcaggaattcacatggaagaaaaattaaaacaaatagaaactagtactaaacttccagtgaacaataaaacttcagcaagtgggtgggtaagtggaggaatgaagatattttccaagtttcctataactaaaactggcacaagaagtatggggaaaagaggggatgtttagttctcaatcacacgaagtatctgctacaaatttgatttctgctctgctgggtcctttcttatctggtggaggaaacaaatccactttcaatgatagatcttcgttttttcctgttacccagaaaaatggtaccttctaatatcctttctgaacacatatcagcctgttcaaaatatgttaaacgatgtgcttaagaaaaaaatgcaatcaccatttgctcttactacaactactcaaaccagctgggaccaaagttaggagcgggaagggtcagtaagaggcccacagaggagctaagcagtgagaagggacctgtaagacacctacctgaaaacaattcattattgagcaaagaatctaaagagaggtccagttaatatttacgtctgatccagtgaaaagacagcagtttcctcatacccagccttctcctctgggaaggaagactgggagggacagtgggggcggtgggtgggggattgacctgagcagggggcggggttaaggattcccactccagccttcctatacatgggaggtgtttatattagtggttgcttccaccaggtctgaaatggcatgatctccactgtcccttaaacacctggtagatgacataacaatgagaaagatgatgttgacaatgacactcactgagttctagccatgtaccaggccctgtgcccgagtaatacaacaatattaacatcaccttttggtagataaggaaagtctaagaccggacaacttgttcaaggacacaaagccaacatgtgttagaaccaggacctgccgggtatggtggctcacggcagtaatttggcgcttcgggaggctgaggtgggaggaccacttgagcccaggtattagggaccagcctgggcaacatagggagacccagtctctatggaaaatttaaaaattagccaggcatggtggcacgtgcctgtagtcccagctactcagaaggcagaggtgggagaatcacttgagcctgggaagtggaggctgcagtgagccaccatgttcatgccactgcactccagcctgggtgacagtgtgagaccttgtcaaaaaaaaaaaaaaaaaaaaaaagaaccaggacctgaacccaggaagtctgacattagaacccaaactctgtcactctctagacatggcgtctaaatacaacatcagactccttacttaatgaattactggttcctcacttcatctgggtgatggtcctaaatttggtacctttttaggtctccacctgagatgtcaactctcagggcagtattggcctgctcctctcaggtcctccccacaccctgtctccctgactgagtttcactgaaacacgttgtgacattcagcccaggtgtgccagaaagcccccgcagcactgagggtgggtggggggacgcgtggggggaggttgggggctggcttcctctaggggcatgctagctctcaagtttccagcctgcttctacacagagaggtgtaaccacacacaagcaggacaagaacaccaccaagggctgggtcggagcctcactaccctgtagtatccttaggcctgcggccacaccaacagacataaaagagtattcaagctgctcccgattcacagttccctcaggaactggtcgtaggagagaaactgagaaggcatcacctcttcacaagcagcccctccacaggaataagaggaaatctgactcctcgcagagaaaggaaaaaaagagaaaacagaaaggctctaggatccactccccgtatggaactcgcccggcaccaaccagtacctgtgcagctatcactctgggaggccccagcatttgctttgctggccgtgacagtggcacgtcccattgtgctgaaagctgaagccagcgggtctcaattccacccctgagctaacacaaggcttcttaatgctcctttgccatgtgttgatcttgcaacagaatgtgggacagaagatttaaaaagctatgtgatgggggaagggcagccagatcaccttacaccagggcttctccatcaagcttccttggattccctttaggggccagtattactagcttcaagggaggttttcctcaaactggcactgtaagagcacgtgttgcctccggggacccgcttgggagggggctagaggggaggcggggtgcagtctaaagaatgtaggcaaaacacacatcatctcaccctgcaagggacagcaatgccttactccaatctgagctccccaaaggctctgacaagtggaggcgccagcagggtccagcctggggacccaagggctggaggttcttcctacagaaaaagggaaagcaatgggggaaacccaaattaaagtgaccaccgcatcatgggctcggactgcatcagaacccagtgatgtccctggctgtatccatgcccgccagcctcccctaggtctacagcggatcaggcaggataaccctggagacctcctccaagcccacagcccgccccacccttagggcctgcaaatattaccgccacagagccttgtccctttttcacagatggggaaactgaggcatgcggagcaaattacggtgctttttcaaaccaggttgaagttcacttctccagccacaa

SEQ ID NO: 317609 - DNA, 4001 bp, Homo sapiens
tgtgccagaaagcccccgcagcactgagggtgggtggggggacgcgtggggggaggttgggggctggcttcctctaggggcatgctagctctcaagtttccagcctgcttctacacagagaggtgtaaccacacacaagcaggacaagaacaccaccaagggctgggtcggagcctcactaccctgtagtatccttaggcctgcggccacaccaacagacataaaagagtattcaagctgctcccgattcacagttccctcaggaactggtcgtaggagagaaactgagaaggcatcacctcttcacaagcagcccctccacaggaataagaggaaatctgactcctcgcagagaaaggaaaaaaagagaaaacagaaaggctctaggatccactccccgtatggaactcgcccggcaccaaccagtacctgtgcagctatcactctgggaggccccagcatttgctttgctggccgtgacagtggcacgtcccattgtgctgaaagctgaagccagcgggtctcaattccacccctgagctaacacaaggcttcttaatgctcctttgccatgtgttgatcttgcaacagaatgtgggacagaagatttaaaaagctatgtgatgggggaagggcagccagatcaccttacaccagggcttctccatcaagcttccttggattccctttaggggccagtattactagcttcaagggaggttttcctcaaactggcactgtaagagcacgtgttgcctccggggacccgcttgggagggggctagaggggaggcggggtgcagtctaaagaatgtaggcaaaacacacatcatctcaccctgcaagggacagcaatgccttactccaatctgagctccccaaaggctctgacaagtggaggcgccagcagggtccagcctggggacccaagggctggaggttcttcctacagaaaaagggaaagcaatgggggaaacccaaattaaagtgaccaccgcatcatgggctcggactgcatcagaacccagtgatgtccctggctgtatccatgcccgccagcctcccctaggtctacagcggatcaggcaggataaccctggagacctcctccaagcccacagcccgccccacccttagggcctgcaaatattaccgccacagagccttgtccctttttcacagatggggaaactgaggcatgcggagcaaattacggtgctttttcaaaccaggttgaagttcacttctccagccacaattttgcactttttttacagctttattacatttccgatttctccagatacacaattgctattgcaaagtgaattttaaacacctcggaaggactgaactcaaaatgagatgagggcagtctggacgtccaataaggctgtcttgaccgcaagaagaggatgggtgccccccacctccagcttatcccccaccccctccccggggacgttcaggttcggtcgcttcccttccctcaagccgcttccaccgcaacccgagggcggggggcgcagcagcgcggccccgggatcgccgggcgggttccgaggtcccggggctgagacgggcgccgggggctcggggaccctccccggccgctgaggtggctgcggccgcgcgcccagctcgggggccgggaacttctggcggcgcggaccccgccgcccccgccgccccagccaccgggcgtgtgtgcagctcgggcttccctttctttgcctcgccgcgagtcgggcgcgaccccgaggcggctcggccactcaccatattacagatggaggcgatgtttcggacagtcattagtctaaaggttgcagcgatccctcaccgccatctttacaaggggaaaccgggactgcccatggtggcgcgctggcggggaggccgggcggcagcgcggcggcctggggtccggctttcagtttggctgggagagggaggccgggaggaggaggcggcggcgcggggagggcggggagggagcgcggaggggcggggagtggcggagcgagggagcctgggccgcggccggcggcgcggggaggaggggcggcccgggcgcgccgcgtgagtccgagccggccgctcagagcgctccaggctgggttcccgggccccgccgcgccgcctccttcccagctcgcccgcccaggcctggcctcctgcttttccatttgattccctgcctctttctattcggactggaatgccgggccaggctccggggcgcgccgctgcggcagccgcacctcgcaggtcccccggccgaccccgacgcggaagcggcggccctcctcgccgtcggggagccagggagccggggacggtacggtgcgcggggtggggaagcgggcggcccaggccggggcgaacccggggccgccttccgtcctcgctttttcctcgtcgccttcctcctggcgggcctcggcagcccccggtgtttattttttggcgaggggtaggggtggcgacgtccaacttttagttcctcccgagggttccaaccagatggcaccggcggggacccaagaagtaaaatggggcgaggacaccggagcggtcagagagccctcgccagctgcgggccgggcgcccgagaaagggcgccgggaagggggaggaatccgggtctgggcggaggccagcagcggcgcgctcgggcggcttgtgacattagcgggtccaaaggagacgtcccggttccgcgcaagcactagggactgtccaaggagtggaaagaacgaaaacaaaacttttccatatcttcaaggcaggcatacccctctcgggtgcacccagcctctagttgttgagatgggcgctgtatgggatcatgcacatttcccgcattaaaggtcgtggctgcgggctcagagcgcgagtctgtgcaccacttagcagataggtccacgcgaattgaaggggcccgtttctgaatgtgtggaacagttacacatacaaggttgcaattcgatgctttcaaaggagaaattgtacaagtgagatgcgtgataaattcttagatcagtgtatttaatgacaaattgaatcagaagaaaaattagttgaagatagcttttatctaaccaagagtaaagatttgagagccgttgattgctaatatccctagaatctggggaggaaacagtaagacagacttgttgactgaaggttttgggagtcatgtcactgtgttttccagtggacatgagaaataatattcctgcttaagtctttcaacctaaatattatttccaaatacatcctgatgataatttcttccattgtaagtcatgactgattttcttctctctctctctgttttttaagagacaggttctcgctatgttgcccagcctgaggctgggcagccccgagtcatcccaaactcctgggctccagcaatcatcccaccttggcctcccaaagcgctgggacaacaggcgtgaaccactgcacccaatgtttacattcctgatctcctttaatcgccaccataactatcagctggtacatgctattatctccttttttgcagatcagtcacataaggcttagaggatcaaggatcctgcccagatgacttaccgaaatgttacagattaagttggtgtggtaacctgggctgagcactctgggagaggaagagaagagagaagacaggaaacaactgaactatgaccaatcccagcacggaggcccagaaaactttaagatttgagtattaatgtctcaaggtcaggagcaacctcaaggctaaaactcagatctcaggactcaatttcacagaagttccactataaaggcaataatctaaagctttaaatgatatgaaaattttgtaataagagttcagtatttctgccaacattggcgcatggattgcaaagttcacaggattgaaaacaccatcgacataatggaaattgaacagcatctgattactgagtgctatatcagcaagttaaaaggatcttttgcat

SEQ ID NO: 317610 - DNA, 4001 bp, Homo sapiens
cttttttttttttttaaggaaaagaatacactagttggaaaagtctaccttcccattaaaatatcttttttaaaactatcttatgcattgtttagtgaaaatattaacgaattgattattagtatcaaattccatgaacttacacaatctacatacatttttaaaaatatttgttaaaattcttaggaaaaaggaaaggccagttcttagtctcttttttacacgttaggaagaaatacacaaacctcccagtttcattaatgaaaaaatcttaataaatcactttcatggtttatcaccagtaaacacgaacctgcacaaattgtatcaaggagcttattttaaaagcctttgagatacaaaacaaaaaccttatttctcagactataattaactcctacttacaccgagtttgtctatttggaattcttatgacaacagcaggtaaatcatatattacttttgcagagtaagttttgttccctttggttttttttttttttttttaatttatctttaacaggacgaagggtctttgcttagaccatcatcacggaactgaaaagaacagaaaataacaattatcaatgtaactaaaagttcatttccaacagacattttgtgttagcacttgctactcattttaaatagtgaaaatcagcaagccttttcttttaataactaaaagtgaatcagatcttaatcacaaaaaccttcctaagtgtactgcgtttttttgtttgtttgtttgttttttggagacggagtctggctctgtcgcccctgctggaatgcagtggcgcgatctcggctcactgcaacctccggttcaagcaattctcctgcctcagcctcccgagtagctgggactacaggttaagtttactattaaacctacctcaaaaatagccttagatattctttgcaaatatatatatttatacatacatacatacacacacacacatatatatatatatatatatctatttccagataaggaaactttcggaaaactttgctgtccaactggtaattccctgcatactttgcattgataaagaaaaccttgtagcagggttacaaacctcaaaacatcctcagattgcaggttttagaaaccctccctattacacctgtgcaagtacttcctgttctccaacactgtttaaaaatagtttggtaaatgccccgtaagccgccctttagaagctaaacattaactttatatacatcaccactaccactgagaaaccaccaccccaagaatctcacgagtccagtcatctctcttctccaaggagggagcataaccatcctggacccctttaagtaaaaaactgtgtgctcaggcgaggcaatgtggcttggacagccaggggcaggagccaagtaagggtattactcacaatcccagcaggactccagcttgtcgccgccctcaaacacggcagcaataacatccaggacccaacaagtacagcacctcctcccgcctcgcgagcgcctccagcctggccagaggcatctccgccagacgcggcgagaaggggcgaaagggctgcgtgacctctggcgtctgaaccgcccagcaaagagagtgtgtgtgtgcccagagggccggggccataggaggtcgccgggctgcgaggggagagacgagctctggggctagaatgagagtgtcccggtcaggcccgcgggggtcgcaggtctctggatctccaaccagagggctagtttcggagacttaccttgagctctaccctccttgcgcgaggagcgtgcggtccaggtagagaaatacaggccttccactcccacagagctacctcccgctggcccagccccgcttcacgccgacacccgccagacacactgactgctgccacagtaccgaggctcaccgggaactggagcacaggcggctggtctccgccgcccagagcccgaccctgtgagcggagcatgcgcatacgccccaatacccagggaccagtcaggccagtgacacctgcgatcaacaggtccctggagccccgcccctctccccgcctcgagcccgcccctcggagcgggctccgccttcacgctcaccgaggtaactccgcctccgctcgcgatttcccggctttctggacctgcggaattctattcccgcggggatttgatggcgtgcgcgatacagttggcttcctcggaggcgcgagatcgcgcgagaccaagagatagaacatttctgcaaaagcggcagcttggcgctggagtttggttgttgggggaaaggtggttgtaggacgtgctgtctggtgtggtgagaaagaggctagttcttcaggaggaggcgattattctggtgctcttggtagttcattcggtattttctaagctcaagaacgcggatccaccaaggacttcacttaggttaggtgttacctgagagaacaatccgtagtttggcatcagaaccccatgcggacacgcagtttcctttagatttccgtgagtcgttagacgatctatttgcagttaaatggcttcctgtggcgtgaatgtgtattccccaagcagttgtttcttgcctttaattagatagctttaataagtctgttgacctggttaatgattgtcagaaaagtctgtccgcctctttgccgtgctttcgaacaggttttaagttaaaaggtactgctgggaattgggctaaactttgattttgaataaacctttcttaggaatagtagtaaaggaaaaacccatcgtcactgataccgaatatctctcaagtaaataaagaaggttttggaactcattccaaagctggtgtaagttgaacatactaattgtaaaaatggatttcagtaaacccagaggcacttctaaaagtttatttgaagaaagagggggaagaaatattggtcgttgatacaggagacaaataggacccgtttgtaatgtctgaggctgaatcattaagaatttattgagcatttactatgttccctttactgaactaggcactgtcagaaataggatgaaataaagccgtggtttctgccctcaaaatattaaaaactttgggaggggtgggggaaaaaaagatcctactctgcatttttaaaacaataagagcacaccattaactcttccctccgtttctctaatgtcattttctcctcattctgcagctacttttctggtgcactttaaatactgtttttccgctgcgtggtctctgttcgccagcactccattttcttttgctgtttctgtttaatgttaatccatgtctccttgagcagtctctttcccatcatggatttacctaccacgtgtcctgtgcaccaagaactctcaggtgtatatctatacgtcggacatttttaagcaacatcctttggatttcacacagtatcttaaatatgtcccaaattgacatggacatctttactataatctgttcctgatgccatgtccctcttcacccatctggaacctacaccatttccattccctgtttcagaaaatgacacgcaactgcccaagtcagaaatctatgagtacccctgttacttttccttcatttcctcttttctaatatcaaattttgactcttatttccttaagtatctctcaggtccacccctccactctcactgtcttagtccttcaagtaatcaccatctcttatgactcatcttccttgtactattgcaatattcacaagatatcctctagttatttcccacaccagtccaacctccattctattaataatttttctaacgtgaaaatacgatcattatacttctctgctaagaatttttcattacccaccggcagggcctttcatgatcacactgttaaactcatcgccattcttcctccagttcctccacattaatctttctaaagtccttgctttctatgttcttggttctctcaagatcctttggttctctctcgaatgcttatctccatggatcttttcataactttct

SEQ ID NO: 317611 - DNA, 4001 bp, Homo sapiens
tcagaactattttataggctgccttacaaataagataactgtcaaagatgcattctctttatgtgaaaagttacacatgttctaagtttaacactccacaatgaactgtgaaatttccctaagctaatacttaatattggaaaacttcaacagaatattggaaaacttcaacatcatctcttttctcaagcaccttcatattgctcccatagttcttataaattgtccaataacccagacaaatttccttgtggacaagaatttttaaaatttaaagtattatatattaatacaatgactttagttaaaagtaaaaatttattgatccaaaactgccaaaaaccttatgctaagcaaaaacttcatttaagcttaatgctctttttaactcctgcacgaatgccagataattcaccactataacgttgctcttctttacgaacttcacgaacctggcctcttcttctaattttggctcttctgaacttctctctgtgtttcactctgggattgcgatcaatcttctttctcctaggagtaagtcccctatttttagcaatttgataggtaatagctctctttgcattttgatcttcaagagcctgttcttcagtgctattttcttctttctttctctttagcttttgcctgtcttctatttctttatagtacttcagttttgctttttcatcaaaatcagaatcatcagaaagatctgtaacagcacaggcagcagcagaagtctttgaaacagactttggtttgggcttggtggattttgcttttggaatcagttctttctttacagcatcatccttaagtgtcaacagatgacgaatttctgaggacagcttctgatccacaacggacagcttgttgatcaaatttcggtaggtaacaagcctttctatgacaggatgtccatgtgctgggactctcctagctttcaggatcaaataaaaactgatgttcgagcaataattcaagtagaggttgtacttggtcctcaagtattggcttccttttccgggtggaatgatcccttgttccaccaactctaacaatggctccagctcatccttaacctctgtcaacttgactttcaggtcttctatcagctccaagagttctggtgattcctttcgcaacattttcagcttctctttcactgaaactttagccaaatccttcacgacccgtgtctcagcctcatctacctgaggcactggttttgcaaaggcctcaacccaggcgacaccaaaatcatcctcttgcagcgcttgggctaggcgccgctgaatgatctgtgcctcctcctcctcctctctttcctcctcctctgcctcctgttgactctgccggcctcgggacttggaaccatagtccgtgtcatagtaaagttttttcctctgaccccacgacaaactgggatccacagaggcctcagcttcactttgcacggagctcccaccatcatcatcggcattctcctcctcctcctcctcccccgcattccctccatcttcgtcgtcctcatcgtccatatctagggctagcacctcctcctcctcctcctcgccatcctcctcgtctccactctgtacttcattccagcccttagctaaggcggcccgggatcgtgcctcatgaaagtcatctacctgatcttggtagtagctggtgtcccctggtgagggtggcaatcctaaatcatctccattttcgtcggtgagcgtgggacctgccttggctcgcacagctgcccacttagctgctccgcgccgccgggatctccccaccatggctcacaatctcaggttttacagcgactccggactttcggccaccactgacttcggcgcaggaatcaggcgctccggtaactcgtggctctaaacagcagcgcgctcccctaccaccggagtttgcagactcctgatcggctactggaatttcctcttccttccggcccccagcatgctctccgcgtggcgtacgattgaggacttccgctcggtcccttagtcgagatcacgttgataccaacttccttttcactgtgccctttaacgccagtcgattccggtgaattaaaatctttccgtgtggaaacgataggataaggaagttccgttccacagaacgctttctcgggctaatgcgcttactctcgagtgcctgggagtggctgggggacggaatcctgacggcacctccaggcgaggtcccgatggccaatagagggcgctgcgctttacgccccggagaagtcccgggggcgttccattgaggtttaactgcgtgtgtacccggcgcttgcgaccggcagtctagtgctagcgtagttttcctgctcccttgttttctcttttctgcttatcaggctggaagttaatcagattgctttcctctcatttcacccccacccccaataccatatttctgggtaccacagcctcaggcagcgccgctggactccagaatcccacgggaggtttccgggcgagagcgcaggccgggcctccggctcgggtttactcatccccatcgccctctccctgctcacagggctcggtgacccgctccatggggatcgataaagctagatgaccccgaggctgacagtgggaaggcagagccccgctgcagggtctgactcttctcaaggaagtctgccctgtaatgttagagtaattcagggtgtaagtttttaggcattacatatgtaaggttcagggttagtattattataccttttaatgtaggtagttggaagctgaacttttgatacgttgctaaaattaatggtgacatggctgggcgcggtggctcatgcccataatcctaagcactttgggaggccgaagtgggtggatcacttgaggtcaggagtgcaaaaccagcctggccaacatggggaaacccagtctctactacaaatacaaaaaattagcggggcgtggtggcgggtacctgtaatcccagctactcgggaggttgaggcaggagaatcacttgaacccgggaggcggaggtggcagtaagccgatatcgcaccactgcactctagcctgggcgacagacagagactctgtctcaaaataaataaataaataaataaaataaaattaatggtgacaatttctttttcttttgttttttgtttcttttttctttttctttttttctttttttttttttgagacggaggctcgctctgttgccaggctggagtgcagtggcaatctcggcccactgcaacctccgaccccctggttcaagtgattctcctccctcagcctcccgagtagctggcattacaggcacgcgccaccactcccagctaatttttgtatttttagtagagacggggtttcatcatgttggccaggatggtctccatctcctgacctcgtgatacgcccgcctcggcctcccaaagtgctgggattgattacaggcgtgagtcaccgcgcccagccaatggtgacaatttcttttcagaaagtatagtgtcattaggttaataaaaataatgcaaaatgttagaaaagtgatactttgaaataaacattttccaagtgcctaaaggtgtccgaaacattttgaaatttttacaagattttagaaaataaaattaaattagaaagttgtgggcaaaagttatgttctgatggtaagcatgaatttattttttaatgtaaattttagtacattttgtcatttagcagatattaactgcttactgtttgttgtagaatgctacagacaatagtgatgaatcagccagttaaggactgtataatcaggtagaaaagaagacactcatacagattactggaatacaaggcagtgtatgatgtaaacccggtgctgtaagagaacagaaggataagagataacctttagattgctgttttgggaatattgcttaaagaatatgacatctatgctggaattgtagttatttccttactttaaatgttaaattttcattattt

SEQ ID NO: 317612 - DNA, 4001 bp, Homo sapiens
ccacaagccaagaatgtcaatacaaacaaaaaatacttggtgaaatgtgaaaatcatatacacttcaaatgtcggtgttcattcacaaagtgtcattggaacgtcgcccatctatccacctacatcatctacagctgtgttcacaactgaggcattacagcaaagcctgaaacacaaaccatctggctctttaaacacacgttacctagcgcaacacacaccgcccggcacaaacgcccaccgcccggcacaaacgccaaccgcccggcacaaacacacaccgcctggcacaaaccgcacaccgcccggcacaacgcacaccgcccggcacaaacacacaccgcctggcacaacgcacaccgcccagcacgcacactgtttcagctgggtgcctcctgctgcaggaaggaaggaaggcctagagctcgggacatctcccagcccctcctgaatgctcctattcccagctcctgaccccacataaaccattgcgaattcgatttcctggcgcaggccacaaaacctgacctgaaattttctatcaaaatgtcaacactccatcactgtataaacaatctataaactgccattttacaaacacaggatacagaataatcagtgtcctcgacttatgctccaccctccgaggggaagttttgcttcccccatgaatctctggctgcctgagggtgacggcagagatcccctccggcgttttccttggaggaagtgaacagaggtggacataccctaaaggcgatggaccaactcgcccatcagcaagctctattctttcccttcgaaaagtccagcagcaaagaaaaagatgcacgtttctctctgaatcacatttgtgcactcaagaactcctacaggatgtgctccagaccacacaaatgggaatgaagagaagcaccaaccacagagcagtggggtccccaacgccacacgccccgaccccagaacatgaccacccgtcagagccgggtactgcagggccccgagaaaatgtcctgggtgtgtccctcgggtggttctctcccaggtgggggcaggagggcagggccctgtgtgtgtcctgggctcagtgggccagtcagttactgttactgaaccctaagacatacttgcaaattttcttcagttccttcattttctcaggatttagtcggggttctcctgaagttgtgagctcttctaccaacttcgaaagtttctgatccatatctagaaataagtaaggcagagatgctatatcaccatctgtattttatagctctcggtgttattaacgtgtttactgggttccactataaaccgaaagctccgggaggaccctgaggctggggtccatctgtgggtgcctctctgggaaatatgtgtgtccagcaaggcctttacggcggtgattgcagttttaaaagtgaaccttaaactcgggacctctacaatcccgtgtgtgggacgctgcattgagggtcgtgcgttaaaggaaccagtggcgctgtccgaatcagcttttccccaacgtgactgttgctgtttcccttattcactcagattccgcagggcagcctccagcaaggctgcagaggccaagaggagccaagaaattctgagaccaatgaaaagtcgcgtccggagagcaggggcggccctaacggaggcagcctgcccggatacccagggccgagcaccgcggcgtgcctggtgggatgaggcgagggcctgccgcaccgccagggaaaggccgaaggacccggaaggaagcgccaggcgaggccggggcggaggctgggaagctgcgccctactcggggaaagaaggggcccggcagggccacgcgaggcttggaccgcggggtcgctctcgcacagcggctgcaccgggcgggcgcgccggcttcgacggtgctcggggggctgcggcctgtcactcggcccagggcccgccctccggccccgccgccggcgctctcgggcacacgggacacgccctggccgcaggtctctgcccggcgcccgcagagccccggggaccgaaccggcgcgacccccgcccggcagcgtaaccacagccccacctaccgctgacgcggccgctcgcctcgccccgccccttccggcggggggaccgcccctcttgtcaggtgcccaagacctctaccgccattggctggccctgggccggacgcatcaggacctggggtcaccacagcgacgactgcacctaccgctcgacgcggcctttctcgccgttgccccaccctttccggtcaaggccccgccccctagcacgtgccctgagctcgacagccaatggctcaccccagcccaggaggcgcaggcgcaaagacgcggccgaggtctgcgcggtgacgtaggcgcgctcccggcgagggcgaggcaggctgccgggggtggggagggggacgcacgagaaaaaagaggcgggagggcgcagaaagtccttaaaggggccgcatgtacgggcgccgggggcggggccggccgggaaactgaggccgaaaggaagttccggtctgggcctcaacgccacgcccgcccgcgggctcgcagccaggtcccttcacctgcagagggccggtgaggaccgcccagacgggcgggcgcgggcccccgcccccgagctcgccccgcgcagggcgccctgaaccccgcggcgcctccccgctccggcctcgggaagggaatccctgggcgggcttgggggtcttcggggcccacctcggcgccagacgcacagcaggtacccctgggcccgggctggccctgggcggaatgagaagcagaggcgccgtccgtcctgccgccgaagtccgcagcctcgaacgcaggggagtgcgaggtcggctgcggacggacggacctggagaccgcgcttgggaaaccgtggcttcggaggagcgtggtgtggaccccactcgcggggcgcccggcacaggccacgcagagcagacgcccgactgggctcccggggctgggtgcagggcgggggccgccggcggcgggccggggtttctttttcggggggatgggcgtgcccttgcattacggtggtggtagctcacaactctgttaatcgtgtttttacagggtgggtttcaggatgtgtgagttatatctcagtaaagcaattattttaaaaaggaaaagaagagggactccctgcgccgcccctctctgcagcaccagcttctgtccctgggcgtcagtggctcccagctcctagcttgcagccagccccgagccgctcctccgcctcaccccttcctcaccctgcctcttgcttcactgagcaagctgcagccagaccctccctcagcgccccttgccctgtgcatccaatccccggcctgtggcttcctccaaggcacccatccagcagtttccctctgtcttctacagcgtggttttttttgttgttactagttctcattagtataaaagggtgccgtttctcccatactaacaaaaccctctctttatccaacttttcttaccaattgctaagtccagtctcctttacactgccccggggtgtcctctcagccctcaggctcaacagcacagccaagctgcccgtccactgccctctgtatccgctgatggccctgcagccttttttttttttttttttttttttttttttgagacaaagtctcgctttgtcacccaggctggagtgcagtggcacgatcgcggttcactgcagcctccgcctcccgggttcaaacgattctcctgcctcagcctcccgagtagctgggatgacagtcacccgccaccacgcccagctcatttttgaatttttagtagagacggggtttcaccatgttggtcaggctggtctcgaactcctgacttcaggtgatccgcccgcctcggcctcccaaagtgctgggattacaggcgtgagccaccgtgcctgggccaccgtgcctgggcctgccctgcatccttctgttcgcttggaccaat

SEQ ID NO: 317613 - DNA, 4001 bp, Homo sapiens
caaataggtactgcaaaatcaaggactcaaattatcagaagcgttattgagccgattattacatttctgcggtatttaagaacagaaagatattttcatcactatagttacggcaatgtaagtataggcactgaaaattatttttgtgattcacagaatgcagtctgttctatttcatgtatattgtttttactcaagaggcattcctttaacccctatattaaattattacacattccaacattttaatgttttcccaaaatttaaatgcaaaggtagtttgatttccaaaaattagtcttctcaatctttaagtgtatttcaaaatataaatataaataaaatatttcaaaatataaggctattttctacacattgtgtatgtgttaatcaacagtcaaattaaagttgactgtaacacaccacaggtacctctccacttgccaccagttgaaataaactaccgcagtatagttccagcaaggggtactgcaagtgtttgaactgaaatgtcgaatataacttctttaggaactctcttaagcatactctatatggttatggcaggtatgaactttttagataaagatatactcttttggaagagccagtaagaagtaggaacacacacaaatcctttttcaaaatcaggatgcctcaaaagtattttggcaacattttcaggcaaaggattaaacacctcttatttaaaagaaaacaaaacaaacaaaaaacccaaacaagaaaaaaaaaaacttagtttgcagtatctcatgaccagattttaggaatgaagagcttataaagttgaaacaagccttgcattgcttgattgtgatctaactgactctaatctcccgttacatctcaagtctgaccaacttcaagtgaactctgaaagctctggagcctggttactaaagtccctgacactttttttctaaagtcgctcacagcgcctggtgctctgcagactatgaacactccaggaaagtaaggctgggttgactgatcaccagtgtcccagaatctgtttggagtcccatgaatcagctggggaaagaaacgagcatttcccgaccaaaatgaactcatactctccagagccccgctgactgggcagggttcaagaccccttggttgccccagaggaaaccagtctgaaatagatttcgggatctctcactgggcacctctccgggcccttcactcgtgtaacttgcttgcctctctagtaacaactttctatttaaaaagaagaagatttttctccaaagcagcgtgcactgagctcagtaactttggatcccacgtacacaagcttaaagcacacacactttcccccgcgcaggttctcgggtccgccgcagaccctaacgcaaactctcgggttctccgcaaaccctaacgcagacctaccgtggcctcgcccgcgtcgggctccgcgtccgagaggtcgagtccggactcgaaggcggcggcggcggcgggcgcctcgcgaggacccgggagcagcgcagcggcgagcagagaacacgccacagagaagaagcccagcaagtgcatggtggaaggaccgggggtgggggaccggtccgctggcgggggcaggggtgggggcgcgggcgcccctgcgaggccgcgggcccctcctggtccctctcccccgggctcctcccggcgaccccccctgggcgagccggaggcggcgggagcgggtccggggctccgcgttcccaactttgcagggcgccctcccagccagtgccggggaaaggcggcgggtgtcaggtaaaagcctcacaggaaaccggacatccgagctccccgcattcggagcccgcgaggtgaagcgagggcgagggaggacgccgccgcggtccgcgtcggtgtagctttttggagaggcggggcgggggacaccagaacaccccgcgatgttcagcccctccaaacccgccagagccctcgtccccctcctccctccccttccccgaagtgagaggagccgggccgcgggcgctgcggcgggggcgctggcggcggtgccgggggcgggaggagggcggcggggcggctggcggcggcggggcccgggagcgccgcggcgcaggatcctccagagcgcgccgggctgagcggcggcggcggcggcggcgggcgcaggggcagggcatgactgacgcgccctctgcctgcgcttatgtgagagaaagcggccgagggagggagcgtgccgagcccgggctgccctcccctctcactctccctcggaagccgtctccctggagctccccgtttccctcgcctcctccccggcggccccacctcccccggcccccctctggatctctccctccccgcccctgtcccctgcggggagcgggcggccggaggggcaagttcagtcccggggctggcggttggcgggaccggctttagaggtgatgcgaccaccctggaccacgtgcagcggggagaaactgggcaccgtggggtggagggagcccccgctttatcctcggccactcccgagttcttgtcctccctcccgcacgcctggcccccagagccctgctcaaagtttggaaatgtcctgggggttgtaaaagttccaagaaaaggtcatcactatgtcagagaaccctatgggacctcggaggggtcccctctctcccttggtctgtgtagttgaaagttgcctgatgatccaagaaccgcagttctcaggatgcagtgcaggctgttgggatggatgctaatgatccctttggaatcctaaacttctgacaggtgaagagaagggccagaatcttcgtggagagtaaagagacacattgtcagcttctgcaagaagttggtttacttgaaaaagggggtgataaagagagatgtgtgtgagacatattccagaaaggatgtgtagcatccaaagaaaagtgactgcatttccccattggaaaagcactggggtttccgttgggctggtggcattggctagctgcctccttggggcagggtgagcaggttacagaggaccacgctaaggggtttcaacagtgtacagaacatcaaaagtctgcctttcactcccaatctacttttaagtacacagatgttataggtccataatatcttaccggaagaagagactttcttatctggttcaactctagatttgaaactcctcacccataatttacttgaaggcttaaatatctcaaaggacagggaaccttccattctgtgtggctgttcactccctttattgatgagcaacactgctgaaaagcatttccttctatctctctattgcttttgactcctggagttttacacaataaatctaatctcacttccacaactgagtccttcaaatattttgaaaatatttatcatggtctccctaagctaactttactcctggctaaatatcccttttattccccaagatgacagttccagtttccccccttaaccatactgttagctttccatgttcatgaagtatgcggttgagaacatggctcggtacttagtgctgtaatgagcatgcagaatggacagtatgcctttgttgatacagccttggattgagtttattttctggcagccaaatcacagtgttgactcacactacccttaaagtcaacaaaattcctcaataatttttcatatgtactgctacttagtcacgtctaaattcccctgtatttgtggagttaagtttactgtatccaagatgcttttttatgtatctttatgaaattccatcccatcagactcggtccatgatctagcctgttgagatgttttgtgatttggaacatggtcagtgtatcactctcttgctgtcttcctgctctatgcatatttgatcagcctgccatagttatcttcagacattgatagatctgtgaaaagggaacagctaagggcagactggggtaggatttgaatagaaggtggagtttccattcaaccatttgctattacaatga

SEQ ID NO: 317614 - DNA, 4001 bp, Homo sapiens
ccagaagttcaaggctgcagtgaaccgtgatcgtgccactacaccccagcctgggcaacagggcaagaccctgtctctaaaaaaagaaataaataaataaattaagaacaactgatgtaaacttttaaaattgcaaagttgagcagtggaatttaagaatctcttcaaagcagagaatccaactaatattgaaatatactgtcatttactttttcaaaaacagattatgcaagagtagaacattgtattttctaacttatccctcctttttggaggtgatacaaattttttgaaacatttttttttttctttacaaaaattgttttctctttgttgcccaggctggtctctaactcctggcctcaagtgatcccccagccttggcctcccaaagtgctggaatgacaggcatgacccactgtgacccaccaaaagcatacatatatttcagatgaatccattttaactcatggaaagaaactagcagtagaaacctctttctagcagcttgagatagaatggttcaaagtattaacatactttactattgctcaaatatcataggaagagttctcaattctaatgcaatatatatttttaaacataaaaacataccaacctaattcctatacttaagagtctcatgataaagttttattttttttaaagtcggatttttttactagacttatgcactaatacaacatgtttttctataaattagcacatttttagttctgttttatgttatgtttgttacgtcgcctgatagtcgaaaccagttgttctcaacctgctaccaaataccaacctggaaatatgccactatttaaaaagcccgaagaatagggttttgtttttcctttttaattgtttggtgttcaaactacatagtaaaccagttggcaaccattactgaacaaaaatagtttttcgtatgcatgagcaccattttccaacagaaaacacttaaccatttttaaggtactggaagtccatgcaagggttcacatatgcagtaaatatcctttcaatctggttgtatcacattgtttctgtgaaaggaagacctgatattgcagatctcacaattaaatggtaaaaatcaatgaaaaactgcacctgaggctcaaacactagccagatggcctttggttggaaaggtctcatctgcttcttaaatcccgccgtaactgtgaatgtttgcgatgccaccacatccccagtacaagagaactggagcatctctggctccttccataatcgaagggcttccagcgtagggcgtagggggagaggcccgaagccctggagacagcgcccgagggatggaggccgcgctcggctgcgctcaggtccgggtggctccgggagctgagaccccgcaggatgcagcgggggggggccagggcctgatcccctacccctgcgagccagggccgcctacgcccccactgcttcccacaggtaacgtccagccctctcctcccctatcccccgaaatatcccggttccgctccgctccgctcgccgcccgtgaccccgaccccgacccgtccgcgacggcgccctccccaggaggcagcggaggactagggccaggccgcccaccctggcggcggcggcggctcccggccaaggcggaccctggggaggacagcagctgggccgcggcctgtccctagggggagcgggcgcagggccgcgagtgggcagcgcctccgccccgcacgaacaaagcggccaggcgcgccgggccgaggcagcaccgcctctccgggagcgcggggggcggggaggatggcgggggtactcacctgagggccggcggagggcgcgggcgggacaggcccaggagacgggaccgcggcgggccggggctccgcgccgagggcgcacgggctacggggaaggggcgaccggcgcgacgtccgcggcggggcccgggagccccgcgccgcgggccgggggccggggcccgagctcgattctgcggccgcgaggtatgggaaccggtccgccgggccaggcagcggtgctaggcagcaggggcagcgacgccgccgcctttcccttctcctgcccccgtccctgctccgccgcgtcctcgtcctcgctgggtccccgccgccgccgcctcagcctcggcgctcctcgggtttcttctctccatcaaggccgggccgacccgcagggaccatcccggaaagtgaggggttgttgccgtttcccgcagctgttggtggccatctttaatcctcctcctcctcctgctttctccacctcccgctggctgtctgactgactgactggatcctcctctttcccctcctgctcctcctactgagccggccgcagaaattgcagccgctcagcttctaccccctcctgcctttccttcctctttccttacttccttcccttccctcggcttcccgctcttgcctcactctcagcggctgccttcgcccctgtctgcagacagcgccgctggatgctcccagctggacttcaaccccactcctctcagtccctctccccactgccttccagacgcgcctcttccccgccccgcgcccctctctcctctcccacccctgcccctctccgcggcgctcaccctcctcagtcccagtttctgaaaggactcagctgagaaaggacaactgggttccgctttccttaaccctacaccctttagctggatgctgtcagaggcgatggagaaacgcaaaggtgcgttaattttactctagccagagtataaaagaactgcccacgccagctattgtactacgcagcttcgaaactcctgcacgctctcctgtgtggctcccgtccgtgatgggactgtagttgaggagctcggtctcaaatggtgccttccgtcagtgaccttgagtcggttgcctaagattttagattttccttttccttcctgggaggggcattatttatacctttgcagtcccacaaacagtgtttagaccaaataagtatcctttagtaaacctagaactgccaagtgatcatcattttgcccgtttgttcctactcaacccagcagacaatttgggtcacgcttcagttctggcagtaaagacaaactgagtcagcagttaggagtggactcccttaaacaacagagttagagtggggaagtggtcataacatcgctgtaatcacaaacttgtttttcctaacactgcaatctacagaagtttcaggatttcctctaataaacataaggcaagttggatttgctgttttcttctttttgacgattttgcctttagagttggacccatttgtaatgatttactcgtcaattactccaagataacaaagttggaggtaacattgctaacaaacacaggtgatatatatgagcactttgtggggggggggtgtcacagtttttcttctgtggggcactggctattaaaaaaaaaaaacaccttgccctttcaaaataagactagtgtgttcaaaggttagtcccttaaacagaccaaatgtgggcagaaatgtttttaaatgtagttttagattctacttcaaaatgagtaatgttttgaaagttcaaatataagattttgtaattataacaatttaagagtttcaaatctctttgaaaagaatatgccaaaacaaacctaaaaatatattttagtaaaaataccggtatcctttggtggggggcggagcagaattctaatatttaatcctcacgaagtaaccttaattaactgttaggttcaagatttcagttgccatctttcaatgccaataatttttccatttgaaatcaacaacctatactaacatctacaactcttttaaacccaaataaagtatttgagacagcattgtacaatacgttttgaaataaattattaaaaacaaagcacctatgtgggggtgtgtgtgtgcatatgcatgtacatgtactttttttgttctttccctttggccttttggtgtttattctttatttagat

SEQ ID NO: 317615 - DNA, 4001 bp, Homo sapiens
gcttctcctttcacagagaaggaaactgagacccagagaccccttcattccctcagccagttgctggcctcctggagggcaagtgtgtccgatcaacagtcccaacctaccaagggaaatcaggctgactttaagttgacaacccttgtatgcctatggcatcaatcaaaacatacatctttgtgccagccgcccccactaagcacagcacaggagaaatcacccaatggccgggccggcacctccaactcccaccccaccaattccatcactcaggctgaggaagggaaaagcaaaatttaagcgtgtaacccaggaagggagggagactgacagactgggtcaccccaacaattacagaggaataacatgaatttgcaaggatttcccaaggagctggctctagaagccttttcagcctgggtaccggaggcttgcagagaatgattcatgggaaaacactgcttcctgtttttgctttggggcttagatccatggtggcagatctggctggcccagaggcccgggtgtttttccgggctctgccatactggaagaccagggtattaacagcgagttagctgagtgccattccattcagcaagggctcaaagtgcaccaggcaccgctgggcttgagggacgccagcagctcattcattccatctgcccagccagcaggcgaagcgagagtggtcatcatctcatcatctgttttacagacgagaaaactggggctcagagatgcccaaatcgccaatcttctcaaggtcacgcagcggccgaccgggtcagtctgatccctcaaatccggagcccttgcttttaaggaatgaactaatctaatctcccatccacgtactaaccaggcctgaccgtgcttagcttccaagatcagaggcgatccggcgctttcagggtgctatgaccgtagacagaaacgaactaagactcagtttcctcatcaagaaggagcagacaaggacctgggtgaatctgaggccggcttccggggctccgaggtgtggctcccggtagagggggcgtggcgccctcaccctccccgggccaatgggcaggaggtgagaagtggagaggaaggcgaattatcccatcccaaggtggctccggagcagaaccgcgcccggggtagggggtactcacgtcgatgttccttaggatgacgcactttccattggtgtacagaaaattgttgcccttagggtcgccgccgatgatcttggagacgcccctctccacctgcgggaggctggcgaacaccttctctgcggagacacaaatgcggcggggcatgtcagggcagggcggggacggcggggacagaagggagaaggagccccggaccggtctcggccggtcacctgttgactgcgccgggagggcggcctccactttccacgagcgccaggaaccgcgcgacttcctggtccgcgccccgggccaggcccttgggggcagcggggctcctccggctcggcccacggcgccaacttgggggcgcaccccccgtcgggggtcccgccctgcaccaccgagggcggccccgccacgcctccggccggcgcccgcacccctcccccgcgccgaggactcccccgccacccgcacggcgcctaggggccggggaccggggccggggcagcgcggcggccgctcgggggccccgcgccgcggcacttactgatctcgtacggcatcctcgcccacttgttaccgcgccgcgctcgccgagagcctccggggccggcccgcgctgcgaattacacctcgccgaggccgagcccggggactggagccggaaggcggcaccgggcgtgccgggagtggagtgggcggtccgaggccggggctcagaggccagctcgcgcctgccctgcgcgctgtggttgcggacgccccgaacccggaagcgcggtcccgcgcgcggctcgcccccagctttgaccatatatagtcaagcgctcggctcggcggctgcggtcccggcgagcctgcgcggacctggcgctcccctcccccgccggccccggccccgcctccgccttgctcgccccgccccggaagtgacgtatagcacgccccgcgggcccttgaaaaggcggcgcagacaagcagccgcgtcagaatgcttctgggagtcggggggtgggtgcctttctgttgctagcttgtaggagaagctgggctgtaggaagtttatttgcgggggggtcttaaagacgctgaaagtactggcgggctttggtgggggtctggaaaaacctctctgtacctgtgaccgcgttgcgtggcgggcgctccccggcctctcctttttgaccggtcccgggcgttgcccagccgccagtcctcctgctcgggttttgtaagcaggagagggatgctttttacgtcttcttaaagtacggttaagtgcccttgcttgaagtagttgctggcaacaagaacgtaggggttactctttgttgggcctgaactcgtgctttttctctcaaaagttgagcttttgaaaggcaaaaaaggcgtgggggatgggggagctgtcggtcttaaggaagttaaaggttatttcctaaacaaaacaagtctcactcctaaaaccagggtagtggctcagttgtggcgggagagcaggggctgtaaagtgtccaagtttctagtctcatctttcagtaggatgggtacaagctttccccttggggctctgggggctgggagggttgtaaaagtgggagaaagcaaagtatttggcggggtgcgggcgggtagctgaatgttgttgtaagtggaagaggaatgctgttggcgtctttctctaagcacggttaagtgctttttcttgaagtagttactggcaacaagaacgtaagggttactctttgttaggcctgaactcgtgctttttctcaaaagtttagcttttgaaaggcaaaagtgggggtgggggcgctgctgcttttaaggaagttaaaggttatttcctaagaaagcaaaacaagccccacttgtaaaacccgggtagtggctcagctggagagcaggcgctgtgaagtgtacaagtttctagtctcatctttcagtagaatgggtacaagctttccctcggggctctgggggtgggagggttgtaaaagtgggagaaagcaaagtacgtgggtggggggtagctaaatgttgttgtaagcgggagatggatgcttttggcgtctttaagcacggttaactgcccttgaagtagttgctggcaacaacgtaggggttactctgctgggcctgaacttgtgctgtttctctctctcaaaagttaaggtttttaaaaggcaaaggcgtggggagaggggtaggggagctgctacttctaaggacgttaagggttacttcagagcaaaacaagccccacttctaaaaccagggcagtggctcaattgtggaagggagagcagggaatgtgaagtgtccaagcttctagtctcgtctttcagtagcgtgggtacaagttttccattggggctctgggggctaggagggtggtaaaagtgggagaaaccaaagtacttgcgggtagctaaaaactctgaaacccacgctgtgagcggttcctgcttctctgaaaggtctgttctgcttaaggttgtatcaaggttagtctcttgctacctacttctgtagagcagtctctcgtggctcacctgggttagtggccatgttgcctgtctcctattcttcctaaccttgtgtgttctccaggtagctgagtgatccatccgaagtaaaatattcctcagcttgtctgtaggggctccaagtttcatgaagtaaaagctagtcttgaaaacggcccattagggtcctggatgacagtctccgggtcacttagactccgttgtccgcctcccctcatctgtatcatctttgccttgggtactggcttcggagggtgttttcctgaaactcttacctgagatctacttggctgactcc

SEQ ID NO: 317616 - DNA, 4001 bp, Homo sapiens
taaacttctccaagtaattaaaaaactgccactggccctgtccctcctttcccagactaaaggatacaagatagagtctgtagaaaacagcaacaacaaaagcaatctagccctagtctcccctctactgggagcattgtttttctggcctaaattaatttatggctttctaatctatggaattatttatgtgactaatgggtaacttaaaaatatttagaacaccactatttatcattagaaataagaagaataaagaatgttaaaactttcaagtaagcatatttaacgtcttcttcagatgtccacagttttttaagcagttctattaatatcaacacaagagaaagtcagaacaatgtaaacaataacattcaactagttatttttacataattacgtttgcagaactcaagagctttactttccgtatatgccctttgaaataagtcattgctttaaaacttcccaggaactctaaagctaccatttgtaacattaatctccaaacaatccagtaaaggatgtttcccaaaatattaacgaattgacaacttttcaaaagcacttaataactatatttaattttagatgataggaggggaaaggttctcagaccacctatctcagacgtctgccttcaaaacagttagatataactatatccattttcttgaacacttaggccagtgaggcagaatctcaaaaggatgtaagagtgctttctccacagagtttgtttcaccacccgcccagcatcagctcctggcaagcagggtaatgataaggcataaatctacaaataaattaatgcttaaactcttgtggagttcaaatttataaattctcataaattcattgtcatttattttctaatttttacaacgcagaaatgttattagagtgctaagaacggcaactataatctcacattgttgggctttggccgtttcgtatccttttacaacgaacttgtgtttttttgatagttttctctaaagggtatttatgaaagattcagaaatgtagtatctctcttcaaacccttgttaaatatatatagtatatatgtatatattaatatgcaaaataatttatttttgatgcatggtcggacttttcattacttttcattcgaatcaattgcttttaattaatatatttaaaaagtctccttaaattgtttgttcctttcaatctttgcaagcaaaacaagtctgattttggagaggggaggacagcaaagattctattttacgatctacttaataaatagtatacctgccttatatccaataccgtcttttttctggaacgcatttcctttttactcaaacctttcttagtacaaccctactaataagtccatcttcaaaggggtaaatgatctatacagaagtgtctggccggcggagggatgagaacagcaacctaggctctagacatatacttaatagccataaaaataaaacaatgtccctcgaaatgtccacagtttacactgcaatggtagtttagatacataaatattcgctgcttgctgtgccttgtaagaatcaggtgtgtggctctaaaactcagttgattatctcatcaggcaccatggtgtgcaaagccctgcaggacgtacattaccctggtccgcgatcacagggaggtcagagcccctctcgcatgacgccgcgacagttccagcatcacccacatcaatcctgagcttgccttggtatctctgcggccccaccggcttcttacctggaggaggaggcggctgcagcggcggacagcggaaggtgctgaagccggcgggcgcagctgcgaggcgagcaccaccaacgcgcggaccctccccgccctccccgcctgctcgctcagggcgcccgggggcggggcggccgggcccgcgggctccgaggggcgggaagcgtgctccgcaagccccagcgcggagccacgatggaaggcgccgcgagcccgatctccagggtctgccccagaggcccacgtgacagctacacaggtcgctgattggagcgcccgagagggggaggcggaagtggctcgtgacccttggagactaggctgagggagaagtggttacctggcaacagagaaagtgtgttgaaggcgcagctcctccgtactggagcgaggctttgggcagagggtttgcactgaggctgaaagtggaggaaaacggtgaaccatcagcgttctcaccacctaacacattttatagcgagtctgcactttctaggaaaatgagtcaaatatacagtaagtcagtcatcctgtctctttcttgagggacctggaggagggacttgaaccagtgcctggaatgtgagtgcagaatgctgtctcgcctgcacttcattattgtctgattgggcccaagaaggtctgtgggagagctcaatggataagattatttgtttatattaatcgagttgtatgtggttaatgtatctgccttcacaaaactgacattttccctgtgggatctggttgaatggaagtgctggatgttgtcattcctactggattcttcacatctctgaaatatcttcactacctgtggcctttatccaacacactagagagaataagcctcgacgtactcgaaacaaagtgtatttaatgacatctatcgagaattaattatactccactctaaatagttaataaatgaatggtcgacctcaaccagagaaagtccctgggcctaattcttaccttcctatgcagtagattttaatgctccttttttccaaaatattctctgcagagacgagtacctaccacagcactcaatattctatattgtaaattaaaattaacttaaatgttggatttccatataaagaataaacttgttaaagctaaaatcagttcttacaactccgtcccctatattctaacaaagtatctgatgaatagcaggtcttcaattaattcttgatggatagatggataaagaaagaaagaaattagcacataatctaccagagaaagtataagggcaataactaaatataactcaatgtgttaagtactaaaatagggttacataaaagtgctatgagatgatttcagatgagggaggcagaactttttcttccaaggtattcagagaagctttcaatatgattagtatttgagcagggacttataaataggtagaatttcacctgataaaaaggggaaagtgtatactatgcagcaggagcagcattgccaaaagcataaagtgggaaaaaataaacgattgatgtaaataaatttgatgtttttgccttctccggagttggggatgtgaatccaaagataagaaggaagatggaaattggcaaaagactgtactagaaaaataagaaaacttgattgggaaagatgcagaattctatatatgggttaggctttaacctctaaaccaaaggaagagattgaagtttataaaatcagtgctttttcatcaagaaagacaccttggaaacattggagatacatgggatgcaggaagatgaagaacatggtctgttaggagaaaaattcagtagttcatgggaaaagatgctgatgacctgagttaagacaatgaaaataagaatagcgaagagggaaaatcacaagaaacatttctgtgaaaacagactatagttttcatttatgactgatatttgctaggtatagtgctgaatagtcaatggtgtacatgaagagaaaatgctgaagatacaacgtctagcttagtccatcggttggacggaaaaaatcttttatgtttattttgctcataatggctccagctctccagttaagaaacaaaaaaccggccgggcgcggtgtttcactcccgtaatcccagcactttggaaggccgaggtgggcggatcacctgaagtcaggagtttgacggcagcgtggtggtgaaaccccgttcctactaaaatacaagatgagctgggcgtggtggcgggcacctgtacttccaggtcctc

SEQ ID NO: 317617 - DNA, 4001 bp, Homo sapiens
cgtcttgctctgtcgcccaggctctggagtgcagtggggcgatcttggctcactgcaacctccgcctcctgggttcaagcgattctcctgcctcagcctcccgaatagctgggattacaggcacacgctaccacgcccggctaattttaaaaatatttttggtagagacagggtttcaccatgttggccaggctggtgtcgaactcctgacctcaagtgatccacctgcctcggcgtcccaaagtgctgggattacaggcgtgagccaccgcaccctgtcccaatgagcattttacatgctaaagaagaaattcccctctattgaaagtagaggtgggctatgatcatgggacataaaagttttatagagcataaagaaactcatgaagaaagaatatttaaaagcatcttacttttgcaattttgtgaccatttcaccctggaactccttcatgcaagtgagaagtccttaaacttgaatttcattaccttcaatggctgacttgcctctagctgtgatttcatattattttttttcagtggagctctatagatgctccacataccgtgcagaggaaaaactgctagtttcacaaccaaaaaaccaagacttaaattttgtttgtagcttattagctgtagggctttaagtaagtcgtttaaattgcctccagcaaaaaattctcaactgtaaatcatgaataataactcttcacttctaatatttcataaattgtaaagagctttagaaataaaaatgggagttatgattactggtccgtcaattccaatttccacactaatagccacgaagaagcatgaggacatctaaaataattttaaaattgagccttccagccgggcgcggtggctcacgcctgtaatctcagcactttgggagcccgaggtcgggggatcatgaggtcaggagagtgacagcatcctggctaacacggtgaaaccccatctctactaaaaatacaaaaaattagctgggtgtggtggcacgcgcctgtagtcccagctactcggggggctgaggcaggagaatcgcttgaacccaggaggtggaggttgcagggagcagagattgcgccactgcactccagcctgggtaacagagcgagactcagtaaaaaaaaaaaaaaaaaaaagccttccatttctttgccagagcagagcaaggggggactgctctgataaatcagaaagtggggtgaacaagaagcccaagcctagaaaccgtgcgtgcagaggatgaggcacatgagcgtgagacctgagttttcgggtgcagatttcccgtcaataatgtacactcgctagcaggtgattggactggtcacaggtaatacattttgaagttattctttaggaggcttttcattctttttaaggcgctgggcagctgcgcggcttgccagaggcttagccccaagaaatgaggtagctcgtgacatcggacccagtcaacttcacagcgaccctccaaacgcgttaactcgaccagttctttccgcgtgcgaagctggggtatctttagatccagtccgctcatttcggccagggaggggttcccactttctgcaccgcttctacggcgtctgcagtccccaaaacgagaggcctctctctccgccctctcctctcctcctattttctttcctttctctcgtcccttcagcttcgcccccgctctctctggccacctctctctctctctctcttcctcatttccaacgaactcagaagggagagggacagatatcctcttttaaaagcgaccaagggccagtagtcgcgttttcccgccccaccccgggaatttgtaagttatttaccttcatctccacgctcgagccgctacgcgaactatgaagtacgcaggcgcacccggtctccaccaagcaggctaccgcgttcccgtcacccaggagaccgcgcgagcagcgaccaatcagcgagtgctaattgaaaggcggtgcctcgaggggccgggccaagcgcaccgccctctgcgagggtgggtgagaggcggagggtggaatcacatgacatcagagacgctaaccctgggaagttgggcgtcgcgaggccttgctgagcctcggcttcctggctggctctgattggatgagattcgtccgggagagacgggctctgtgagccctcaaaggcgcgtgcgtaaattttggaccgcgatgactaagatgtcagtgctggccaaagggggcgccgagaagctgaaggaaagaagacgcagaatgttagattaaaggaggcaggatgggctaaatactcctatacagtccacgcaaagaggggttggacgagctcgggtatatctttttttcttccaggtttctggggtagaagggaggaggcataagaggtacaatagtttatttcaaggtagggttgttggtgctttttttttttcagtttcaccaaaatcttttttttttttcaatgtcaacaaaatgtgctagctaacgtgggcaggaaaaatgagctccaatagttttcctttagagtttggatctggcagcttttccccaagtataaagccctgttgtacagtatttgtgctgcattatttatagcatgaaagtgcatcttttacccaagcgtctgaaagtgttgaaacagtctaccttttgcttttcttttcgacatcaggtaggaatctgattggcttagagaaagttaatcaatgatttgaaataactaataatgaatgtttgcaaattcttaagtagggtgctatgcctttgcactggggttttcagttacgttacgacaggggtccggatccagaccccaagagagggttcttggatcgcgcgcaagaaagaattcagggcgagttctcagtgctgagaaaagcaagtttattaaaacacgtaaagtggtgaaaggacagctactccatagacagagtaggacattcctgaaagcaagagaagggacgcatccaccctaggtacaatgcttgtatatatggggagatgtgctctgctacaagggtttgtgatcaaagattaattttcttaattattttgcaggaattgatattattatctttaaagcaaaattaggaatgcctttgttctccagatatcccgatatctgggtctgttttagtaaacattattaatttattcccttaatcgtaaacatctagaggcgaggaatgcccaaattctgagaattcagcccagcaagtctcagcctcattttcctagccctcactcaaaatggaatcgctctggttcaaacgcctctgacagttaggttaattacttaaatttttactgaaagattcctctgctgaaagggtaaccatttaaaaatagccagagcaatcagttcttaacaagacctgccctcaggagaaagtatttttaccaaagcctagtctgctggggttttatcagagcctaaactacctgggagaagggaaatactcaacttcagcctccataaaccatcctgttccacttaagtgtgggagattaagaagtattggcgggcgcctgtagtcccagctacgcgggaggctgaggccggagaacggcgtgaacccgggaggcggagcttgcagtgagcggagatcgcgccactgcactccagcctgggcgatagagcgagactccgtcaaaaaaaacagcaaaaagaagtattggtggccaggctcagtggctcacgcctgtaatctcagcacttggggagttcgaggtggggggctcacttgaggtcaggagttcaggaccagcctggccaacatggtgaaaccccgtctttactaaaatacaaaaaattagctgtgcatggtggtgggcacctgtagtcccagctgctcgggaggctgaggcaggggaatcgcttgaacccgggagggggaggttgcagtgagcctagatcgtgccactgcactccagcctggcgacagagcaaggcaagactctgctcaaaaaaaaaaaaaaaaaaaaaaaattagc

SEQ ID NO: 317618 - DNA, 4001 bp, Homo sapiens
cggctcctggctcgggaggcggacctgacccgatagcccagagggaagtggcagctgaagaaccagcagggctgcgtgcagccaggcccggatcgggaccagggaggagcctgggggtcgtccagggagaggcgagggtcctgaaccagggcaggcatccgagtgaggctcaggagccaggagagacccaactgggagtgaggaatgaagggcacagggggtggtctggtttgtggctggggctggctggctgtggtggtaccacttccggaagtagggaagtgggaggggaggggagccgtgtaggcataaagctcccgacctattatgattcttattgccaccgtcaaggatgggtgtttcgggtctgtctggcagtgcagacatctctgggggttgagactgagctgaggtcccctctgtgaccagccccagaagcctgtccagcactggtccgggatgggcaggggaggcctaagtcagagacgccctccatgctcttccatcctgggaaagaaggtgagatggggtctcccagccaacttttcctgtgtctgcgaagggaggacaaaccagcaggtagggaaaagaggctgaaatgtggagaagcctccctccaaatccctggttggatacaacggagaccccatgggaatcacagacccttggacacagaagtaaacaggtggcgacagtgacaaaggtggcctctgggcttcccgtgggctccctctcctgctgcagagaacaggcagccagcacatggggtacccagggcacagctccttgagtgatggatgctggcataagagaaagccctttacaaactgcaaagccctgggccaaatgccaggggtcactgtccaaggtgaggagagacggggctgcttctggagagatagggcagaggcctcacaccaggctctgccccatcagcttcgtggtcctgggctggcaccaaaccctgctgagcctcagcttcctggggtgtcaaacggggactataacttctccgcctaaggctactgagagggttaaatctgggtggtggggggttgcacaaatgcgacttccttggaattcataacatcatctgctaagtgggtgagaggccagggcgccatcacatccaaaagggctgggtaggattctccagaaagttttcgttgatcaaacaaaaagctaatgatccagagggtggagttcatacgaggcagggtccaggtgctgccactgaaacccctcaactctctactgaggggccccgagagagagaggaactgccacagcgctcctaagtgggctgtggggattcagaatgacccctaagctgcccctcgggcgggccgggtccccctgggggactgaaccccccttcccccccacaacacctcccgggggcccaggcgcgttccaacggccgggcgggcaccgagggcggccgtgggtcccgggaccgcgggggaggggcatgacggggcaactcgggggggatggcgcggggcgcggggagggggcctgcccgccggccgctccgcctctcgggcctgctgtcccgcccgcggcggggctccaggcgacagcgcgcgggggaccggggcgcgccccccgggtgacccgttcgggcccggaacaggggtcgccttgcgcgttgcagagcgggcgggacccccggccctccaacttcggggaccttgtcgggactttggggccagccacccatcagctcggaaggggaaactgaggcccgaagaggacagtgcctcagggctcttgcccgcctcctgcgcgctgcccacagccaccgcgccactgccccagcgccgaagtactcaccggcccgtgagtgggccgcacgcggcgctgcgacgccctggggcctctgggccggcagaaaagttgttcgggagcagctgaacgcggcgcaaacgggagatctgcggccgcgggggagcaatctgcactcgctgctgaagagccggctagcgcggccttctgcacgagggggcggggcaggggcggggccttcggcctccctccactccagacgcggccccccggatgcggcgccagctcggcctgctgagtggccggtgtagccgccaatcactccacatctccgccaatcacggtgcgcctcgcctagctgcggcccggcactccccctgcgtggttgggcccgaggggccagaaggcgggtccggctcgcccacagcgaaagtttccgagcggactcgggccccggccccgcccccgccccgcccgcggaacgtccagttgcttagcgaggccgctcgccttctcctgtaacaggtggtttggacccgtggaaaaggctccggccacctttcatccaccactccggcctcagcgtccccaactgcagattcattatatttgctgttgcaatattaacacacgtcttgagcgcctattccggcgctgcaagagagtctaagggctcccctaataacagcagcagagatggaaaaatggggcctgtttgaaacgagtgtctgcagccaagtactgctttcagtgcccagaatcaaatgcagtgtagcaagcttttcacacggtgactgtgggattcctttaaagtgtgtgttagcccagggagtgggcaaggctcaggcagtttggagactctgggagtttggttcctgtctgggaggcgtggtttggagatgagggcgagggtctatccttgagaggccctggggaacgtgagaccctgcctgctctgtctctggtccccacaaccaacctgagctacctgtcctagttatcacagcagaaactggggctcggagtgactgtcagagataatgcttaccaacatgttgggagcaaatattccagatggctttggagatgagttctgaacacactacttcggaggacttttgtcaaagcggcgtagttcatgtcagtcacctcatttgattctccagctgcccccactgcccacccccgatccccaatgttcacgtgtgaccctgtgaggctcacagaggaaggaagaacacctgccgtcagcctcgcctgctctgtccaggttggcttaggggctttcacagctttcaagggcccccctagtgacccaaggagggaggtggcactgagcccattttttattgatgtgaaaattgaggctcagacatagttatttgcccaaagtcttgaagatgtctttccaccttatcacacactaactgtagaaaatttggagaattactaaaagtagaaaggagaaaaaaaatcactcaaagatgatcactgttcacattgtgagatttatgcacatttaagaaaataataaatattaatgtgaacacacaatcacagagaggctgaagcacttcccaaaccctttgcaggggctcattaagcagagagaagaggacagattgaaaagttcctcctgtggaggtctaagggaagagaggaagtgcaacaaaaaatctacaagatggcttaaggagcctctatcagaacacagcaacactgaacatactccacggagctaagagactgaaaaagcaacaggcaaattcagaaagagaagagtggaggtgaggacaaatgagcaaactggaagataatgtggagtaaatgcttcatgatgtagaggaaaagcacatgaaaatcatcaggacaaaaagcagagactggaaagacagttccaggaggtgtattgcacaaaggacaggtactccaggaagagctggaggggaaacagaggtgagcaaagtgccaggagaacgtgtccctggaaatcccagatgccaaggataaagagacggtcttgcagagttccagaaagaacaggtcacatctaaggggagaaaagttgaagtggttcctaggggactttggagcaatgtccagggactctgatgataggatcaaggatccttaccatggctactacaggattcatctatgtggacaaaagagagaaaatatccactgtggcaagacagagaaaggacctcagt

SEQ ID NO: 317619 - DNA, 4001 bp, Homo sapiens
tatattagtttatatgttacatacgaatagatacgataaattgtccatcattctttcaaattctcagttaattacctcatactcttaaaataaaatctttactgttataatcagaggccagactctggtattaatgcagtcaggagaggacaatttttgtactgagatcagagctcttcacaaaagcttacacaaactcaaaattgtgcagtaagtcctcactctaccaaccatcagcccaaaactgaaggttgctgggtttgggtggctgagaaaatggaaggaaagaaaaggaaatgactcaaagtaatcgtgcttaaagcatgagtcctcttcatctccatttggcagtttagatttgaaccaccatcagttgtggggaatgagagcacacatcaagtacacaaggaaaggctgtgctcacagaacttgtttgctttatgttgttggcgttctgctctttaaaatattgttgttctcatcacatttaaatacgtaactagggcacttaaaacattttgggaaaattaaaaagtttaagtcccaagttcataaatgggatggctcctaagttattttccacgttgatatttgaaatacacaaaatagagtgaatataacccatgcgtgatgctggcgtttaactcatttaaaaatcaaggcttgaaagtctgtgaagcaggtgggtagcactgaagagctgctcctgagccaggcctgaactttatccaattagtcttgtcttcacagggtctgcgcgctctctctctctctctctctctctctctctctctctctctctctcacacacacacacacacacacacacacaaaatacacgttatctacctaaaaacgattaacgtcaccacatcagttttgatactatgtttccacttgaatgtcaaagcccatcgtgggcacagaaagattcgtgctgcaatgggtcctatacaataccctcatccattttatttctaccgaaacttaagaccagcattttttaaacgccgagattttaaaccacggttcctgtgagtggagcaaaaccagccattaagtcgccaggtcccatctcatgcactgaggcttcaaggactatcaatctgcatcctggggcgaggggaacatcccaggcggaggcccggacgccgagggcgcgcagccccccagcagggtacccacacccggctcacccccgcctccacctgccaagggccggaccgcggcccggcttcccgggggagcgtccgcgctgaccaacgcccgggcgccgcgagtgtcaacgccagacaccgcctgcaaacaaaaagcgaccctcggcccgacccctggccccggcgccggccccgggaccccaacctgcccctcccaccgcggccgccccggaccgggggcgccgcacaaaggccggcccgacccgctcggcgccgcgggaacaaaggcggccgcctcggccgggccgggcacaggtgcagccgcagggcccggccgggcccaacatggccgcgcccgcccgcccggccccgttagccgccgccgcccgcaggccgccgcccctcccctgcccggactcgtcccggcctccgcggtccgcccggtcctcccgccggccctcaggcctccgcggtcctcgcggtccccacgaccctctcaggccgcccggcctcccggtcccccagcccctgagccggcccctcaggcctcctcagtgcccccactcctcccggcgctcccgccccctcaggcctccgcggtcctccccgccgcccctcaggcctcccacagcccggcctcccggccccagccccggcggttggcggcccgcgactgttgggcgggcgccccagtgacctgcggtgcgtcgcatcctcggcgggcggctctccggagcggcaggctgggagggggccggggccgtgcggcggtagggcccaggcggggagggggcggcggcggcggcgggcgcagcgcggccaggccgaggctctcgcgcgcggcgccgaccccgcccccgcgcctcccgcccgccgccgccgccgcagccggggccgccgccgcctcgcagaagccgcgggaaaagtgcgcgccgctgattggctgccgcgctcgcggggcccgcggaccgggcttttcaaatccgcgccggggccgcgcacgggcggggcgggcaggcacgcggcgggtgggggccgcgcgggcgggcggggctggcagcgccgggagggccgggccgcgggccccgcgagccgcctcagagtagcgccgggcgcgcgccctgctcccgctactcggcggcgcgcacccggcccagacccggcgcccgcgggcgccgcgctcagtgacgtcacgatccgcgcccaatcaccgtccggagccggcgcccccgagccgtgggcgcgcggccgcggaggctggcgttgggcgcgcggcccgcccgcgcgggtccccaagctcctgtcccgtgagaggggcgcggggcctggggcccgcgggaggctgctagcggcgtccgcctcgcggagcggcagtgcggggacgggtggggaaaccgccgcagaggccccgccgtggcgggcccggagcctcagaacagacgtggcggagagggtcagacgccacgacggggcagggcagggcgtcgtgctcttcccgcctaacggccgcagggcgtgaacgagtcccccgggcgagggtccgacccggagctgggcgcggctgcgggaggaccgctcgcgaggggaggacgcctggtccaggggcgctaccccagcgccgctgcggtagagccgggcttcagggggtggcgcgggcgactgcgtgcggcacagggaggaggaggaagcggcgcgggcgagcggggaagtcagacgctgcaaaaagtgggcgggccgggcggttgaagccggtgtgatttgctgcccgccgcccatggaagttcggctcctgcctccaggtgctgccggagccggcggccttgggttttctgtcacgcaggttcagggagccgggaacaccttcggccttgagccttagtgtctgctcgagctttacaggcccagcttgagccctcgctgagaagcgggcccaggggagcctggcgagagtttggtcaaggagagctttgtgaaagtgcgctacccgggctatagaacgacacctcagcccaggtcctgcctccccggacccacctccagccaccaaggagtggccacagttcacctcctcttcctctcccgcgccgcctccgctgctgtcccttcacaggtgctgggcccctgtatgggttgagttgtggcccccccaaaaaaacaagggttgctgcaagacttactataaggctacagtaattgagacattgtggtactggtggaaaaatacacaaatagatccatgaacagaatagagaacccggatatagaccacataatggagtcagctgagcttgactctaggaaatggaatggagaaaagacagtcttttcgacaaatggtgctggaacaactggatgtccacatgcaaaaaaaaatcaggctagacacagactttacacccttaacaaaaattaattcaaaatggagccaaggccagtggctcacacctgtgagaagtgtgagccagcactgtgggaggccaaagtgaaaggattgcttgagcccaggagttggagaccagactgggcaacatagcaagacctcgtctctatcaccaaacaaataaatgaatttttaaaattacggccagtgccaggcatggtggctcacacctttaatacaagcactttggaaggccgagacaggtggatcgcctgaggtcaggagttcgagaccagcctggctaacatggtgaaaccccgtctctactaaaaaaaaatacaaaaattagccaggcatagtgacgggcatctgtaatcgcaactattcaggaggctgaggcaggagaatcacttgaacccgggaagtggaggttgcagtgagccgagatcatgccactgcactct

SEQ ID NO: 317620 - DNA, 4001 bp, Homo sapiens
aaaatcctctaccttcaaggagcttacattccaatgcagttctagttggagaggcttgggaggatgagggaaagacaacttcttcttttcatttttttttttttttttattgagacagggtcttcctctgttgcccaggctaaaatgcaatggtgccatcacagctcactgcatcctagaactcctgggcccaagcaatcctcccacctcagcctcccaattagctgggaatacaggcatgcaccaccacactggctaatttttgtattttttgtagagacggggtttcaccacattgcccaggctggtctcaaactcctggactcccaaagtggtaggattacaggttgagccacctcagccagccaacaaatttcaaagaggtgaaacattttccagagatgaaaggaaaattagatattctgaataaaagagcaccctatgttctgagcaaaataaatgaaaacaaatcatctagatacattgtattgaaatgacagaacatggaggacaaacagaaaatcttcaccaggcgtggtggctcacacctgtaatcccaccactttgggaggctgaagtgggaagatcactcgaggtcaggagtctgagaccagcctggccaacatagtaagacgccgtctctacaaaaaattttaaatttagccaggtacagtgacacacacctacagtcctagaagctagtcctagaagctactcctagcttcttcagaggctgagggaggaggatcacttaagcctaagaattcgaggctacagcaacctataagcatgccgctgtactgcagcctgggctacagagcaagactgtctgtcaatcaatcaagcaagcattaagggaaaataaatgcccacctcgtgccaccacaagtgtccagaattttatgcccaggtaaattatcattcaaacatgaggcaagggccgggtgcagtggctcacacctgcaattccaacactttgggaggacgaggcaggtagatcgcttgagctcagaagttcgagaccagcctgggcaacatggcgaaatcttgtctctgcaaaaaaatacaaaaatcagctgggtgcatgcccataatcccagctactggggaggctgtggcaggaggatcagttgagcctgggcagcagagattgcagagagccaagaaagcaccactgcactccagcctggggtacagagcaagaccttgtctcaaaacaaaacaaaaaaaaaaaaaaaacaaaaaacaaaaaaagaggcaaaatacatcttgcaatatgcaaagactgagagtttatttatttatttttttattgaaacggagtctctgtcgcccaggctggaactgtgccagtggcacaatctcagctcaccacagcctctgccgctgggttcaagtgattctcctgccttagcctcccgagtagctgagactacaggcatgcatcaccacgcctggctcatttttttgtacttttagtagagacggggtttcactatgttggccaggctggtctcgaactcctgacctcaggtgatctacccgtctcggactcccaaagtgctgggattggaggcatttaagccaccgagcctggcctgagagtttaatatgcatatctctttcacaaaagaaaggtgtaaaatcacaaggacaaagaacggaagggattagagttagagatgtcaaacctggggatgcggacttagaggaatcagattggtactggagaagtgctgttgtaggaagaagactaataacctaagaattcctcgtttataaatatttttcttcttaaaattacaaatgcaacatgaccattataaaaaagatgaaaatatttgagcactcaggtgaaaaataaaaatacagaggttaaaacaaaaattaccagttaagagttaccagtggttctaggacaggcacggtggctcatgcctgtaatcccagcactttgggaggctgaggcgagcggatcacaaggtcaggagttcaagaccactctggccaacatggtgaaacccgtccctactaaagatacaaaaaattagccaggcgtggtggtgcacgcctataatcccagctactcaggaggctgaggcaggagaatcgctcaaacccgaggcggaggttacaatgagccgagccgagatcaggccactacactccagcctgggcgacagggcaagactccgtctcaaaaaaaaaaagagttatcagtggttttctaagggggacaggaacagaggtgggaagagttaagcatcacattgctgttttttaaaataagtgcttaggaattatataactaattattcacatttcatggaatatatacagtattacctgacacgttaaggggctagggaggctgaacagcccctataggaccacatggaccttgggaggtctccaacatgaggggagggactccactctcagaagcagggggaaggctatggacaacaacagtcaccattcagaacccactcactcaggccgggtgtgggggctcacacctgtaatcccagcactttgggagaccaaggcaggaggatcgcttgagcccaggagttggagaccagactgggcaacatggtgatggcgagacccatctctaaaattaaaataaaaataaagaaataaaaataaagaaccactgagtcccacccaagttctccagcacttggaaatagagcaacaaacaaaatgccttccttattcttgaggtgctaatattctagaggagagaggcagaaaataggaagagtagatatgctaggaaaagagaaagcatagagggcaatggggaggcaggaagactattccttcctggactggggctgggtaagccctagtgtgcatttctggtgaggtttttcgttttttcgtttttgtttgtttttttttgtttttttttttttttgagatggagtctccctctgtcgcccaggctggagtgcaatggcgcgatctcggctcactgcaagctccgcctcccgtgttcacgccattctcctgcctcagcctgccgagtagctggaactacaggtgccgaccaccacgcccggctaatttttatttttgtatttttgatagagatggggtttcaccatgttagccaggatggtctcgatctcctcacctcgtgaactgcccgcctcagcctcccaaagtgctaggattacaggcatgagccaccgtgcccggttctctggggagctttaacacttcagacacagtaggcctcactgctccaaccttgcccactggcttagatgtcagctaaagcccactctgataattccgtgaatccaactgagcagaaggaggtctcaaccctaggacagcagtgagatattcaggacattccccagagccaggccgtgagacggaccaagctccaacccattcctccgggggcggaaaagactgaaatggaaaacccaagtttgcaaatatgatttacacatacctaaaataccctcattttctaatatatcacactagtctgcctgaaatatatttcagccctgctatcactgaatgatggtagaacctctgttctcatataaaacaattccacgtaggcggggcacagtggctcacacctgtaatctcagtactatgggaggccaaggcagaaggattgcttgagcccaagaactcgacatcagcctggacaacatggcaaaatcctgtctctacaaaacatacaaaacttagctgggcgtggtggcatgtgcctgtggtcttagctacgcgggaagctgaggtgggaagaccacttcagcctgtgaggtggagactgcagtgagccaagatcacgccactgcactccagcctgggtgacagagtgagaccttgtctcacaaaagaaaaaaaaggccgggcgtggtggcttacccctgtaatcccagcactttgggaggctgaggcaggtgatcacctgaggtcaggagttcgagaccagcctggccaacatggtgaaaccccgtctc

SEQ ID NO: 317621 - DNA, 4001 bp, Homo sapiens
tctcaaaacaaaacagctaggactctgacaacttgcacaggcctcttcccaagcaaaagcatgaggttcaatactgctgtgggcacttcaaaaaatctttgtaggctgggcatggtagctcatacctgtaactcgagcacttcaggaggcagaggtgggaggatcgtttgagcccaggggtttgagaccagcctgggcaacacagcaagaccctgtcctacaaaaaataaaaaattaactgggcatatagtggtgcacacctgtggtccaactactcaggagggtgaggtaggaggatcacctaagcctgggaggtcaaggctgttgtgagccatgatcacaccactgccctctagcctggacaacagagaccatctcaaaataaataaataaataaataaaatttaaaaacttcaccactgccattacatgagcgagaactaaacagctcctgagtaatcaaaaaacgtttttttaaccctcaaagctcttcattattttaacaatttcaaggagttacaactaaaaagcaacaccctatagaccaccagatgaacagagactgctgccccatcaagagttccttccttctgccaaagccatggccccttggttgtttcctatggcttatactcatccgagtgtcagggccatcccgagtgccacgtgaaggcgtggagacaccatcaccaggcagaatggagcagcaccaccacacctttccatcgcaagttaggataaggaaacactcattcgcttgtgttcagtgtgctgggctctgcactgggaaccaagaacaggaggcaaaagacacatccctaggcctcagggaggcaggccatctgctggaccacctggctgaggagacagtaagtggacactggaccacagggtaaggacagcgggagcacctctgcacagctctgcttcccactcatcagatggtgcagacttaagaagtcacactctagagcccagcctgtctccactgaccacatcaggctaaagaacaccttggagatgagatccatgaaaagagtgtagcctgacgttgtcaagcaagggctctgaaactggcagaaccacgttaagaaacaagctttgcctctttttagccatttgaatcttgaacacttagctcacctctctagacctctcaactggctcagcagccagctgagaactgaggaggcagtgccagggcatcctggagcccaccctccaacccaaagccagggctcaggcaagtggctggaagtaccaggcctgtcctcaccttctccgcccgccccagtactcgtgcaggtgccctcatagggtggccatgctcactgctcaaggtcacatgaccccttacacaacgtctcctaaatacctttttatctgaaggacttgagatcttagacacaagagctgcttcgacaaggccctgctccagcaaggagtcatattttatgctcctcttcctgttccttctcgccttgttttctggtttttgtccattttcttctgactgagacacatcagcagcactgtcaccacaaatggaagattcaaagagaggcttcccattcatgtatgttttggtgattttcagcttaatttctggagagccatttttgataggggtagtgttagggggtgtcccaatccctttcatttcctgggactcaaaacgcagtttggcatcgtgtgcgccgggttctccattaaacacccgggaagtaagatctttcagcttgtcggctggaataaagggcagggcgtcgtggccgttaaacttctgcatgaccccctcctgcaggctactggagagctgggctttgctgaggaacacagaacactcgcggttcacctcgcagctcggagtcttcccgttggcactgccgaggatttctggtgcctgcttcatctttatgcactttacaacactctgaacagaaaggggactctgcttgatgctaaattccatccagcccagatgcttccgttcttagaacactatggtattaaaaaaaagaaaaaagaaagaaaaagcaattacatttaaaacctaggataggtatgccaggacctctacagctttgtggggtctgattttctttgtaagcaatttatgatgtttttataataattcaggtcacagaaggcagttttagtatcacaaaaattacacggaatcacaaaatgataaagctgaaagaaaaaggaatcattttttaaaggaagaacatgaaagtcagtcaagacagcacactccagtcataccactaataatctacagtgtggccatggacacataacttaacttgccaatcatccctgaaacacagatttccacctgtccaccaacatatacttaaaagagctaatatgtgtgaggcagctggcataatgccaggcctatgcaaaaggacaacagggaatagcataaaagcaaaatcaacactaacaggaaaagagctcatcccaatccctcctgttacagctgaggtatcaggcagaggctcagaatgtgcccaagatgacctggtcagcaaagtctaaaaccagatattccaactccaagcacaggattagctccaggttgatgaaaataagaagcaaaaagccaagagtctccaagggtgaaagcaatcccagtcaggtctggctatgctcaacccagtattcttatctcagtccactaatcccctccgtgttcaggcctaaattaaacaagaaagaacacagcagtaaggtcacattttttagctactacctgaagattaactacttgagaacaacactgctgagccacaacacaggttactttgccagtgcaccacactggccagtgaggcccacgtgcagaaggggcagtttaggaaggtaactcgctgcagcatgctggtgtggggtcttccctgcaaagctacagtccctaatctgagacatctagtgaaggggccagagccccaaaacacagctaggaataagaaacaggtaggcacccgccccagctgggaaggcatctctcaggagtacaccatcacaagctccaacaacagccctctgagaagccagaaatcaatagcatcagacactagggaaaatctgagtacagtaaggaccagagatgcccgtggactagaacagcggttctcaaatggggaggattttgttccccagggacacttaacctcatctggaagcattttttattaccaccactagggggcggaccctgacctctgatgggttgcggtcatggatgctgctgcatctcctgcaacgcacaggatgcccgcgcaacagggctatgcggcccgagatgtccacagtactgaggtggaggacacctgacgtgcagcaatagggggctgctggtgtctgcaacccgcagtctccacagaaaagcagacagctgaggaaggagacaggaaaaaaagagcaaatgtaaaaccttgaaaaaatgttgaagtcccagttcagcttcatgtgctctggacaactctttaacaccaaaacacatacaaatgtgttctgtctgacccgcacaatttcttaaaaaggtagatcaaagtcagttcctcttccagctcatatcataccaactgtcccaaggtaaaaactataaccctggacaaaacataaaaaaccacctcctgaaggaactgagagcaaccaaaagcagagagaaaatggacggaaccaactgttgaaagaaagggaacagcactgggtgaactccattttgaaatgtgtgactgaggagagtttgaagcaactgtaacaactataaaatgaggggggaaatctcaaggagagagtctcagaggggagtcccaaattctgcctataaactctgcccaaattccaggctgattccaagcagcctagtttatgaaataactgaaaagagattccagctgctggacaaaaaaaaaaaaaaaagtgtgttttttgttttttgtttttttttttttagacggagtctcgctctgtcacccaggttggac

SEQ ID NO: 317622 - DNA, 4001 bp, Homo sapiens
agtcatataatttcactccactttctatttactttacccagacattacatattcttgtaatcctttccggtaaacacaactgagataatatagtaaagcatgtaaaccgaagaagagaacctagaatgcctaaatatttcaagaatttattgttatttcaattacctgaaactccaagtatcagaaagcagaaagaattaccacacaactgtaaaagtcaaatatttatacaggtgccttaaaagccgcagttgggtgcacaccatcagcactgacatttactatctgttaagtagtttcaaagtgcaatagcataagtcaaataactggcttggagcgtgaagtttatgacaacaactagcacgtctggagacactgggaaggtgtgatgcctgtcacaattttcatcaggccagcaacaggcagccaggctgcggcaagaccgaacctcagcacaggtgccttttctcatttcaggagggaaacctaggcccgtagcttcacggataattgaacaaggattgttccataaatttataatgttatttataactttcttgtaattgccttttagtagctttcaaaaacaacatttttagggcaaaagtaactgagattataaagtagttaggtatttcagcttcaaattgagaaaagggaaaatgttaaataggagaagcacctaaaaagtatataaagcccaaagggccacattcaataaagttataattttcagaaatgacaaaagtccaaatgtcgaagttatccctggtggcacgttatttaaatttacaattaggaatatctccttaatggataatttacaaatttataattaggaatacctcctattattcttacaataattctaagaaattttaagggtaaaaaaaatatgggacacagaaacatttgtgaaccttcagttcctgaaccaatttaaaaaacaaaaaacaaagaaaccaggctaagctcaaatcagagtgcctcaatacccaacgttaatttcactacatctcccttccaaacacaatatgcctgttcccgatctgggagtcggttcaagttttcaggtgaagactaacgacagacagcgaaacccccaaacgcgcgtttttaaactctgaggggcaaagtcagtcacacccactagcagggcccggcggggggcgggagccccttcccagctcgggacctccggccagtctgggcgcccccgccaagagctcgcagcccaggctcccgcgccaaggacggcctgagggatgccacaggtggcccggagggctcgttccccaactggcagtgaggccctagcccacccccgccgcccagaggccgaaggtgtcctgcagcctccacgtgggcacctcgaagcctagggaagttcctaacagggctcaggtggcccctcgggtccgttagcctggcgcgcggcgtcggcccggggcagcgactccagccttgcctcggggccgggtccccggaggggcgtcgggaagccggtgggcggaggagcccgggtacgggcggctcctcggccccgccggagcagccagccccacatccctcccgggacccctcggggcaccgcgggccggcgccgccccagccccccgcgcggccgggtctccgggacaacagccgccgtgtccgaacgggcccgcgcccccgcggccggcgcccacctgtcccgggggtcgatccagctggtcctcctggtgttgtggtcaatgtagaagaccttgccgtcgtagtccctggcctcctcccagccccggggcagcggcagctgaccgctcccggccctcctaggcatggtcggcggcctcgccggcgagcggcgcctccataggtaccgggcgcgggacgcggcgggaacgcggctgccgggctaggctgccaacccgcgacgcgggcgccggcgaggggctgaggggcgcagggcgcggggcgcggcggaaccacgcgcgggaggtgcctcaggaaacgctgttcgcggccccgctgcggatcagtccaccatgtctgcgtcggagccggcgagcgaaccctcctccccctcgccgccgctgcctccgcctcttcctcctcctccgccccgtccccctctggccgccgagggtcgcggcgcccaggctgccggagccgccgccgtctgggctcggatccgggaagctgcggcgctgccgcggcagcggcgggcccctcatttgcatgcgattagcatgcgcccgcccgcctcatctgcatgcgcattcctcgcgccgcattcctgagcttaaccccgccgctgccggcgtcgccgcaccagctcggacgcactgccccgcggggccgcggctccaggtgggaggaaggcgggcgaaggaatgtgcggccagctccctccccttgaccccagatagctcccctgggccaaacgccgagaggttttagagtttctggacggggaagattgcaaaagtctccgcaaccttctcaacctctttcgtcttctagggaaaccacaaaactttcgagaggaaaggggtggcgggcggggagctctcctccggagaaaaaacctcaacaagcggagagggcacaaaggctccccacgccgcgccccgagcccctccggcaccccaagggcggtccggggtggtgggaaagcgccaagccctgggagtgcgtcggtgggtccgggacggcggggcctccgccagggctcctggccctcgatgacctcggctgagaccgcgagccgcgcggcggaaagcggaggaactcccgtccggccctgtagccgcccgcaccgcgccccgtcacccgccgccccttcgcgtccgggcgctccagccgcggggccccggaagctcctggtccctggcctcccctgcttggttcggggcggttggccgtggacgcgccccgactctagtcccttccgtccagccgcccgccccaggatgtccccccaccgcagccccgccgtggccaggaggtgtgggcggccacgccggagggacccacggcggcgccggacgcccgcccttcctaggccctggcccggccggggtgggccgggacgttccctgttgcataggcatttatttattcagcagctactacgtacgtgctggcccgcactgccgagggaccggacgcctgccccaggcgggacaatgccgggtgcagcgctggcggggcctggacgccaagcttcagggtccccagcccctcagtcagagggggcgcctcccaggccctggactcctctccagccgggtctacaccaccgtcccccgtcatcttcttctgggttactgagcagcttcttttaaaatagcaacaccgaggaaggccccgaagcccagtcttgcacctcgtggtgtgaagtcgtttaatcctgcccgctaatgcgtaaggactttccaccgtgtgcaggactccgcgctgggcaggggctctcgcagggtttgaaccgacctccgcctcccctgcgggttcacaggcctgcgaggaagtcgcgtgaaggagattcgctactgtgtgaggctggcctgcgcggcgtgggcagtagctgtccggggctggggacagctttcggctccccaggccatcccgtcggggcatctgcggccaatctcgaaggtggagaggctcagggttggaacagacttcacggaaggggtcctagaagaggaaaggggtcgtgtttgcccttagagcagtctgggcgtgaagcggaaactttaaaccaccagaaactctggagagcttggagcacctgggaaggagcaaccagagtgggccggaggtagggaaggaaggcacccacggcgaatttgcccgctttgaccgcatttagggcggccgcttgtgcagccagccttctggaaggtaggctttgcgcttggtgaagagaagcccccacctccggatctgtgttccgccccagtccattcatcaggaggtgatcacacaagtcaagcttctctagttcccggtggaatgag

SEQ ID NO: 317623 - DNA, 4001 bp, Homo sapiens
ggtggcacacgcctataatcctagctacatgcgaggctgaggcacagaatcgcttgaacccaggaggcagagacagcagtgagccaagattgcaccactgcactccactgcactccagccttacaaaagcaattgacactttgttgcctaaagttacttaagtatactgtattttgttaattagttgctttcttggattttttttgtgggtctagtttagagggcaagaaagatcagacccttcaactttcataataactacaatatattgaatttttacaatatgtgggtgacagagtgagactctgtcaaaaaaaaaaaaagaaaaatattaagtacttactttctagatccataaagatttccataggcattagagtcattaccactctgctcctggttatcaatagtaaaattagattggtaaaaatcagagtcaaattgtgccaagtttgacatcctgaaaaataagagtatgtttttaataagttcatgagtcaataaaacttagtttgagatatttacaaacatcaaatgacaatgtgattatggctgaattcctatcagaaaaaaagatgtcctttgaatggggtcaataaagtattgggggaagggtatagaaatatatgctagaaagttatttacagaatgtgttatcttcaactactttttctgaagttttcgcaccctggactgtggcttttaataacttgactttaattcatctgaaagaactaatcttctccaaatatcttattcttagtaatttaagagaaaaagcttaaaacttaggacacatctagaaggatttccctaaaacgatgttcttcattttaagcaggcgcacacacatgcgcgcgcgcgcgcacacacacacacacacacacacacttgtaccaaggattattatctgcaaatggctgataataataatactccttcccaaagcaaaaccaaaaccctacaaacccatttccttgttctacttggcaattcttaaaaagtgtttggaatattttcgtttttcttttgctctggatactgcacctgggcttctggctgagtcagagagaaaaagactcaatcctgctaagggaagtctttgttctatacattctctctatagtttccactcacttctaggagtaaagaggaatgattgtttttgaattagacctaatggccaggaataccagagggaaaaataaagaactgagagaaggaagaggtatgggagaagaggacattagagaggtaatagtggctctttggataaaaagtagagaatagagaagcgactcttttcaactggacaaatgtggttattcaactcaacatttaattctttatttttctttgaaaaccttgttattttaaaagagtggatttaaaaatcaccaggagtaatccatatgcttataataatctatggaatactacttataaaaatatcaaatgaaattgcataaacagcctcaactctaaaggcatcattaatcagaaatattcaagtaacagttgtcaaatatatcaaatttgttcagttcaatgaaaacacaaaaagcttctctaaaattagatgcagcgattcatacatctgatgcaataaatcaagatttttcattagtaatgtgtataaaagtagctatgaattatgtaaactgaaatcaggacttagtgataaatcttttaacaatttataatttaaagaaattacaatgtaatagcataactttctcaacacatgaaaatatggtattataaagcatagagagtaatttattgagaatacactaaattttcataacatgcaaagctttatgtaacatgactattggtactacagtccttacataaccgagctttgtattttgtttaaatgccaagtcttttagaaggatcagacacatacctctgtttattttttatagaaagatcctccagtaaatgtagctttgtgtgagaaattttaagcaaatccattggtgaaaagatgacatgctggctatatatatacctttctaaatttgtattctgacaccctgagcagatgctacagtcaaaaataaaaaagcctgccaaaagccaaatacagtatcttataacacttattatggtttacaaacacagtgaacagtgttacagacttacaatttgataatatggaaattgtggaaagataaatacaattcccttttgtacatatctattaaactctgaggtaagatcatttatttgaggcaagcagttaaaaagtaagaggcctcaatgtcccttccatttcatggatttcctaataatatgcagtaaaaatcaaaatatggcacatgatcttatgtagaagatctcagcaccaaaatgaaaatgagttgtggtcaattttatctaaatcagagctattctatttatatgagcaatatttaagaagactaattacagtctgcctctgacttttttcctgcttcctacttttccagcagaggccaagatggatatgctaatgggatctagtgcttcttacctgatggacaggttctataccattatcgagccaatcctaaccactggaaggtgttaggcccatccccacctcaggaagctccctgaattggcccttctctgtatcactgggtcactgctgggagcctactttctggttctgacccaggtaacctagctaatactatcaattctatctagatctggtgttctcatccctaatattaatctcacagttggaagtcaagtcccctgtggtttgcttcatgctgattctcttttctaggacttaagacttcccatgtatccaaatctcagtaactgaaattttctgtccaaaggcagataatttggcacttaagaatcttcaactggagccaacagcagaatgctggagtaatttttttccacattgtttaaaagcatttgaaatttgaatgtctttaatcacagctgcccttcttacatcactagtcaggcaacaattggtcacacattttatcaaggacatactgttgagttccacactctgttgtagatgccagggtttcagaaacaagcaaactaaacatttaaagagttacatcttagtactgattttgctacacctacaactaataataatgaataactgggcattgttctacaaactttaagtcatttaatttttgtaacaacctgatgaagtattattatcccattttaccaaaaaataaatggagattgaataattttcccaaggtcattagctagtaggtgaaaaagccaatgtttgaaagctgactgagttcagaactcacattatccaagataatttcaggaattatacaatagaatatactgttaagatggagagtgcaaaggggagaggatttgaatactcagggaaggcttcttaagagggtcatttggatagagatctgatggatgataatgaagaagtcgctttacagactacgtgaagaacatttcaagcaaagactttcagatggcaaggagttttgtggtttctggtttagaaataaaaagccaatgttgctagggatttttgaattagagaaaagttgaaggagatgaggtcagaggtatgaacagaggctggaccaaaaaggagcctgtaggccgtggtaaagagtctaaaggttacataattgaaatgaaatgtcattctagggtagtataaaatgtgatgattccgtattagtcacaagtggaagagggagactggttaggaagagaaagttacaataacacaggcatgagatgtgagtggcctgaactagggtagcagtggaaggagaactggtacaaaagtcatggcaactgaggaaaagatgaattacaggggtcaatactgaagcagtagtatcagtaaaaagaaaattcagtccaggaaaatgatgagttatatgaactgaggaagggccaaccaataggtagagtactgaacaaatacagaagatatttgggaaagatttaataggattcagtttctattgaat

SEQ ID NO: 317624 - DNA, 4001 bp, Homo sapiens
tgtatttggactgcattatcatcactaaatcatttctaaagcaaaacttttaaaatcatctacttttcttcttcaatgtgcattactgcgtctactctattaacgacttgtaaatattttcatcttagacaacgaattcttgagaagtactgaattttactcatttttgtgtttggttcatttcgcccaccacaaccactacagactcccatatccacagttcataaattagaaagacaatcagatgtttgctgaatacttactaattaagatcatgtattttaataactgagttaactaattaaaagcattttcctttactcactaacaccatacaatcctatgttcccattacttctggatttctcaaaaaaaaaaaaaaaaaaggcccagggagattttttagcatttagtttaaggatggaacattaaactgctataacctaatcaaagaactactttaggataagggcagtatcttaaaagtattcccacccattccactttcccagcttgtccctaacctagggcagttcattgaagcatgaagactctcctgatgcagaaaccagaaaaattaagaaaaaaggattacacgcctaatgtaacttgactctagagcccacttaacaacccccgacaaaaaaaccccaaatcaattaggcacacagaagagatgtgtgagacacagagcagcgaccgtgtcatatttttaactataatctttccaagactattatgttaatcttagggttgaaaaagatcttaaagcagcatttaatctagaccactctccagagagacactgatctaggacctacattaatatctctagggcttgggaacttagtattactatctttccattacagcaacgtcagttctctctacatttcactgaaatttatccctccaactctctgtaacttgcattcatttgtttctgactgtaccctctgggagctacacacggtttttctaacataatagcacccaggatttctttgccagcctaagtcacacagtcatctttccaaactaagtattcctttttccaagtactatgtttttccaaaataagtattcgaggaacaaaacgggtaattcactttgcctatttaacaggaacagccagaagttatttgcagatatttctcaagattaataacctgccagtgccacttcctaaacttgctcacttaccacaccaccagtgttgatcgcggcattaggggttttcaaattttagcctaacagaaatggttgtcctgaaaatacgcgttacatccgcatgatcctaccaggaaataaacctaggagcttgcaactcagaaagggcccctctcagcccaagacagctaaacggaaagtcaagcgtgaaatccgcatcaaagaaaaaccctactgagatgaagtgctaggccatatggagactgaggacgaaagggcaggcctggtctccgccagagtctaagtgtctcggtgggggccaccggctcctcgcgaggccagctaacctccccaacccccaccccccacccccaacgacgaccactgctccatcaccccactcccgggccccagcctcgcctcggcccgtcatctttctccgcactaacctttctcctcccgactgtcagccgccatggctccccttcggtttccgccgctgccaccgccgccgccgcttagacgcgactcgcgcgggcgccgcagccgcggcagaagcacgggcccgtccgtcagtccgtctgcccggatacgcgcgtcgcacttggcctcttaacactcagccttctcgactcttcccgctttttccctttctcccttcctttcactccagcatccagcggcctaggcccagccttctcgttagggctcagactcgggctaggtatgggggagggaagggaaacagatggcgacggcgggcggcgctaaaatggagcctgcttcctgcgcgaaacaatcccgctcccgaaatgccctgcgctgtttacgcttcgttcctctctgggaacgtcacagtgcggagaggggcggggaggcggggacgtgcaaaggaacgtgacgtgacgtcagcgcgtcgccctgccgccctcagcccactggtacctggaaggagtcttattcagggattaggttacccaggttgttcatggagttcccgctgtacggcctataactggatggcgcaattttcccacctgaaactcttagtgcagggcctaacaggccttcttagctagagtcgctctaaaggactcctgattcagttcgggtaatcggagtcttatttaggacaagtctgggtgaatcccttatgtttaccagatgtactttcttagttggagttccactcttacccaaaggcagtgcagcatgcaaccagcttgtttgtagtcacaaaagcctgctagtttttgtttgttttgagacggagtctcgctctgtcgctaggttggagtgcagcagcgcgatctcggctcaccgcaacctccgcctcccaggttcaagcgattctcctggctctgcctcctgagtagctgggactacaggcgcccgccaccacgcccagttaatttttttatttttagtagagacgggatttcaccatgttggccaggatgaagtgctgggattacaggcgtgagctaccacgcccggcctagttttgtttttaattggggaaagaattgtatcataataggtctttgtaattaataactaatttaaacatgttatcaaggccctggggcacaaaattgatttaagcagaccatcgaggaatcgaaactacagaataaatgaccagtagatacataactacatagtgtggtaaaatctgcaagagaaacttgcttaagattcattgtccaacggaaacaatctaattttgcttccttgaactataactgagttataagggaaagaaaaatctgaaaaaggtaactaagtaacttcgtgatatgaagacaaactggcaaactaactgcatattcagggaaagacaagtagtctagaagtctagaatgtggtacctctttttttttgagacgtggtctcactgtgacacaggctggagtgcagtggtgtgatcatggctcactgcaaccttgggctcaagtgatcctcccaccttaacctcccaggtagctggaactacaggcatgctccaccacatccgacacattttttgcattttttgtggagatataccatctccgcaagatggctaacacctagccatcttgcccaggctagtgtctaaatcctgggctccagcaatcctcccacctcggcctcccaaagtgcgggattacaggtgtgaagccaccaggagtggccccatttctaggaccttaattgaacactaatttgaatatacgaacacgcacacgccacaaacacacacacacacacacattaaataatatctgatgatcctgaggaattgctatttgtatttttagttttaataagttttgctttttaaagaatttcttataatttcatgattcatatgaaaatatttgcaggccagatgcagtggctcatacctgtaatcccagcacttcgggaggcccaggcgggcggatcacctgtggtcaggagtttgagaccagcctgaccaatatggtgaaaccccgtctctgctaaaaatacaaaaattagccaggcatgatggcatgcgcctgtagtcccagctactcgggaggctaaggcagaattgcttgaacccgggaggcggaggttgcagtgagctgagattgtgccactttcaccccaaccaggacaacagagctagactctgtctcaaaataataataagaatagtaataaatatttgcaaatgaaattatatggtatctgggatttatcaaactggtggcaggtgtagcgaaatgggtaggagaatagattaaacaagtctacccatgagttaacaattgttgaagctgggcgatacatatgtgaaaggaaaatctccccaacatcac

SEQ ID NO: 317625 - DNA, 4001 bp, Homo sapiens
ttcccttcttccctcccagtaagcaagcagttatgcacacgtttttagagttagcctttcagaattggaaggaactctggggagcacttaattcagtctgctcacctgtgagactgcgctaagtccaggaaggttatgactggcctaagatcacacacagctcctgcacagccacgctgggaagccctggcctctcgattcactcctcgcacaatcagcctaccgccaccaaccccgcccctcaaaaggaataccagcctgtggtggccgtggaagagaccgcgagggactccctcgggcttcttaccacctcttgtgcctttccacttctgctaggtcacaactgccctctgcgtgccccagccctttaaagtttcagcctgctgccctcgggcagcaacactgagcagtccaaatgctttcgcagtattggatttctgagttgggggtgcttcttaaaagcaaagcaaattcctaggaaggggcattttaggagctccagctttccaatagcctggaagctcgtaaaggagaaatcagaattgctgaccagaatcccagcagttgaagggtttttgccacatccagtgcggaaatgggagagagggatccttgggaatcgactctccagccggcaagtgctccgaagttcagttgtgcctactgataggtaatccaaccgtgcggtcagggctggcctatgcgcccactgcgcgaggtttacagtgcaaatatgtgggttataagaacgtcccaagggcgtcgccctggccagcccgtggagcagccgccacgagtaagtctggatgtcggggacatgagactgtgctgtcaaggaagacacctatcgcggtcattggctgtctcggaaatacggaagtagcccacgcttagggaagcgccgcacctccgagtgcccgaagcagtcacagggccaggcccaaggaagacacccgcacccccgggctcccctgtgccctgaccgccctaggctttacctggaagcgcagccgctccttgcccagctccgggctccgtggcgacggcccctctcccgcgacggccgcctcccgtccgtcgccgccgtctcgggccctccccgccgacggaggttgccccgggctccttagcgccgaccgcggagccgcctcgccctcctgggcctctcgcggcggcagctcgggaccgtcggccggctgctcccagctcgctcggactgcggcctgggcctcgccgtcgtcgtcggactgcggccgccggggcgccttcttcgtccacacctccccctcctctgggccttgaagccgcgcgggcggcggccccctctctccgtccgacgccccggacctctgctcgcccgccgcgggcccgggcccctccaggaaggcggtgagacggcgcaaggccaggggcgagtacacggcgacggtgcgcgggaagcgcatgggccgcggggcgccgttctgggggctgccctgctccaggcctcgacgggatggctgctgggagaaagagccgccacccgtggtgccctcggccccggggccggccggggactcggggtcgcgggcccggcgctgcagcgtgcgcctccccagcgagcactgtaccgcggcgtcgatgcgcgggctcacctgcaccgccacgtcgcagctgccggccctgcgggcgcgcggcccgagacccggccccacctgcgccaggagagccatgagccgctcccgctggtagctgtcgaagtactcggcggccgtcagccgcccgcagcccgggaaggacaacgaggccgcgcccgccgagcagggggaggaggcgggaaggcagcccctgccgcgctgctgccagctgccgcccgccgcgcccttgcccttggtggccgcggggtatgggtaccggtacgagcagggggggcacgccgggaacacgtaaccgtccagcacctcgtcccccagggccgccatgggcgcactgctcccgcccgccgccgcaccctaaataggcgacttgcccgggcggccgagcggaggcggggatggccctcggcgggggctcgcacgctgcaccgccctccacgcccttcctgccaccggcccgcgtccccgccgagggggcccctcttcgtccttctccctacagaaactctccacgcccggatgttggcacaatgacccttagatgatctggaaagagggctttctttgtgatgaaagggctgatccgtaagggaaccaaggcgcccgaggtgaggaggatttcaatgagagaaactcatcaccggcatcagctgagccggcttctcccggtgccctgattgttccaggtgcctgcgcatcccccccacccccgctccctcaccgggaagccgaggccaggccgggtgcctctggctaagtgagcgaaagtgccaaggtttgggaactgttctgggtctattacccgttaactcagatgataagtttattctcagagctgctctaagaggctacccactgagccccctcggcgagtgcatggagaaccacccagggatcttcatctaggcgaattgttttctcccctggagcgtgtcccttcccccagtcccagtggtgaccgggaggtaccgttttgttctgctccagagcggttctgaaaaatttcccaaccaaatcattcctacaaaagataaattgatttggggtgtgtttacataaatgcagaagaccagtcgaaaagaacatggcttgtccactagaaaaatgttgattattcattaataagtagataccagatcaagtaatcaaatacattaatgtaacttttctctgatactggtttgacaaatactatatttccttatttaactgacctgttttggaattcttctgaatacaggtcaaaattcaacattgtgaggaattttaagtagagcaagcacacttttttttttacaacaattacattaaactcaattatgctttacaaagatagcttgtttttcctcatagtgcgccaaaattctacatttccaagaccctgttttctaatagattctgtatttgcaacagtcatagaaattggtgatggtaaaaactaaaaaccacatttaattcaggcttcacgttagccattccaggtgcaaattatattacagcattgatttgtaatttgtgacaacgtttggttaatacaccagtgaaccttaaaaagatcagaattgttacatgtatgatgtgaaccagtgttatcttttatgttaaccatgtgcactaccacaggctataaatatgaagcaatatttcagcaagatagaagctcctgtgtatctccacatttagagagaagtctgagcggtttccatcattattatattttctgctttcactgtgccataggaagtgtctgccatttcctcttcttttagttttttataagaaatatctgtatcttcatcttcatctagaggatctcgcttgtgcaacatttcacttccatacattttatagattaaaacaaaaatccccgcttctgcagactggaaaagtgcatacagcaaaggaaacatgtacatgcttcctatgaattgcggtggaaaggccagttttagaatggctgtacagagctgcacattctgactacctgtttccagacatacagtcctcttgcagttgggtggaagatggaagagagtagctaaaccataacctgaagcgtagcctgccaaaggcataaaaattgctatcacataaacagctgcagggatacttgccagcagttcaggtcctaacatagtgccggtcattatgaaaaggaccaccagagtcactagcagagaccacagggaaacctagtaatagaaaattacaatgagatggttgaagatgaactcaggcgagagaatcctaagctcacggaagaaaacacccatctagtatgctctccaacacaaaatggagacctttgacagaatatttctgaagatgggcaggccacctcttcaggaagcatccagagccacattg

SEQ ID NO: 317626 - DNA, 4001 bp, Homo sapiens
gcgattcttctgcctcagcctcccgagtagctgggattacaggcatgcaccaccacacccagctaatttttgtatttttagtaaggacgaggggtgggggtctcaccatgttggccaggctggtgtcaaactcctgacctcaaatgatccactcgcctcagcctcccaaagtgctgggattacaggcatgcgccaccacacccgcctaattttggtactcttagtagagatggggtttacagggtttcaccatgttggccaggctggtctctatctcttgacctcaggagctgcctgcctcggcctcccaaagcgctgggattacaggcgtgagccaccgcacccagccctgtaccaaagttattaaatggaggaagcagaaattaatttgggagggagggtcagggaaaacttcctggaagacacatctatgctgaaatgtgagttaagtttgccagactaaaaaaatgagagggctcactttctttgagtattcaggaggacaaacaaacaaacaacaacaaccaaacccaaaaacagtacgagagcacaaacaagactgaagtacacatatgtgccctgaacacaaaaaacatcttgagcaccctgcttttaagcctcctggccattctgtcacttctgttggaaagtatttccctccttgtccatttctgtgaattccttctgttatggttaaactgttcccccagcactccagaatgtgattgtatttggagatcaggcttgtaagaaggtaattaagttaaaatgaggccattaaggtgggccctaatacaacctgactgacgttctcataaagaggaaatctggatgcaaagagagacgccagagatgtgaaaacacagaggaaagaccatgcgaggacacagcaagaaagcagccacgtgcaagccaaggagaaatgtctcagaagaaaccaaacctgaagacaccttgatcttggacttctaacctccagaactgtgagaaaataataaatttctgttgtttaagccacccagtattttgtttgcagtcctagcaaactaatacaccttctattccaggcccaacactgctcactttcagagtgaaaccttatcacccatatacacacaccttgggagtgaaggtttctcacaatactctgtgcatcctccactcaactttcattcattcatttaagcaacaaacacctagtgaccaccactgtgtgccagaccctgttttaagggctgagaagagctaacgtttattgagtacttactaagtggcagccactagtctaagcgatttacatgcaccaactcatgaaatacgacaaggttccagggacgcaggtgccgctatgacattcgctttacagatgcggggctgaggcacaaagaggccacaccgtaatgaaactgagctaggctgtgggctctgtcgtcttaagcgctactctcaactacagcgtggaaggaaacagaagccgagagatgggcagcgcgtagcggaggcgggccgggctggcttccagcgggcaaagcctggagatgagagggcgcgggtggggtttccaggccgaggaagctgcaccagggagaaggcccggctcccaggcccggaacctggccgtctgggtctcagtccgcgtcccctgtgatgcccggcacagagcaaatgctcgctgactctcgcaggagccgccaaccccccgggtatcctcgagtgcccagagacgggaaggagcggtgggtccatgcccttctgggccaccttcgggcgcccggcctcccttcccttccgggccattcccaccagcgccagccccgcacgccttcgcaaggccggccaccttaccctcggaggccgctctctgccccgccgcctactcttcacctgcagcagctgccttcaaggccactcgcagcgatccgctggccgcggaatcatcacgacaacgcccccttggcttgccggaaccgccttcctgcttccgttggcgtcacttccactggggggggcgtggccgcggtgcgcaggcgcgctgggtggttcagaagcgaattctgcaccgcgaagcctgagaggcaggtagctgcggcgctgggctggcggcggcgagtccacgtgctccccgcggccggttgaaaccgttggcgggcgctggctgagaggtgaggggtggtggcccagaggtccgacctgggaggctggggctcagagagtgagtaggggagggacgggatttccaccgtcagcccctctgggttacgcatggaggaaggagttccattcagatctcactcctgctctggggaagtggcaggagtcctggacttagggtgaccaactcgttttagttttaaaacttaaggtccggcgtcctgggaactccctcgggcctggccaaaccaggacgattggtcaccgcccgactgggcttcaggcttgctgcatgttggagacagggctcttctctgagccttgggagatcagtccctaaagaggaggccttaggatgtagcggtccagagcacatacttaggatcagaataactactgcgtgtgaatctgggttgccactacctggatgtgggatgacctggtgtaagttttttaacctctttgcgcctcactttcctcatctgtcataacatatagaatctaactcggagaactgtgatgaggattacatgagtagaaatgtgttaacctcctatgagagggcttgggtgctccatgaatgttaggattctctgaagcacctacctctgaggagagagggaggaggatgaggtggggtctgtatttgcaaccctgatttctagcagagagggcccacttgggacttactcacactgtgcccgaggctcccagggtctagcatagtgcctgacacatggtagttactcgagtgaagggatggtgtttaaaacagtgctggtgatgccgtgggtggggtaggaggcagagagaaatggcttctgtgcctcagtttgctcatctgtttagtggagataggtgcacctacttcccagggcttttgcaaggaacaagggagagattctctccttgtgaatgtcacccattgtaacccttgtcagcctcatacacaaaggtttaggcaggatggtggacagagtatgtttgtctgtccttctcttgcaccatacccatggtttctcagaatgctacccgtggaaggggcttgagtcttgtcaagttggcctgacttcttgtttcacagatgagataacttgaagtttatagaggcagtggcatgctcagggtcacagtgttcagtgggggatatcctggggttgccagctaggcccctcaggtgggctgtttgagtggtagtggtggtaatgatgtgtaggtcagtgtctgcatgtgcatgcaagaatattttaagaatagtcaaggccaagcgcagtggcccgtgcctgtcatccgagcactttgggaggccgaggagggtggatcacctgaggtcaagagttcacaaccagcctggccaacatggtgaaactccgtctctactaaaaatacaaaaattagccgggcatggtggcatgtgcctgtaatcccagctactggggaggctgaggccggagaatcacttgaacctgggaggcaaaggctgcagtgagccgagattgcgccattgtactccagcctgggcaacagaatgagactccgtctcaaaaaaaaaaaaaaaaagaaaaaaaattgaataagtaatacaaaaatatagagggaagaagatttaaaaaaaatcattccaatctcagaaccaaacctaagggcatgttatcagggaacttggtaaagtaggcagccatggggtgaggagccagagaaggttggagtgaatttatgaacataaatgggtgggttgatggtcatatttaaaggagcatgggtttaggagggggctgggtataatagcattgatgtgcaaattagtaggtcacagagaaacctttctacaattgggcagggatgaagct

SEQ ID NO: 317627 - DNA, 4001 bp, Homo sapiens
gactgaatgtttgtgccccctaaaattcgtatgttgaagccttaaccccaatgtgatggtatttaaatgaggcgcctttgagaggtaattacgtcaagagggtagagccctcaggaatgagattagtgtccttctaagacagacagtgcttgcttcctctctctgggaaatgaggatataaagaaaggatgaccctctgcaaatcaggaagaggacaggacctacaccagacactagatctgccagcatcttgatcctggacttcccagtctccagaactgtaagaaacagatgtctgtcgtttaagccacacagcctatggtacttctgttacagaagcccaagctaacacacagaagatcagccccacccaatattaccacctcagagagtcttatggggaaataagactttgagacagtagtttaagatatcagtaatcagagtaaacatgaactcattttctgaaccaacaaacatagtatctccatctctcttaagagatttatcttgtatgttcagaccgcatatttttattggtttacacgttctcaacaaaattgtcacacataccaaaaataaaaaataaatatccaaaaagttgatataccttttcatcttcccactgaaaaaaattacagtcttttctatctctacaggctgaacaggcataaaacctccgagtttcttctttcccttgggtcacctttacaaacagaagagtgggtcctagttccagaatagaaaaaaaaaaaaaaagtgtcaagtaatggtcatctacgtcaagttcttagttttcgctgcccttaaataaaatttgtttgagctttaggcacaatttatcataattaaatccatctctttggttggttgttttttgttttgttagggttttttgttttgttttcttgagacagggtctccctctgtcgcccaggctgaagcgcactggcacaatcatggctcactgagatcctgcttcctagcctcaagcgattctcccgcctcagcatcccgagtagctgggactacagttgcgtgtccccagctgtttttctttttttgtagacggagtgtcatcatttttgcccgggctagtctcaaactcctgggctcaagcgatcagcccgcctcggccccccaagtgctggaactacaggtgcacgccaccacgccggcttctctgtgtttaatgaatgtttcttttctctctgttacaacattccggcagtgactacttataaataatttttgaaaaccggtctcttcagaaagaaaatgctattgtcggtacagttgctgtctacgttgtgaatattacaaacctgagactaaaacaaggaagggactcagagaattgaggactttgacatctcttgcgcggttacccttgcagtgaaaacctgagctttgagctggaaacgcccactttctgtaagttagagaaaaactgagtctagttcgcaggcaagaattacactgtttttctccctaattttttatttttgaagggagagcaaatcaacaaatgaaatccccaagtacttgtcaacgagaactattcaataccatgcattcttctctttgcctacttttctgccccttccccccaaaagagatgaaatagtcctggagccaaaaccacaagagtggagacttgctctgaatgtttctcaagtaagttgaaaaacaccgcgttccgaggaaggagtattttctaggcagcacactggtgagggaaagaggcgggtaaaaatacaggagccccaaaagccacttccaagccaactcacaccctcagcgcccggcagttaggctgagcccagactctgacccaccgtgagggcacagcggggcggggacggcaggatccaaaggaagcaccacctccattcccgagcttccccggcaccctgcgctgccctctgcctccacggcttcaaacccattcctggaggccgccatcttcccgccgccgtcccgaaagcctcagtacgaaacaagaatgctgagaaagagcgcccccgcgacccaaagcgacccacagcgcccccaggcgcttaggaggagcttgggcgggggctgccgcggcggaggccacgccccgaaacgcagtccccgcccacctgggggctgcacctaagcggcccctagcggtggggctcgcaggtcacttgcgggacctgtgccatgagctcagcgcatgaagcaccctcctttcttaagaatatagccaggaagtgagatgattcgaacaaagacttggttgtattgtaggtccaaaaggcagcattaccacctctgccaaatagctgaaatggctgcagcagctgtgatttaaggatcattctttgtttttcaaagtcacagtcactgcatcatcctctgtaacttttggacaatgctgaaagttgcacatcatagttgcatactcattgacatttatacataagaaagaaagaaaaccgtcctgatttgcagatgacatgattgtccacattttaaaaatccgaaagaatctatcaggaaaacacctccggtttaaactgagttcagcaaggttgcaggatatgagataaacacacaaacatcaactggatttctaaatactagcaatgatcacaagaacactaaaaaatagaataccacttacaatcactcaaataaatgaaataggtgtaaatctaacgaaatatgtacagagctttatgtatgctaaaaactccaaaatgcttgattaaaaaaaatcaaggctgagtgcagtggctcacacctgtaatcccagcactttggggggccaaggagggaggattgcttgaatccaggagttcgaaaccagcccgggcaacaaagcgagacgacatctctaaaataaataagcaatttttaaagttttttaaaaatcaaagaatagccgggcacggtggctcacgcctataatcccagaattttgggaggccaaggcaggtggatcacaaggtcaggagatcgagaccatcctggctaacaccgtgaaaccccgtctctactaaaaatactaaaaatacaaaaacaaaaaaattagccaggcgtggtggcgggcacctgtagtcccagctactcgggaggctgaggcaggagaatggcgtgaacccggaaggcggagcttgcagtgagccgagattgtgccactgcactccagcctgggtgacagagtgagactccgtcttaaaaaaaaaaaaaaaaaatcaaagaataaacaaatgcagaaacatactgcattcataaatcagaagactcaacatagtaaagatatcagttctccccaggtttaatgcttatacaggtgtagcacaattgctatgaaaatcccagccagattctttttgtacatttagacaatattctgaaatttatatggaaaggcaagggaactaaaatagctaaaacaattttggaaaaagaataatgaagtgggaggaatcagcctactcaatttcaagtcttatagtgcagtaatcaagacgcagccacatgtctatggttgtagacgaaatagtctcttatgttatttaaagaaccattggggcatgtgcctagttaacttcacacattgagtgctatggtttattactgtaaaaacatggctgtttttctttcacatttcatgtaatggttttactcaaattctccatctgcaccagtagcatctgtatctttgatgtaccagtgtcccctttttcaagttgtccagaacactttttcagtgtatattatctgcacatgtctggtcttttgagataggaaactttctacagctatgatgatgatactctcggacactatctcaagacctaactagctgggcacacattctcaggaccccttgagacagtgccctaggcagaataaaaactaaaagacctaactacctactcacatgaactctagcacttttatttacaaatttgttttagatgtacaaatttgtgatcttaaaagacttgtttataaaatttgca

SEQ ID NO: 317628 - DNA, 4001 bp, Homo sapiens
ttgctcactgactgaaacggccttatatggaacttgactgtacatggaaaacatactggtaaaagcggatgtggacgaaatcttcatatacatttagtattcgttctaggtgctgaacttagggaaaaagatgcaaagttcctcgttaacacaaagtttggtgtgggacagacagtaaagggcaaataaacaaaaaatgtcagattgagaaaaatgctattaaaaaaaaggtcggggcggggtgggaccgggagcggtggctcacgcttgtaatcccaccactttgggaggccgaggcgggcggatcacgaggtcaggagatcgagaccatcctggccaacatggtgaaaccctattaaaaataaaaaaaattagtcgggcgtggtggcgggcgcctgtagtcccagctactcgggaggccgaggcaggagaatcgcttgaacctaggaggcggaggttgcagtgagccgagatcgtgccactgcactccagcccaagcgacaagagcaaaactctgtctcaaaaaaaaaaaaaaaaaaaaaagaatatgagaggggaagtaaccgaggacgccaccttcatcatgaatgtctggaaaaggcccccaaggagggggccatcggagccagatgtgggcaggaggaaaagtgcacgggggtgggaagagacgagcgaagcctgctggttccaggctgccggcgctccccgggggctgcaggccatgctccatgctccacgctccatgctccatgctccacgctccacgctccatgctccatgctccctacagctatggcgggcaggaaggtgggggctggggcgaggcccaggcgcggggctgacggtgagccccgggaccatttgcatttcatcccaggtcccaaggaaaccattacagggcttccaacaagcaaacagcaagtttttttaggttagaagatgggccggacagctgcatggagaatggatttggggagaacagaaaaatctattagatttgggaatcccgcgaagggctgccaggggtttggagcagatggcggcagaggagatgaaatgcagggagagcgggaaaacaggagaaagaaccaccccctcgccctgcagctcgccggtggattggatgaagagcggaagggaaacaggaatcaagaatgagtctcgcccggcgcggtggctcacgcctgtaatctcagcactttgggaggctgaggcgggcggatcatctgaggtcacgagttcgagaccagcctgaccaacatggtgaaaccccgtctctactaaaatacaaaaattagccgggcgcagtgaagggcgcctgtaatctcagctacttgggaggctgaggcaggagaatcccttgaacccgggagacggaggttgcagtgagccgagatcgcgccattgcactccagcctggcaacagagcgagactgtctccaaaaaaaaagaaaaaagaaaagaaagagtctcctaggttttttgctagagtaatttgagttgggggtattgccatctccagagataagaggagaggaaaagaaagggaagagactggtgtcttgatcacaatgtaagcatgttaatatagaaaagacttagccagatattgtaaggaaacatatttacatgaagttttgaaataaaataaaaaatgcaatttaggaaatcaccgccagacacttgctttcttgagagtgtattacttgcccatctgcccgttttcaacatttgaggccagtggccagccacgggtcaccgcagggcgagggctacaagtctcccggcgaggccggctccggcctggtcccaggatgagaacacgcttcccctccctgactatctaacccctttgaccgacacattccaagtagtgagcaacacaacccccttctccccatttgaaaaaagttccatgaaacaagactcacccctgttaccgcgaagcactctgctatttccaatgccacctcctcccaaacgtaaaacaaaggagaaactgcagtggaaacgtggactgccctgcgccccctcccaagacccaccctccggactgacgcggtctaatcaggctacagccacccatcagctccgccagggttagggagggcgtggccggccccgccctggggcgccgccctggagccacctggcccgcgcgttcactctctgcccggagccgcctggcacctgggcggcgcgctcaccctcagcccggggcccccaggcacccggcccgcacgcaaaccctcagcccggggccccctgacccccgcgttcacccctcagcccggccgccgggcactgcgcatccgccacgtggcagcgcctccagagcccagacgcccggcgttggcacgtggtgagcgctcaataaatgtctgttgaacaaatacgcgtgggtgtaatcacatttacccttttaggccggacgcggtggctcacgcctgtcgtcccagcactttgggaggccgagacggggggatcacatgaggtcaagcgttcgagaccagcctggccaacatggcgaaaccccgtctctaccgaaaaatacaaaaattagccaggcatggtggtgctcgcctgtaatcccagctactcaggaggctgaggcaggagaatcgcttgaacccgggatgcggaggttgcagtgagccgagatcgcgccactaagctccagcctgggtgatagagcgaggctccatctcaatagaacaaaacaaaacatttacgcttttgcagatcgaggaaaaaaatcaagcggaggaggcagtttttaccccccgaaatagaggttgactcgaacgcaaacccccacacctttcccaccccaccctacccccagttgtttcaaacacccccagtgtttgttttcttttttctttttctggccattaatgtgactgtattgctaaaggcaacacaactcactttgaaagcaatggtcagtcaacgctcactattggctacagtctagtgaaatgtaataggtcgtataagtacacccagaccattagaacgaaacccagatcgatatttaaaaacctcctaaatgttgacttgaagcttttctgcatatatatctgggagcagttctccacttttttctttttttaaatctgtttctgaataagcttcaattttgaggttggccaataaaatataattttccttccttccttccttccttccttccttccttccttccttccttccttccttcctttcttttctttctctttttttttcttttttgagacggagtctttctctgtcccccaggctggagtgcagtggcaccgtctcacctcactgcaacctccgcctatttggttcaagtgattctcctgcctcagcctccccagtagctgggattacaggcatgcaccaccacgcacggctaatttagtatttttagtagagacagggtttctccatgttggcaggctggtccgacctcaggtgatccgcctgtctcggcctcccaaagtgttgggattacaggcgtgagccactgcgcctggccaataggatataattttcaatgaaggaaatatttattattccctgatctcctccagtaggcatagcaggacctctccatttgaaatccgatttcaataaagcttccttagttccttaccttagaatgtattatttgcagacgagggtcagaaagccgatttaccagtcagaaggacttccctcaacttccctccttctgtctctatggcgccttgctgtggcctctttagaaactacaggggaattccaccagcctttttttttgtttcccttggagataaaaatgttaacatttgggtttcgataagaaatacttcaatgaaccgaagaatgttgaccagaaccttctttgtaagcctttaagtggcaatgtcattgaaagcccctttcctcactagatggaaacacacacacttagctcaagccgaggatcctttctttgggttgtcggaaaccaccctttatcactcccttaa

SEQ ID NO: 317629 - DNA, 4001 bp, Homo sapiens
gctcgaaggcgccgcaggaggagaggctgggcgcagacggctcggccccaaaccacacccagcgccaggaaacgcaaggctcgggacgaacccttaagaagtcgctgctagggacagggaggttgggagcagggagtgacgccacaggaaccctgaatccccccgagtcccctcccaatcaagccaaggccgagcaaggggcgccccatgtaccgtaagccctcaacccaacactccggcaacgacaaacagaattccccgacctcaaaggccgtgaagcacgcgcccttcggggccctgagtgagccctcaaacctccgtgccgatcttccaaacccacctcccgccttcctggaatgggcgcacgcgaggcacggatttcaggaaacctctgccgtgacagctcacccacggtggaggcggaggcctgggacgctggacggagaaaggcggccagtggagggaggaggggtaggtcggcaacgcggtggcctcggacgtccgagctgcccggacgaagcgctggccccactcccgcccttggtcgccgcggtgaccccacccgagccgtgacctcccccaagatctcagggcccgggcctccccgctgcgccggccccagggtgccaccctcggacgcccagatgcgccctggaccctgcgccgggatcctgaacaccgccgcgccttcatcccgcgccgagcgcgcccggccctgctccggctgcagcgggcacgagccccaggcgggcggcggggacgcagcgcccgcagtgcgactggcgcagccgctgaggcacggggcgcgccgcccggaccccgaccccgcggcgctaggagaggcgcgggcgccggctggagagccgcacctcccgccccgccgaggctgctggccacgggcgcgctcgccccaagggccgggcggaggacctgtcccggattccagaggacgtgggtggggaagggacaaggatagggacaagggaggggacgcgaactgggccgaggtgtgggtcagtcctggttcgggaagggaggccgttggcagggccatcaggatcctctctggacatggaaggacgggtctgccctggacccagggattgggaaatgtgggttctctcagaacctggggaagtggggagagggtctgttctggagtgcggagggagatctattccgggcccaggacaatgggggtgggggcaggacgggaatgagggggcattcctggtgcagggaggggagacggagaagtagtagggggtctgctccgggcccgcgggctggggaccacgaagtgtaggagggcaccgtccaggaccgggatgaggagggagaggggcccgttgtggccctggatagagggggagggaaagtgcgccccggcccgagaggaggagcaggagggtcagtcctggacccgggcttaggaagccgggagggaggttcggatccgcctcagagacagggcgatgaagatctgtccaagtcttggagtggagggaaggatgtcggcggtgggggaagaggccggccacggacagggaaagggagtccgtcttgtagggcggacgggcggtcctggggaagggagaggccgcgacgcggggggcgtccggcccgagcggggccgctcaccttgggtttgtagagccactttcggaacctgttcatcatcgccgcgccggccctggccggactccgggcggccctcgccctccgcagcgctgcgcccgggcccggctgaggcgcggggcggacgcggaggcacggccggagcccccgcgctgtcgcagggaggctggctagcgaagcccggagcgccgagcgggcggcgggcaggtgcgcggggcaggtgcgcggccctgagtatgctctgcaagcggcgcgccgggcagacctcagacccgggagtgggcgctcgggcgcacggacagacgcgggcacgggggcgcgcggctcctcgctgctcactgacacccagcgctccgctggtcacggccgccccgcgccgcacatgcgcctagggcgccgcgagccccgggcccaccgcgcgctgcgggcggggcgggcggggcggaggcggcccaatccctgcgcgggcgccgcaccccgcccgaggcgcgctccctgccggcggggcgacccgccgcgcccgggtatccaagaaactacaagtcccgaaaggcatggcggggaggtggcgcccagggcttggcgtcccgggccgcgccgcggcgctgtgtattgtgggagttgtagtccacccgatggcggcggagcgtgccgccggttgctaggtgacgacgccaaacagccgcggcgtcctgcctaccgggagctgacggacgacgactgccaacaccttagccccagctggcccaggaaactgctgcggtggcaggtggcggcggcaggagggctcggctgccccgagcgcccgccaggtacgggggcgggacaggtgcggggcgacgcgccgccgattttcatgacctgccggccggttccctctcgctcgctgctcatcttgcttctcccaaacacctcttctgtcttcttcccagctccccgatgaaagtgaacggtgcctctttttttttttttaaatcaccactatcagcggtgcgttctaaaaagatactcttccgccctcgctactccccccagtggtgccctaatttgtaccttaaaacgctcacctcaatctgagtacctgctatgtgtcaagcagagagctaaaaacccacacgtggcctcacttaaacttcccattgacagccagagaagcaggcacaacgaggccggcgtgccctggctgtgggggttgcatccagatcacggcggatctgggtcggcctgaccccacagcgctgcacttttccctgccgcaccaccaccacgtctctggcttgttgtgaaacgtgcagatgtaagacacaggagatggaagtcatgcccccctcggttcagaattgagaagtctgacctgttcctgcttgtcctcactggccagtgccaggtgctcagaaaggtccgtgggctccatgaccactttattccaacagacgcgatgtgagcctaggcgcgctggcatctaagatttctcttagttgggggtagggtccatgtttatttttgagtaactgattgattttccctactctcctcttcctaccacccagtcgaccctctgaagggcaaaacccctctggagtttccccttatctccaattccttcccacttgttctttctggaaactactcccatcagattttcacccaaccactcctctgaagctctttatcaaagtcatccttgaccttgatgttgcaaaatccgatgatcggggtcagcgctcatctcttccttgaactgtcactaccacgtgacccagccgactgtgccctctccgtgacacagcatcctcacttggctgaaacagatcccactgtccacttctcctcctcgctcctggccactcctgcttgatctccttggctggatgcctcccctgctcaccgacctctcaacactggagaccctggactcagtccttggaacctactctatccactccctccctgggggatttcctacagttacatggttttataaacaaccattttctcccaaacttctcaaaacctatatctctagcctcaaccctgaaactccagacctgtttacctgttcttcaccatttggacgcctaacagatcctctcaaatttaacgtgtcccaaaccacactctcagtcttcccccataaaacctgctgctcccaaagccatcatttcttcagcacaggatcttggggtagacacttgatgggcttgtccactgagtgaatggctgttctctgtgggtctatccttggccaactccaaggcctggagcagttgtatctgctcagaggctcccttcctgtgttttatagtttgaaattgtgcatgggatgaaggctgaacttggggaagtggggtatcagttaggtt

SEQ ID NO: 317630 - DNA, 4001 bp, Homo sapiens
ttcctgccttggcctcctgcggaccccacccacccctgctctctctcaggactcggtactggccctccctgtggccttcgggcccacacgtggcaccaagccctgggctcatcaccatccccgtggtcccctcaaccccattacatggtgagtgtccccagcacagcctgaccagggaactgctgagactgctggctacttcctccgagactcagaagaccctggcagttctagggcttggtgggtgggggctggacacagtttaatccctcatatgaccgttgaccggtcacctgtgagagtggcatatatgtcacccagctcaggtcacctgtgggagtggcatagctcagataatccctgcaggaatgttctccagggggcctgggatcaacccagcactcccagctttcttgcttgctggtagaacgtgctgaggacgcggcatccagagatagggagggactgcccagaacagcctggaacttgtccttgaccctcccagggactgtaacagcttgagttagggaggaaccgcctgggctttgcttctttctccctggaagcagggtgtccttcaaagctttgccctgggggtcacgtggtccctgagggctctaacctgcggctgcttgcagggccctttagccctggtgcaaagagaagcatgtgcagtcagcaatccatctgccctgggcagccttcccgacactggggactggctctgtcccttgcttcctatctgtaagtaatcaacctgtgttgcgtaacttgtatgtgagcatgtaggtcaccagcgcatggaggactaaacagtagcccaggatgcagtgcccacaggcagaagttcctggtatttggctatgacgatctttgctgttctccacgaagtaggagtcttctcttgggactggtaattagcgaatctgctttgaagtccccaccaccccagaggaggtaaggggctgttccccaatttacagagggaagaaccaaggctcagagaggttcacaaatccacccaagatcccacttccaataagcaatgaggcctgcatttcaaagccactcaccctgcctgacggtggaagacttatcctgtgacccggtttccctgcttgctcctgctaggtaataagggtgaaaacagcacaaagccaccaccgatgttggtgccacagccccagggcaggcgctgtgccctgtgaagggaaggcctccccaggcctcaggtcacagctccaggctcactgtggccttctggcccagtggggcacagggtgcctgacgccagctgggaaggtgttgcctggtgtggcacctgggacagcctgcacatcaactctgcccacccggcctggctgcagaccagggctcggtgctgagcccccagtcccacctaccccctgcaggtgcctgtgggtggacagccagccccacacagtcctccagcctgacctggaaccacaggtgttgtggggccagccaggccactgaacgccctgcccgccccaagggcacagccccccacctctccaagcccttcaaagcaaactgccaggaaaggctggcagctttacgttcaattcacatcaataagtactttacccagagggtggctgtgcctgtttagaggaatcctccacagcccagacgcaacaggagccacgtgggaagggaatttagacggtcggcactgggcacagacgcccgggtgggctccaggttcttggccgcctgtcccctctgattagcatctgcaaagtgggcttaaggacgcagagaacccgcttagcctggacaagcccttagcacctcgcgtctcgccgtcaggggtgacagtggtggacgcaggtgatgagcataacgttgtgcattcccgccgccgcgccctcgtcaaggcgcccacggcctccgagcgggtgactgggaatggcgggggctgtgttccgcgataccgcgataaaacccccacgtcgccgcggcaaagtcgcgagagtaccgtggaccccggaagaggcggcgcggagggacagtggaggcgggggcggggcccagcaggggcggcgcagcctcagccacagagccggggtgtcccgggcgcacgcgggggtcactccctaggcgtcaggccccgcacgcggaagtgggggagggaggtggaggggggcggtccaggctgaagggcgagcagtggagctgggccaccccgcaggcagtgggcagcgggcagcgtggggagagaggggccaggtgtccctgaatgcggcggggggacggggagggggcaggggaggcgcgggcggcaggggtcagggtctccacatctccccgggtgggccacgcggggttcgagagcgcagtgcgcggaggccacaggcagcaaccgggacagcaggggacaagggcgtgaggaggggccgcgcggcgcctgtcactcgagcctggagcgctgcctctgggcccgcacgtgcactcacaaagggcgtgtcccccccaactacctgcacgcagcaggggcctctcagtgcacgcagggtaataagggtaacaacaacgccagcctccccagggtctgcgccagtcacccaggcccaccttcccacctgcagaaatgcccccggccctgcctccctggcccacagactctctcctgtcccttcttcaggtccactcccaaatctcccaccctttggtgggagccctgagccctggcccaacctgggggcaaaggctcccgctccggcctgggtggaacagctcgccccactcatgctggaagacggccagcactggctgggcctgggttctgtgcctggagctgggctacacggggaggacgtctcccaggccctccagctcgccctcagctggactttgggttttcaagctctgagagtcacccctgataccagaaggccccaactggaccacctgcagaataaattctgaaggaaaagggagcacacaagcacgcatgtttgttttccaggccctgaggttcagacactggggactgggggctcccctctacctacaggaggggtggaggtggcagagcacggcccctgccccctaagggcaaggtgaaggctgacccatgtgacctgctcgtaggaagccagggcaagatacagccggcctcactgtgaactcaggtggcccagcgcagctcccccagcgcagccagtgaaggaaggaccctgaggctgaatgtggatgtccccaggaggccacctctcaaagagacttctggggggagtgcgacgcagaattacagcacccagttattccagcaaaaaacataggcgtgaactctacacgcaccaaaaacattcacgtgtacattctgagatggaatttttaacctcactaaatttttatttaaaatgcttttacagctgttaccagtgctcatgtttcataagaacctgcttatgcaaagctgcacgtgggcctccctcagaagcaagcccaggcctctgcagtttcccagatggtctggtaaatcagtgccctgggaagctttagattgggggactggtttagacaccccaacaaatcagttccctgcacctgctgtctcaccaagcagcacccgtctcccggccaagttgctctcacttgcagcagaagccacagccagctcggaggggcaggtgaagggtggaagagctggcagccttccccacagccatcgtctactcagctcagtggagtgttcagtggccccagagaaaaccctccaatggcagagggtagagttccacgcagctagaggcctctgccccttggggcatggcaaagggcccctttatcacctcagtgtagtctctgatgtggaaacagaccccctcccacccacagaaggagatgctccccagaagccggaccctggctctaggaagaggctgggttggccccctgaggatgaggcatcccctatcatgcaaagacatcctccttacaggagaaacagctgggcacggcgccacgcaaac

SEQ ID NO: 317631 - DNA, 4001 bp, Homo sapiens
ggcacaggcctgtagtcccagctactcaggaggctgaggcaggagaattgcttgaacccgggaggcggaggttgcagtgagcagagatcacgccactgcactccagcctgggcgacagagcgagactccatctcaaaaaaaaaaaaaaaaaagaaatacaacttccacatcctatctccctcccctccggcgtacataaattgctgatgcctaagaatgccaagaagataaaagagagatcgagaaaaacactcctgggctagatatgctgtatacatagatgagaatacatggtacagacacagtgctgggcatgtggcaattattaatatcagatctgtttaatagctaccatttattcagtgctaccatatgctagaaactgttaaatgctttatttggaggttttgtttctgttggctttttaacttttctttttcttttacagagacagggtctcactctgtcacctaggctggagtgcagtgttgcaatcatagctcgctgtggcctcaaactcctgggctcaagcaatccttccagcctcccaaagtgctatattataaacattatatacattatattgttaattatatacattataattattatgtaattatataatatataactatattactgtattatgtaatatacaattatatgattatcgtgtgtaattatatatatttattgattacatactatgtatcaggcaggaattggacgagatactttacatacagtatttatcagtctcataatcctgaagaataagcattattacaatttacagattaggaacccagtatttactagtttaggataacttatatgctatttcacaattgcaagataaattctccattattttcctaaattgagatattacttctggaatgtacagtttaaaaagaactaagaagactgaaactcttaaaggatggttaaattcgattataggagaaaacctaaaaaaaaaaagctaactggatcttttaaaatttagaagagctctaatacttattcattgaaagtcaacaccctttcttatcttagtattaatcagaaaaaattattttagacaacagcatcatatatatttaagtgagatgcaaagagttttttccaagtgttcatctgtccacgtctaccagacaattcacctgttgaccgacttctaataggtgaaagattaatctccaaataagtttttaaagaccccagatgctctgtgataattatatacatacatacatacacacagatatacgtacatacacacatatacatacatatacattgtgctactatatgtacggacgcaatatatatacataaaactcggtgttctcagtaaagtatgagccattattcatttaaatactagatatttttcctttttttttaaacaaggagtattttttgaacctaaacctgaacctctaaatagttcggataacaaagttttggaatcatgaactcaacattgttaacaaaccatccagtccaaataaacaaaggaaacccacatctcatttgccaagattctaagaaccataatcctgtcaccaaatgacaatggagacttgatcctttctcagtcctaaatacaaacagcaaagccctctttggtcctcatacctactcgaaattgcaaagcaaggcctgggaaaaacggtgaagaggcaccacttactacaagcagtccgagtagctgtgactgcgaccaccccaatcctggttccaaacagcatccttcccggttctcttcttaaggagcagagtctttcgtcccttcgccccaaatcgctcaagtcattcctaggaaatcccgagaaacacttcacctcacctgtcaaattgcacaaaatccactttcgaatttctcccgcgaaacaacgtgacgtcattaacgcgggacctcaccagatgaggacccaaaacttggcccgcccacctccgcctaagccaaaaaccgccgctttcaaatcgccaatcaaattcttccttggcttcgagtctctcagccggccgcgctctccgatgcccagccctcctggaaccacctcgcctgtgacgtaggtggagcgcgcactgcctccgggcccgtctttctcaattgggaccggaaaacgttgtcgctcatcctatgacgcgaaagtaaccgagactatcaggatccggagacggaaatgtccgaaggccgcagtacttgaccctgtattttgggagtcgaacggagtaagttacaagcggcctatagggtcgcacagcttgggcgaagtctaattaactctccgtcctttttcttgcggtccactctatcatctatcgtccttcttaccccgcccccccgtcctgcacacccatcagttccttggcctagttatctatgcgcacgcgcaaaagtcttcggcagcacttgtagttcccgttttcagacagtaagggcgcataggggcccggcgtggggaggtttggggcgcgcccggcctatgacggcgtccttgcggaagtacgggtgccgagagaagcagtagtcaataaagagagtgccgtatttcgcagattggagctgagctgtggctgccagaagatagcgaacgtgaggatttatattctaaaattatcatcttcttttgcaggactctgccatcgtcctcaaagagtaaaaaatccagttacggaagggaactaacacttgctagatatggtgtgcagagtgcgtttgcaaagaaacttaagagaaaacaaatgataggacacagggtggtggaagatctcaaagagtaagatgccatttaacctgggccttgaaaatttaataaggaaatttagacgagaagattcagacaaagcagaacacacaggccactacgtgttgagggacttgagttgtaagcagtgaccagaacaatgattcttaacctgttgtggcacacttcttttgaaaacttaattatatggattagcttctcaggaaaacgtgcatgtacctattaaaacattttgcgaggctgggcacggtggctcacgcctgtaatcccagcactttgggaggccgacgcgggaggatcacttgaggtcaggagttcgagaccagcctggccaatatggcaaaatctcgtctctactaaaaacacaaaaattagcggggagtggtggtgcacacctgtagtcccagctactcaagaggcttggttgggagaatcgcttgaactcgggaagcagagattacagtgagccgggatcgcgccactgcactgcagcctgggccactgagagaggctgcgtctccaaacaaacatttttcatataatttcctcaggagaaattacgaaatacttttaaatagcaaacacacacaaatgacttggtgtcttgtctgactcactcttccaagttatctatgtctttcgtggtctttgaactatttttcaaccctgtaactcgctacagcaacatggaaattaggtttgtccagtaaagatgcaattaattattgtcctgagcagtatttattaatattcatttcaacgttcctgattgcctgtgtacctgctttttaaattctcctttgaactggtttttagcacttaactggttcccttatttacagtcaagcaccacataccgacagaccgcatgtatgacagtggtcccataagattataggtgagtaataggcaatagtacctaggtttgtgtgaatacatcatagaataactacatactcaatgatgtacttactcacctgactgtgcatttctcagaatgtgtccttgtcgttaagcaacccatgactgtgcttaaatctttaccgtgtattcattttatatttgtacaagagtcttgattttaccttatctttaaaatgtatcatttacaatttaatggagcccactagaattcttgtccagccaaagttgcatggacttcagattaagaattcctgagtcagaacatagagtccgtggtgataaattgcgggaaattct

SEQ ID NO: 317632 - DNA, 4001 bp, Homo sapiens
gctacagaaattgcggaataggttatatattcttgctatgcacatttcaaagcaatagtttccatgtcctaaagacaattttgagtcaaaaaagacaaatcacctagttaacagattaaaatgagttatatatatttcaaagaagcagagaaaatatttaaatataaaagttttcaaactaaatgctttaagggagaagagtaaaaattctttcctcattctaaagagaaagcattaagcctcttctgatttgtatttggtcctacaacaggcaggtctaaaggcatggtcttgaactcactaacgttgaattcttgtagcacatgagggatgcacttgagcaaactgtgtgcacaggaaagaggatttgtggggaagaaaagagcagaagaaaggtgctatcaagagccttgagtgggggcaaggcaggattgacgaaaggactggtttgtgctacaagttcaggcccaggcagggctaagctctaactgattcctgagcccataaaggcagaggagattaggatcaggtggtccaaaagcctgggtgggtgaagaaaacagattcctgctacagatctggggttaaaatgaaccaggagtcttctgggcactgtgtgtgttcttgggagaaaaacctaggagcaaagctgccatgggcacaattcctgagggtagaaccctgtcctgggacaagtgtggccgtgcgaatgcccaatgggcgggctcaggagtgggttagcattgggtgggggctggcagcagggtgcagggaagggatgtttctcagaactcctttcctccaagttctcagcgccctctctccccgggaggagacctggaggaacagaacagtgcgcagcaggacagtgcatgtgcagaacccggctggtctcccgcggacacctgcgactccctccagcccaggctcagccatgtctttcttctgacaggaaacgtgaggagtttgctcaacaccagtcaatgctccgaccccaacgggctgtccaacaactcactaacgacaccacccggagtcagcacagaccccacaagctcagcgctcttcccgcagctgcccccctgcagacgccagtccctgcctctggacacccgtcttcatttctgaacacctgtctacaaaccaggggcccacaccctcctcaagttcaataatatgacagaactactcacagaactcagcgaagcgctgtgcgcgcccacactagcgtattctaaaagatgccactcaggaacagccacgcggaggaggcgcacagggcaaggagactggtgggcaagttggagcgggcgggtgatttgcttcgcttcctcacacacctcacaaaagcttttccttcaagacccgctggcagcccccaaaccacgagccacggccggcgctgtcccattaatgagtccccatttgctcacatgaactctgttttgatggggcctcgatctcattccgaacagggtaaagcagggacgggatccccagaccacagcttctcccacagctcctcccacgccggcatcgcgcacgccgcgcgggcggcttccagataagctactcctcaccccacagcctggggaaggtgcggggctgcgggcgcagagctgcacaaggagggctgcaggctgggccagagccgctgtgcggggaccgacaggagcccaggtccctcaccggagggtactgaggccccagggctgagcggcggcagcggggactccgttcgcagactcggtcccgccgccatttcccgccagctccgatgagacctcctcagccttgggacgccctgccccgcacactcaccatttccccacttctgaagtattcgggagtcttagctaccaatcatccaatacccgcaggtcacagagcgacggaggctgagctgtggccgaatcaccaaggcctcccacaactgagaacgcagagagatgaagcccctaacccgcggtctggtagtagccagacgcaaagacccgcgccacatcccggaagccaccgcctcctctctggctgcgtgcctgattgggcagttttcactccagtgcgctgattggatacggctccaatctccccgccatcagaccttgagtgacagaagttgcaaccacatactccacggaatgtggcgagagtgacagccggggggcctccaggcagtttcaggcggggctttctcttcgtgcttggcctggcacagcccaggggtcattttttaaccttgtgatgtgtaaggtgacgtccatttagaaattatacacgcacgcacacacacagacatatacgcgcgcgcgcacacacagacgcgcgcacgtacgcagtctcacataaacatacaaaagtcacagacacacacacacacacacgcacgcacccacgcacgcacagcccatccttcctccaaggctcgcgaatcatctctccacaaatcctgccttcggggccgcagcctgcaggccgacctcagtccgtcctcacagagcctagttgggtgcacagctctccctgacgcgcgaggagcaggttcacgggagtcggtcgcgcatccccagcgccctgcgggcctcgcaccggctgtggcggtgaccccggtgaggagggctttggtgcgggtcaccgttgctgaggacaccctcctcccccggaagcgcggtcctgggggtctggggggcgggtccctgaccgctgtaaacaataggtcggtggtgtccacgcagcaggcagcaaattctcaggaagtgagcgtcccgtctttggcttcaccttcgtgtctgtagaatgggggtgaggggactcaggactcggagcgctgtcgggcggggcgaggtgggctgagagtgtgtctccctccccaagctcacccggagctgtgcggggcgggaccgccccaggaccctcggttcccaggagctcctgggggccccgccgcccccaccccaggccgcgctgcgcagccccagtccccgccggccccaccgcgcggtcgctttgaggtcggccggggtctgcccggcgatggcgacgctgcagccgctggagccggggccaccggggatctcggcgggacctggcggcagcgaggacgcggaccctggagagatgggaggggcgcgccccgagcccgagccccacccggacccggctgccgtcggcctagccagggccggggcggacaccgtcgaggacgaagccgggcccgcgcccctgggcgacccgttgagccgcggagccccgcggggtggagccgggccaggcccatccgctccgggcgcgggcagctggcgtcgcgggtgggtcagaacccaggacacgcccaggagtccgacctcatggcgctgcagggcctggggagtgggggctggggacagcgccagggccaacccgacgccagcacccccggcagaccccaggagccgcctgtgaagagactggataggtgcattaagcgatcagaaaagtcactggctggccctgttgatgagcagaacgctttcagagaagtgtatgctcacgcagtgcttggacagcattcgcgtagtttgacacttgtctgcttgggcggatagatgctcacacacataagtttgttttgtagttatgcaggattgcactgtggctaagtacacagactctgggtgcacatcccagctgctctgctatttccagctgtgtgaccatggggaagttacttgcctgtgctcagtgtcctctgtaaagtgaagatagcagtacctgcctcatggagtcccttaagtgagttaatagtgtaacatgttatggcgtcatgcacacagtcaccatcggtaaatatagtctattatgcctgaaccccagaggagcacatgtccttgaaaagtctaaaattcaggactctaaaatccagactgtgagaccctggaatcctccagcagcattctaacgtctcttggcaattgtatgctgcttcccagggctggaaggtgtatttgtattaatacagtgaa

SEQ ID NO: 317633 - DNA, 4001 bp, Homo sapiens
caggtagataaggtaatagaatgggaagccaacagatgttaagtaggaagttcagaaaagagaaatgaaagaattgctaagaaaatatgatgaaaacccaataagactaaggcattaaagaaactggaagatgaaagtttctattatctattcttgtccaatatctacctttatcaccaacagtatgtaaagtaatatgctaggttttataataatataaaatccaacaacaatcactgccactcagtgaaatcaacagacgtgccagagatactaaattcagcaacaaactatatgcaaaaacactgtcttcactaaaattttattcaggtatacgtcagataaaatagtatatagtttttccaactaccaactgatatcaaaaaaagctgataccattgaggcattacatggatgtttagctaaatctatagtgcttcttgatgctcttagttgtttttcacgttctcggcggttctcagccttcttcctcgcaccagtcttttttttaggcattttcccctattttgacacaagagaacagaaaagatataattgactgactgcatttactattttaataaactaagaaatagtataacaaagtgtcctttttcttgttaaatgttaaactctatcctttcgatagttaagcacattctaagccttatgaaacgttaagcacatattattccaaatgaagcgggtgatccttaacgcatttattggcactaacgattctaaaaatgtaaacgtcaaaaaaatttaccctaaaagacaaactagtcttcttttcccactaagaaaaaagtttctccaatgataaagtattctgcacctcattaaaacaaatgaatcatgtatcattagcaaaaacaaaaaaatcattaataagagcattatttagccagtttatatcacttttttgagctatatattcagatgacctgacgctgccaacaccttaagtataacaagtttaatttttcctatgtaatatgtaaacaaaacatctaacagtcaacaaataacactatttattaactacaaagtcaaaacattctgaagatatttaaggtattagttgctctgactttaacaaatgctcttccctctacacgcagtgagcatgtaattttaacggggttcaaatttacgtttaagagtatgtttaattttcatcatttagttgaaatacaagatttttctaaactgaagttttctgaactgaatgctcaattaaaaaaaaaacaaaacaggtggtaagcagtacggtagcaactgaaaaatagccagatttaataggtggttatttcggtaacgtaacgcccagaccactaaggcaccattccaatatgtaaaatgacaaaatctagagggcgtgctgccctggccaaagaacctcagaaaataatcacgaggtgatcatgcggattaactttctgcgtcctcagagatatcctctgaatcctctgataaagttaaatctcatttttttttccctccagtttgttctgcacgctcaaaagagtgaatcttcttctcagccttatacgggttcaagcccttttccggtaacactccaacttcttgcatgcactgcgtgtgtcaccaaatgaggaaacaggcacggggcactgcggctttaggagtccagcctggagctggaggacccagtggggcggaggggcgtccaggggagaagcggcggaggtgccaggcggctcggggacccgcaacggggacccgcaaccgtcacccgcccgcgggacaccctacctcgtgcgcgctccgggcaaacctcgctcactttcgccgggagaccggactcactcagggggccgagggacagggaatggcgtgaggcccacccgcgacagcagtaaatccaactcgtggaccaggactccgggaaagaaggtactaacagccagggaggctgacagccgattccggacactaggagacggaccggacgtccttttacgacagcagcgccttacggctgacgtcataggacgggagccgcccacctctgttcgctccgccccttccccgcccactcctgcgggggccaatgccccattcctaagcagaggatctgcagaaaaggaagggaatgcgagggaaaatagggaagcagaaggagggaaagcaggggaaggccccctcagttttacttttttagaaaaaggagaaatctaaaaggaagaggaaaatgaactcacagacttggtactggatcaattgactcaaacagcaaattcatgttgaattctgttggaaacctttccccacctctacatcttgcgtgcctcacatcccaccttttcttggttgctgcgcaaactgtgccttcagttgcctgatgaacttccgtaccagcctcccctgtctcttatttctgttatgccctctggattccattcctttgtgaacaaatcatcccacattctctacctctaatgtgtaatctgcctgcttttaactgaaacctgatgatcctccccctgcatcagaatctccttccgatcaagcacctccacctttgcatagccgaccaagctgggtttcctaatctctttcggagctctgccgcacttaggattcagtaccaggcctattcctgtgcttttcctgccctccccctgcaggagataaaagcctctttatttggaccaaagaggccttctggaatttactcttagattttgatagccaattaaccatctcagccttttgctattttcaaagaatcaattttacttagcaataacagtcaatgccactgtcattaaggttactatttccctcatagttctcaaatgcctgatacattttacctactcgtatataaattagaataccaccccagttacgttagaataccaccccagtttcattactgatgaaagttgtaactattgcactgttaccttgtgccgaggtctgtgtgtcctacacctaccaccgagggggtcctcattgatagtcacatggcctgtgattcgaatcataaatcccatcttagcctaacttgaaccactcctgacaccaactgttttaggttggcttccccaggaagcatactctgagtcagagaagagtataatgagtatgttagggaatgctttggggaacaacatctgcaggagaaatggaagcaggattgagcagagggaagagttgacctgcagtgacgtctcagtgaaggcctcgttttgaatctgggatatcccttcagagttgtcttgagttaggggaactgggctggacctttatacacctatgacatttagtcactggatgaacgctgccaaaggagaagagtgcaaccttgggttaaaggactcctgaagatggccaagagctggattgtgttggcttgctgcactctcagcagctcaggaaataagtctttcattgaggaagagggatctgggtagtgcctgccagtattcactaccaagagtgatggcaaaataaatattctgacaaagacaaagaacctttactattcacagatactcagtgaaagaatttcaaagggcagtcttcacaagatgaaaatggaatttaaaaggcaggagggaatacaaaaagtaataataatcaatttatttaatatatagggtaaatctaaaacattatataaaacgacaaaattataataagcaatttgggatatgaaaattataaggaactgaaatattctataaattcaatgcaattcaaatcaaatcctcatatagatttttttaatggaatttggttaattgctctctcaaattcataggaacaattaaagattgaaaagcccagaccattttagttatacaagcagaaggatacttttatttattataaagctctagtaattaaaacaatattgcatagtttcaggtgtcagcaaatagacaaatgcaactgaatagaaagcctagatacagactcacatacatttggatatttggcaaatggtatgggttgcattagcatca

SEQ ID NO: 317634 - DNA, 4001 bp, Homo sapiens
cttgtttatcatgatcaatagcgaagggtttggccaaggaaggcactcaataaggttcgtactggttgaaagaatgagtgaatgaatgaatgaaagagcaggcttcacagagacaaaaataaaatgttctttgttcttccttttgcacaaaaactggccccgatgcccttacttaaaggcaaataaatctctagagatctaaatggatttttttaattgccattttgcatttttaagatcttcagatcgggtataatacatcagaaaggagtcccaataaataaaggaatgccatcctttgtctgctcttttcaaattgcatttgcaatgaatgttatcagcatagcaaactgtctacgcaaaaaagtgttatttttgaaggctaaatttgatccaagatgaaagtaacttttaaaaattgcatcctagttaaagatatcaatatcacacaattttaaaaaagaactatttgtattctactcaaagagacaacagtatataacattggtttctaaaacaatattttctgaacccttggctgtgtactgacatcatatgctgggctgaactttgcatatgtgactcaagagagagaaaagagatgtattcccatcctcagtctctgctctactgtagaagagtactgcaagcttctagagacccaggtttgtcttaattcttggtgatttcaagtctaaacttaagatggtttaaagagtctaacacaacattagagtttagctacgtagatttgtacttttaaataggacataatgctctgtagtttttttttttaatgttacgttgataaatcgttcattattacaatttttaaagtcagaggtattgtaacgggatacattaactacccaacttataaagacttaagtgttttctcccgttcgctcttttggcttttcctttctggttaagaaactttcattcttttgaaccctgcaatttcttggctttacagagccccaaaccccaaagacaccaagataagacgggcaggccggtatggggaggtcccacaatgacatcagcatttggaacaattcaaaccttcaccatctcttctcaacctcctatgtcctcgccccccgtaaaagatgcgcaggacctcgatggacgagcccacccctgaccctctcaaggaaagacaatgccaggctggttttcgagtttattgtcggcacgctcccccgatggcaggcagcatccgaggcgagcgcgcctgagcctgggcgctcggaggacgaggccaggtgcatcgggcgcatcgtcgtctcccaggcgcgtcccgctcgccgcgagggaaggccggggttcttccaaccgaagaaaaccaaaaccgtcaacgctcagctccgaggcccgcaggaggctttaaaaatggcctcctgacgacacttcctgctcggcgcggacggtaggagccctcggaggaggcatccttcataacgctgggggcggggagcgcaggccgggccagcggcgccacacgaacggccccgcgggacgctgccacccccgcctcggtcgccccggcgcgtcggccgagtccgcggggtcgcggcgcacaaaggcgagctgggggcgccgggccggaccccgaccctaggccaggcccgcgtacctgctcaacgcgcgccaagccgcggcccgggcccccaccccagccggtgccccacgcccaccagccggagcccgcgttcggcctacccggtgccacttgccacgacgccagccctcagcgcgggcacgcggggccgcggccgctcgacccgccccggcctggccccgtcaggcccccgccccgcgcgcccccacgacccggccgcagctggcgcttcggtcacgtacacgcggatccgggggccctcgccctcccgctcagctacttacccggcaggccggattcgggtgccaggtcccggcgaaggggcgtctacaccgccggccgcagaccgccggcgccgcgcccgctgtaggtccctacccggggggcggagcccgcgccagccccgcgcgtgcgcaatgtgaagcggcggcgcggctccagcgaggccggcgcctgaggtctctaaggctgcgcccgcccccgccgggcttctaagctgtccagagcggggagcctcagacccagccgagccccacttctgggcttagagcttgacccaacacgttcgcaccgtagcgagcgaggtccacatttagccatgccgcaggcaaaagaaggattcggcttcggtcctggcccagtctgccatcccggggcgcctgccttgtaccgggtcccgcggagggcggccttggcgcctgcctccctggagcctgcagtcctgcagtgggtgagtgaaagcgagagaagaggagctcaggtcctcagcctccaaactcgtcttcttggagagcttcagtgaaggagatggccttgaagtcctgggtacaaatcctgactctccctactcctttacatcttagctgctggaccttggcgagaaagtcccctgacctctctcagtgtcttcatttctgaagacggggaaggtcgtatgtgaggcgcaaagcctcctctagcagttgggcgttgcgagggtcagaggggacaatgactgtgggagtctggagagggtgtgagctcatttaatgccagagtttctttcctgcctcctggacttcggtgctattttgggcgagccaactgccctctagatacacctgcatctacggtccggaaggaagacatatttagaatagagcctctaagaggaaagaagaagaccatattgccaggtcccgcacaatcagtgactccccacaaagtgaaacagctctccagcaggggcaggttgaggcatgggagcagcgtcactgggaagtacagtttcttcgggatgaacagctaaagtttatttcaaagctctggaggcgggggcggggcaaggctggtttccatcaccttcctgttggcggccaaaggtcggcgtgcacggacagcggccagtatgctgcacggaggagatgtgggcctgggcagtactgccacacggagaagcggagttgaagaagacaggctcagccacaagtccagcagctgggcaaaacctccaccactaaagtatcaggagctgggcagagaaaatagcagcccagagagcaaatccttcttcctgccctaggctgcagtgctcctaacctcggtcctgatcagggagctgctagggtcctggttttctatctcctagggctcagaaaagctaaggaacctcttctcagaaaaacacatttatgtgcagatagcacctatcagagagaatatgccagagagttcaaagtctccctcaagagtagggtcaagttgggaaaggcattgagaatccaaactaggagccactgcctgaaaatctctagtggcaaacagagccacatcaggaaaaactattaattctaagtattggagaatctgaggtctagacattagaaaattgtcctaaactttataaggagaggcaactctccttataacttctactcatgcatcacagttctgccctcttaagtcacacagaattgatgtaaggtacctgtgggtctcctgggagtttttctgaagtgagaactggttataaatcccagttcggccacatagaagttgtgagcctgtctgaacctcagtttctcatgtaaaattcagtgaaaaataggtccttcctcccaagggggttgtcaacattaaacaagagaaagcaagtcaggacttatcacagtccctggcagatagaagtgactgttaacttactcttcagtagcccaaattcagggagatgaaatgctttgtggagtgtctggaaatggagtgtttacagcctgaaaaagggtcaaggaaaaatagaaactacttcagcagaaacctttaaggctgatgtccctaaaagtcttttgatgcttgcaaatgtgaatcatcacacgttccctacacgtctgcccttcatgtc

SEQ ID NO: 317635 - DNA, 4001 bp, Homo sapiens
ctgagggatggacttgggcacaccgtgtacacagaaaagagaatttgtggggaaggaaaaagcagaagagaaaggagctatcaacagccatgggtgggaggccgggcgcggtggctcacgcctgtaatcccagcactttggcaggccgaggcgggagggctcaaggtcaggagatccagaccatcctggctaacacggtgaaaccccgtctctactaaaaatacaaaaaaaaaaaaattagccaggcatggtggcgggcgcctgtaatcccagctactcgggagactgagttaggagaatggcgtgaacctgggaggcggagcttgcagtaagccgagatcacgccactgcactccagcctgggcaacagagcaagacgccatctcaaaaaaaaaaagccatgagtgggagcagggcaggactgactaaagcactggtttgtgccacaggtacaggccgaggcagggctacgctctgattccatgtctacaaagacagaagggattaggatcaggtggtccggaagcctgggtgggtgaaggaagcaggttcctgctgtagatccggtctgcggttgagatgagccaggagacttctgggcactgcgtgtgtttttggcagaaaacgctaggcgcaaagctgccatgggcacaattcctgaggtggaatcctgtactgggaagagtggggcaatgcgaatgcccggtgggcgtgctcaggagtggactagcattgggtgggggctggcagcagggtgcagggaagggatgtttctcagaactcctttcctctttgttctgggtcccctctctccccggaaggagacctggaggaaaaggacagtgcccagcgggacagcacatatgcagaacccggccgcgcctcccgcagacaccaggcatctttctccagcccaggctcagccatgtctttcttctgacagaaaacgtgcggagtttcctcaacaccagtcaatgctccaaccccaacgcggtgtccagcaactcactaacgacaccacccagagtcagcgcagaccccacaagctcagcgctcttcccacaactgctcccgctgcagacgccagtccctgcctctggacacccgtcttcatttctgaacgcctgtctacaaaccaggggcgcccacaccctcaagttcagcaatgtggcagaactactcacagaactgagaagcgccgtgcgcaccgacaccagcgtattctaaaagatgttactcaggaacagccacgcggaggaggtgcacagggcaaagggactggtggaatagttggagcgggcgggtgatttgcttcgcttgctcacacacctcacaaaagcctttccttcaagacccgctggcagtccccaaaccaggagccgcggccgacgctgtcccattaatgagaccccgtttgctcacatgaactttgtttcgatggggcctcgatctcattccgaacagggtaaagtagggaccggacccccggaccacagctcctcccaggcgggcacctcgcacgcgggcgccggcgtcttccagatgagctcctcctcaccccgcggcccagggaaggtgcggggctgcgggcgcagaactgcacaaggagggccgcaggctgggccagagccgccgtgcggggaccgacaggagcccggtccgtcaccggaggggactgagggctgagaggcggcagcggggactccgttcgcagactcggtcccgccgccgccatttcccgccggttccgatgaggcctccccagcctccggacgccctgccccgcacactcaccatttcccgacttcagggtatccgggagtcttagctacaaattgtccaataccctcaggtcacagagcaacgggaggcagaggctgtggctgaatcaccgaggcctcccggagccgagaacgcagagagctgaagccctaaaccaagccctcgcaggagccagaggaaaacgccgcgccagatcccggaagccaacccctcctctctggctgcgggcctgattgggcagttctcattccgacactctgattggatattactccaatccccgccctcgggccttgagtaacagaatttgcaaccatacactccactgatgtggcaagagtgacaggctggggcctccaggccctttcaggcggggctttctctcccggcttggcctgacgcagcccaggggtgttttttttaaccttgttgtgtgtaaggttatgtccacttgtaaaatacacttacacacagacgtgcacacacgcgcgcacacacacgcgcgcacacacacgcatgcacacatgcatgcacacacactttttcacaaacggaagtgatataatgacaattattttaatattttagatttcataacccttctggccgctagtcttttgagtaggacacctgagattttaagagggaagcaatcctttaaaaaataaaatattaatttgtgaattttgcgtttttattagccacgtcaaaaataatatttaaagagtgaagttgtttgtaataatttttaactcattgtatcaaaatattgttttaatatgtgattgatatataattagaaataaagtatatttctgatctaattcttctaaactcactgtgtattttatgtatttctgatctaattcttctaaactcactgtgtattttatgtttgcagcacattttacttcaaaccagtcacattccaggtacccagtagctacatatggcaggtggctgccacattgagcgcagccatgagggctctcttcccttagggaagtgagggcctgaacacctcttttctgctggaagtaagggaccagcctctctaccaacttttctcctcaggctcaagggtgggtgggacagtgcccctagagagagcaggggctgcaagctgagagtatccacgtgaagaccacggtttcccagttgctgtttggtggaggtgtggtggtctcctcggttcagccaggtcgggactcttgtgccacgaccaaaaagaatgaagcacacggataccagagagtgagcaaggcagagtaggatttattaagcaaaaggaaagctctcagaagcaagaggggacctgaaagcaggttgccagaaatgaggctgaggtctgggtcttttatgtggcaagaacaagtatgtcttctgtgggttctgcccaaatgggaggggtaaagttcctcactaagggtgttgcatctgcgcatgcctgggattggccacagtgactccattttggttattacccatgagtgcctaagcgaaacttacacgaggagagccaaaaccacaatgctaatgtcatgttaatgaccttataatgagctgggtcaagttaaggacatttgggttgatttattgcgcctgtgctaagttgggacagtccctttggagcaacatcctggcataagaggaagttcttaaccacatttcttcctgctagctacagaggtggtgcaggtgcggtcccacacgtgtttttcctctccccaggccctctctctatctgcctaaccagcgtccgactgcctcctctatcaaaggttcctcttcctttcaaatatcagacagcaaacaaagaatgttggggccacacaagcagagaacaccatgtcttcagatctcttcacagccttgtcctccagagtttagaagtggagggaaaagattaaaggcaatcttcttgttttgctatttgtccttggacctaatctggacctaatttggacacacaggctgtaactatgtgtttttctcctttggtgtggggcactgtgagtttaagcaccaatcacatgcatccacatctaactgcacttctgttcccagaacgaaggccgtgagtgtgagttgtccaggtccttggcaacaaagaattgaacaaaatgcacaaagtaacaaaggaacaaaacagagggaggaagcatcaaaagcggaaatttattaaggtaagaaatagggtgggtatgggcttgagcaag

SEQ ID NO: 317636 - DNA, 4001 bp, Homo sapiens
ttcttgctattcacatttcaaagcaatagttcccaagtcctagataaagacaagtctgagtcaaaaaagacaaatgacctatttaactgataaaaatgatttacatatatttcaaaaactggtgaaaataattataaaaattttccacctaaatgctttaagaaaagggagaagagcaaaaattcttccctcactctaaagagaaatcattaagcctcttctaatttgtatttgctcctacaacagccaggtctaaggcatggtcttgaattccctaacgtctgaattcttgtaggcacgtaagggatgaacttgggcacactgtatgcacagaaaagaggatttgtggggaaggaaaaagcacaagacagcaaggagctatcaagagccatggggtgggggcagggcacaactgatgaaaggactggtttgtgctacaggtacaggcccaggcagggctacgcactgactgattcctgagtccataaaggcataggagattaagatcagatggtccagaagcctgggttggagaaggaaacgggctcctgctaaacagatctggggttgagatgagccaggagtcttctgggcactgcgtgtgcttttggcagaaaactgtaggagcaaaactgccatgggcacaattcctgagggtagaaccctgtcttaggccaggtgtggccgtgcgaatgcccagtgggcgtgctcaggagtgggttagcattgggtgggggctggcagcaggatgcggggaagggatgtttcttagaactgctttcctctaagttcccagtcccctttctccccgggaggaggcctggaggaagaggacagtgcccagcgggacagcgcctgtgcagaacccggccgcgcctcctgcggacaccaggtgacttcctccaacccagactcggccatgtctttcttctgacagaaaacttgcggagtttcctcaacaccagtcaatgctccaaccccaacggggtgtccagcaactcactaacgacaccacccagagtcagcgctgaccccacaagctcagcactcttcccgcagctgctctcctgcagacgccagtccctgcctctggacacccgtcttcatttctgaacccctgcctacaaaccagggacgcccacaccctcctcaagttcaataatgtggcagaactactcacagaactaagagaagcgctgtgcgcaccgacaccagcgtattctaaaagatgcgaacagacaccagcgtattcaggaacagccacgcggaggaggcgcacagggcaaggggactggcggcaaagttggcgcaggcaggtgatttgcttcgcttcctcacacacctcacaaaagcctttccttcaagacccgctggcagtccccaaaccacgagccacggcagagctttcccattaataagtcctgtttgctcacatgaactccatgttttgatggggcctcaatctcattctgaacagggtaaagtagggacgggattccggaccacagctcctcccacgccggcaccgcgcaggccgccgcggtgtcttccggatgagctcctactcactccacagcccggggaaagtgcagggctaccggcgcagagctgcacaaggagggctgcaggctgggccagagccgctgtacggggactgacaagagcgcgggtccctcaccggaggggactgaggacagagggctgagcgggaactccattcacagactcctcccaccgccgccatttcccgccggttccgatgaggcctccacagccttgggacgccctgccctgcacactcaccatttcccgacttcaggagtgtcccagagtcttagatacgaatcatccaataccggcaggtcacagagccacagaggctgaggctgtggcagaatcaccgaggcttccctaaggagcgggagcagagcgatgaggccctaaccgagctctggctggagctacaagcaaaagccgcgccagatcccggatgccgcaccctcctctctgctgcgcgcctcattcggcagttgtcaatccagcgctctaattggatagagctgtaagtctcccgcctcaggccttgagtgacagaagttgcaaccatacacagcactgaatgaggcgagagtgacaggctctggcctcctggtactttgaggcaggttttttgtgtttgttttttgagtctggctcttctcgcccaggctggagtgcagtggcgcgaactcggctctctgcaacctctgcctcccgggtttaagcgattctcctcagcctcccaagtagctgggattacaggtgcccaccaccacacccggccaatttctgtatttttagcagagacagggtttcaccatgttggccaggctggtcttgaactcctgacctcagggtatctgttcgcctatgtctcccaaaatgctgggattaaaggcgtgagccaccacgcccggcccaggctggggtgttatctctgtgcttggcttggtacagcccagtggtcatttttttaaccttgtggtatgtaaggttaggtccatttataatataaattatacacacacgcatgcatgcacgcacatgcacacacacgtacacatgcacgcgtgcatacacaaacttgttcacaaacggaaacaatataatgacaattattttaatgttttataacctttctggcctctggtcttttgagtaggacacatgagattttaagaaggaagtaatcctctaaaaaataaaatgttagctattagtgaattttcaattttttattagccacatcgaaaataataaaaacaagtgagattgtttgtgataattttagcctactatatccaaaatattattgttttaatatgtgatcaatatataattgagaggtgaagccagctggacttcctgggtaaactggggacttggagaactttcctgtcttacaagaggattgtaaaatgtaccaatcagcactctgtaaaaacgcaccaatcagtgctctgtagctagcaaggggattgtaaaatgcaccaatcagcactctgtaaaatgcaccaatcagcaggatcctaaaagtagccaattgcagggaggattgaaaaaagggcactgtgataggacaaaaacggaacacgggagggcacaattaaggggaaatgggaggtggaataaaagctgaccaccccagccagcagtggcaaccaactggggtccccttcgatgctgtggaagctttgttatttccctcttcaaaataaaccttgctactgctcactctttgggttcgtgctatctttaaaagctgtaacactcaccacaaaggtccgtggcttcattcttggtcagcaagaccacaaacccaccggaaggaaccaactccagacacataattaggaatacctatattttgccaggcgctgtggctcacgcctgtaatcccagcactttgggaggctgaggtgggtggatcacgaggtcaggagatcgagaccatcctggctaacatggtgaaagcccgtctctattaaaaatacaaaaaaattacccaggcgtggtggcgggtacctgtagtcccagctactcaggaggctgaggcaggagaatggcgtgaacccgagaggcagagcttgcagtgagccgagattgcaccactgcactccaacctgagcgacagagcaagactccgtctcaaaaaaaaaaaaaaaaaaagaagtaaagtatatttctggtataattattctaaactcactgtgcattttttgtttgcagcacattttacttcaaaccatccacattccaggtacccagtagctacatatggcaggtggctgccacattgagtgcagacatgagggttctgacctcagggaattgagggcctgaacacgtcttttctgctggaagtgagggaacagcctctctaccaacttttctcctcaggatcaagggtgggtgggacagaacccctagagagagcaggggctgcaagctgagagtgtcca

SEQ ID NO: 317637 - DNA, 4001 bp, Homo sapiens
cccttatcacgacacaaatactttacatccgaagacaagaccaccaatcatcatcttgaaatacggcattctctgcaagccctttaatgtttacagaggcggaagatggtggcaagtctgagtaagtctgcatttgaaaaacgtgtatatgcatcaatgcaatctttatagagcatgtactatgtgctcagaagtatgccatagagcagtgtgctgggaagttcacattatgtgtgttaatactataacatcctgaaaagtagtcccatgcttcccaggatttaaatgcagggccccagcatttctatttgttcttctgttttcttatcattgtttttttttttaaatgcgtagaataatagctcaatatagagagacgggacagatacagaaaggaagtgctaagtgcaattcagaggaattttttatttttgtgtttgtagttattatgagacttgtgaaaaaaaccactgaaactgcagagatggggaacaggttgctggataggatgtctctagaaacactgactttaattttataaaaaagaatttaaggcacaaaagtatattgcttttcctcatttatctgcttttgggtatcaggaaattgtgagcaccagctctggagaggcagtaggggtagccaccccaaactctgatctcctctaagcagttctgtgagagatttcagtgtggggtaagacctggacaaggttcagcagagggtggatctgggcagaactgggacagaaggtgggccctaggcatctgctctctatgcccgtaagtattttcagttttgtcttttctaagcctgcccaagagaaatttgattcccagagtttctgtatcttaatctattttagctaattccctattttataacattataacacacaataacaaggaatttaaccaaaacccttatgtttttctagaccaattatattagaagctaattatttattcttagcaaggtaaaaacaacacaaataataacaacaatttctcttctgtcaatgaacagctgatcagatggtggcattaaaactcacaaaacaataaaagggaagtaacacaaattaagcttaagtctccatacagtttctgtctttgtactgaacacacgatgctgaattcaatcatttattcatgtgctctagactgcaagttccttgatggtagggaccatgactgctttatgtctttttctaatgatcatatgaaatagaagcaattagcttattgatcagtttgagtctccagattcctcatttttcaccaaagaaccagaaaactggagcaattcttatctgggtacaaaccaaggagattctttctgtgaggggaggaacaaaccctgcatgagtcacttatcttcctctgaaatgggagcagaattagaccttgtcagactgaccccagtctgcacatgacatcctcaaatgtctcattactcaaagatgctgagtaatgatgccctcatagtgatccacggaggagacactcaggctgactttgtgtggtgcaaacagaaaatggcgctgtcctggtggtcctgcacatcttggctccagatgtgatatcccctgtccctgatcagctaactctgaggtaagaagaaggacaaaagtactctactcccataacacagtatagaggaggaaggtacacttgtgattatggttgtcattaaggctctggatattttgtggccttacctcccactgctaagatgcttgtttacacttaaagattctgccacaggattctgttcccatcagaagcctctcacacagctgtagcaggtcactgaacaagatctggaaaactcaaagggccccactctaaaaatggggcttaagatgtctacattgacctctcatgatgcagaaaatgtcttctgtgagtttttcgtatgtcttcaacccaaagtctggtccagtgttgggaatcccaggcagaggccaacttttgtatgcagattctaggtgggatcaatgtgcctctacattcttaggggttagagtaagcagagtaaaaccagaggagagatcacctcatggaggctccttcaacacattcttaagaatattttgacctaaaaggaaatactgggataaacataatataagtagagagttttctggggccaaagcttgaagactgcaatcctggagtataaagctacctgaatatacactccaattacaagtatatttgtaaaggcaaaaaggaaggcaggatagaaagttgtcaggaattcttatttacagaagtaacattggttagtgattggttatatacattgttaagctattgggtgtggattatagtgtccagtgtggcattattaggttaatttatagccacttgtgccaatagcaagcaatttcaaaagacaaatagttcaaagacgggaacagtacatcactgtggtctcattttaaccagtctctgggtctgatcattaaaagaacatgtatttctcaaataaaagttcttttcttctctcaaatcccagaaaataaattcagaatttggaactgcacatttaggtcttggagggctggtgagctatgcacatttgcgggcatttgggcaaagggaggagggagagaattgaagttctcaagtttaatcaatgcacatgtatgatcctggttgggtttatgggccccgtgatctctgaatccgtgtcagatctgaagatgacaggagcactgaaggaggtgaaataactgattgctgtcctgaagtgatttttgtagaaatctagtctaactgctctagaagggactgtagatcccaaatagagagactattttgtttgcagatttggggagcaccttgctgcactttgtcatacaattgtgggttgtggctggaatcctgagaagaaaggtttttctctcaagtgaagcctggtgggcactttgtatataacgtccagtacttctaaacagtgcatggaaaatatgactaaaagaaaaattttcagccaggcacggtggctcacgcctataatcccagcactttgggaggccaaggccggtggatcatgaggtcagaagatggagaccatcctggccaacatggcgaaaccccgtctctactaaaaatacaaaaaaattagctgagtgtggtggcgcgcctgtaatcccaactactcaggaggctgagcaggtgaatcgcttgaacctgggaggtggagaatgcggtgagccgagatcgcactactgcactccagcctggcgacacagcgaagactccgtcttaaaaaaaaaaaaaaagagaaaaattatctccaatcctaaaaaaattttccaccataatagaacagcaagaaaatgttttgttatataattaaaccaaaatgtgatgtgcatcacaggcaatctactaagagactgcaaacacagaaaaaaagtcaccattagttcttaagtagaagacttgaaagcaccatttacacagtttattatttcacctagtaatttgggaggtaatctgggttttctaattggtaatattcaaaagaaaaataaacttcccacatcttcatgacaggacgtagacccacaatgtggagccaggtacctgctgaaggcagcctcccaccctcctacagaaactgtgggatatattcttgctattcacatttcaaagcaatagttcccaagtcctagataaagacaagtctgagtcaaaaaagacaaatgacctatttaactgataaaaatgatttacatatatttcaaaaactggtgaaaataattataaaaattttccacctaaatgctttaagaaaagggagaagagcaaaaattcttccctcactctaaagagaaatcattaagcctcttctaatttgtatttgctcctacaacagccaggtctaaggcatggtcttgaattccctaacgtctgaattcttgtaggcacgtaagggatgaacttgggcacactgtatgcacagaaaagaggatttgtggggaagga

SEQ ID NO: 317638 - DNA, 4001 bp, Homo sapiens
agcaggcaggcttgccttccttgatgaagcgagtgggaactcccaaaaaaggagttttttaacagcaaataaacctcagaccccccaccgaaaaacgttggaagatcagggatccctggaggaacaaggtcccagatttcagcaatcatcctaccagtttgggcaataaggtgccaagccaataccgaggatcaataggcgaactgctgcaggccgggttaccttcactgaggatctctcagtgcttatcaatgtcaatcgagaaaaatgacaagtcttaatcatttcaggaggcttatttcccaaagttaaggacgcccatgacacagcctccggagatcctgacgacgtgggtccaaggtggtcggggcacagcttggttgtattcattttagggagtcacgagatatcaatcatatgtataataacaggccggacagggcgcggtgtctcacgcctgtaatcccagctctttgggagacagaggcgggcggatcacgaggtcaggagattgagaccatcctggctaacatggtgaaacccgtcactactaaaaaatacaaaaaaaaaaaaaaaatttgacgggcgtggcggcgggcgcctgtagtcccagctacacgggaggctgcggtaggaaaatggcgtgaacccgggaggcggagcttgcagtgagcggagatggtgccactgcactccaggctgggcgacagagcgagactccgtctcaaaaacaaaccaacaaaaaaaaaacaggccgggcgcggtggctcatgcctgtaaatcccagcactctgggaggccgaggcgggcggatcacgaggtcaggagttcaagaacagcctgaccaacatggtgaaaccccgtctcaactaaaaatacaaaaattagccgtgcgtggtggcacgcacctgtaatcccagctactcaggaggctgaggcaggagaattgcttgaacccgggaggcagaggttgcagtgatctgagatcacgccactgcattccagcctgggcgacagagtgagatttcatctgaaaagaaaaagaaaaaaaaaaaaaaaaaaaaaaaaagaaggacattggttctgtccagaaaggcgggggcaacttggaacagggagggggcttccaggtcacaggtaggtgacagacaaatggttgcagtttctgggtttctgataagcctctccaaaggaggctatcaatatgcatttatctcagtgagcagaggaatgactttgaatagaatgggaggcaggtttgtcctgagcagttccgagcttgtcttttcccttagtttagtaattttggggccccaagattttcctttcagaaaaaagaaaatgtggtatatatacacaatggagtactattcagctctaataaaagaatgaaaccctatcatttgccacaacacggataaacctgaggatatcatgtaagcaaaataagacacagaaagacaaatacctcatgatctcactcatgtggcatctttaaaacgaagttaatcattaagatatttaccagttgtctgaggtattgggttgaattttctttttttttttttttttgagacgcagtctcgctctgttgccaggcagaagtgcagtggcgcgatctcggctcactgcaacctccgcctcccaggttcaagcgattctcctgcctcggcctcccgagtagctgggacgacaggcacccgccatcacgccccgctaattttttgtatttttagttgagacggggtttcaccatgttggccaggatagtctcgatctcctgacctcgtgatccgcccgcctcggcctcccaaagtactgggattaaaggcgtgagccactgcaccctgccttccaaattaaaaactttttaaaacctcgtacctcgccgtgggcggcgaccgtcgcggactcgccgggaagacggccccacggagccgggaacaccgcccgctgttcgtatgtccgaggtgacgccccgctgtggcgggctggcggaagtgacgcgctgctgtggcgcgccggcggacgtgacgccactgtcgctgcgacgataaggcctggcgttattgcttagaggcggctacctggagccggaagcgcggctgcagcagggcgaggctccaggtggggtcggttccgcatccagcctagcgtgtccacgatgcggctgggctccgggactttcgctacctgttgcgtagcgatcgaggtgctagggatcgcggtcttccttcggggattcttcccggctcccgttcgttcctctgccagagcggaacacggagcggagcccccagcgcccgaaccctcggctggtacggacccctccccggcgtctccgctcccctgaccccacatcccctagaagaccttttttctgagcctcgctgctcggatttcttctcggcgctccccggtggtctcttccattatggtccccacctcagaaattttttttaaccgctccagcgtctcttttctgtattcttacaactttgtggcaaccacctctactggccccacttcgaccttccttcctgatcaccacaaagtaagctgtgtccatacctgggatccagcctctccacttctactcgtccagagctcccgcccctttcctgagcagcctttgggtcactccccgttataggcgccctttttgccccctagcacacaacagataagacccctgccgatcccctcgcgttttggtctcttatattcctccaagatgttttccctgcctaggggctaaggcctctctgcgttaggcctcttcctaggcttcacctacccagccatatacagcaagtaaaggcgccctggttctggaccacttgcacacatcgccagccgctgaccatgtaaacgcagtatgtaaacgcccagccatcccgtagctgcagctctgcgttttaggtcaagctccctaaatgtcccattccaggacccttacgtagggattctcctaccccagtactcttcaccatactgaggataattcactgcttgctactgtgggtccctaagattactcctgttaacccccgtcctttccccccagcactacctaccaagtacaagtcgcctccttttgggttgggttatgtagatatcgcagggtatgtgctggagaagtaggtagaagctagattgtgaaggtgcttgatgctaaggaaagtttagagttcaatttccttttttttctttcaaacacttaggagccagttctaactggaccacgctgccaccacctctcttcagtaaagttgttattgttctgatagatgccttgagagatgattttgtgtttgggtcaaagggtgtgaaatttatgccctacacaacttaccttgtggaaaaaggagcatctcacagttttgtggctgaagcaaagccacctacagttactatgcctcgaatcaaggtaagtttgccttaatgttttatgaatcatggtttggctgttttgaagatttagagggggtctctgtagtctttcgcttggagttgcaattttaagaaagtggaaattttgtgctgtcagttggctggggcaatagaatgttgaaggagcctcacacgggatggaactgagacccatcatttgtgccccatgtcaagtagccaaagctcatgcttcatggcaaatataaaagatttagagcaagatcatccaggctaacctaccccaagatatgccattcttggtgacctgctttcttctttaatcgtcactgggtcatttacaatcttagaaggagcctttagagttaatctagttcagtctctagactttatagataggaaagcaaactcagataagttaaatgtgacttctccaaaattatccaccagtatacataatgatcaaatcagtatgttccggcctcaacaattaccactgtttccaccatatccttcaggtgtccagcctactgacagcagctttgaagtacatagtgcatttcccaagaaccgtgggtaaagaaaaaagt

SEQ ID NO: 317639 - DNA, 4001 bp, Homo sapiens
atgcccagctaactttttgtatttttagtacagatgggattttgccgtgttggccaggctggtctcgaattcttaacctcgtgatccacccacctcagcctcccaaagtgctgggattacaggcgtgaggcaaggcacccagccctaaaatacgctttctaaaatgatacgttgcttcacttcgtttccaagaatctatcaacaatgtaagagtttattatacacatatataacttatttaggtgtgtgtgagagacacacatttttatatagatacagatacacgtcaatgacagaatctcaggcttcctactaaataagacaaaattataatagttattaagaaataaggtaatgattgagcgcttaatattagcaatgttctaagctggttaatgacatagaacatttaagaaatctagaaggtgagtaaacactttaatccagtgggggccaaaactttgaatgagagggcttttttgcttatctaaggtggtggatatcacaaaacttattcacgaacctttttctttaagctcatcagctatcattagtattaatgtatttcacgtgtggctcaagacaattcttccaatgtggcccaaggaagccaaaaggttggaaacctgtgctttaaactatattataatttgaaaattttcacatacagagtttaaatcacaaatctcagtttatactaaaacgataacattctgaagtaacattacattttttcatatttaggaaaatgcctattgttctgataaaattgctgagtaataatttttgtagaattatatttgcaacctctataggattaaaaatcactaagcagaaaagacgcaacatctgtccctgatgttcttgggatttctgaaccaaattccaatatgtccactactcaccgtgcacattttagacatgtacaaaaagaatatttgaaaaaaatacactgacatagagctcctcaatatacacatattcctatgtctccaaatgcaatggaacagcagtcagatcatgcagcccctaataaacgataaagtggacattggctctccctgtaaacttgaagggagatcactaaagaaaaaagagaattcttagatttaacagcatgggacagaagatgcccctattcatgaatatgagaaaaaaatgcagccttttcagaaattattttcactggagcagagcttcccaaactacattttaaggcctagcttccttctggaccttggtcccctggcctgtgtcctctccttcattcactgtcacctacctgggtgtttggctactgtctcatgtatcttcactttgtagggctcctttctttgctccagatagatgaccaggtctgggttagagatagcaacacctgtttattttaaaaaattaacatgctactgttagggattctccaattacctacctaatactatactaagtagaaaagagaaattatggaagatcctacataattaatccaaaaattgtttcctggcagaatctttaaaatatttaagtattttaaatctgtgggttctaagttccactaccaagtactactgaatcaaaataagcggtgcaaattgtattttaagatgtgggaaacaataatttatgtcattgaatttcgagaattaccactaacctaaaatggaggacacaaattagctcaagaaaagagaaggtttacgtaaagataaaacatcttaatattcttttttacaccagcaaactcccaacagtttcttgaagaaagaaactgaaattcacacaaagcagaaggttcccaagagacattctacaaaaatagaaaataaaactccctgagggagtattaggaattatttactgaagttatcctcacccagggagatcaggttcctgtagttctccaacatcacatctctatacaaattctgctgggcagggtccaggcatttccactcttctggagagaattctatggccacatccctgaatgttaagagttcctgaaaatatatatgtatcaagtgacagagttcttaatttgactacaggtgaaatgagttaagagaactagttctgacatgtgactgactgagattatctgataaaataactttcaacacagtaatgttctctaaagtattctatagctctgcagaaaaaggatggcattccaacagtttctgttcctgcaataaaaataacgggctacactgacctgcccctaccaaaaccaagcagagtaggccctgtgacctcctggaaaaaaagatttaactcagctctcatgaaagtatctggaatgcctcacgcttgaccttggcctcgctgtaatatgcgaggaacttaatttaaaaatcagaaatgtttccacccagaacaacagacaggatctgtggggagggcacaggtgatgatttctcttcaaattgtccgtgtgatcctactgcaacactgggctgagagtcacttagctaagcgctgcctctcaagcttcaatgcgcataaaaattattttatattctcggcctcactgtaacaaaattttgcaggtttgaaaagagttcatgaattagcttcttatagcaagtcttctgttaatgctgatgttcctccacctagacacattatattaccactcggctagagaaagcaggcacagcatagagtcccttaccccaacacccttatcacaacacaaatacttttcatcccaagacaagaccacaaatcatcatcctgaagcacagcattctctggaggccgtttaaagtttacagaggctggagatggtgtcaatgtctgagtaagtctgcatttgaaaaacaacatgtggtccaggggtggtggctcatgcctgtaatcccagcactttggaaggccgtggtggggggatcacaaggtcaggagtttgagaccaccctggccaatatggtgaaaccctgtctctactaaaaatacaaaaattaaccaggcatagtggcgtgcgcctgtaatcccagctactcaggaggctgaggcagaaaagtcacttgaatccgggagctggaggttgcagtgagccaagaccatgccactgcactccgcctgggcgacagcgagactccatctcaaaaaaaaaaaaaacaacaaaaaacaacatgtgcgcctgcattaatgcggtatttatggagcatgtactatgtgctcaggagtatgtcacagagcactgtgctaagacactcacattatgtgtaaattcttaggacatcctgggaggtgggcactaagtgtccaatacttcccaggatttaaatacagggcccagaattaccatttcctttctattttcctacaattgatttgttttttaaaggtatagaataaccggtcaatataaatagatcacaaagaaacaaaggatgtattaaatgcaattcagagaaatttatttttgtgttgtatttaagatttgtaaaaaaaaaaaaaaaaaaaaaaaaactgcagggatggagaacaggttgctggatgagatgtctctagaaacactggttttaattttataaaaaagaatttaaggcacaaaagtatattgcttttccccatttatctgcttttgtgtttcaggaaattgggagcaccagctttggagaggcagtaggagtagtcactccaaactctgatctcctctaagcagttccgagagatttcagtgtggggtcagacctggacaaggttcagtagagggtggatctgggcagggttaggacagagagtgggccctagacttctgttctctatgccgctaagttttttcagttttgtcttttctaagcctccccaagagaaatttgattcccagattttatgaaattttaatctattttagccacttctctgtgtctttaataacatacaacaaggaatttaaccaaatcccttatgtttctctagcacaattatattagaagctaaatatttattcttagcaaggtaaagacaatacaacttctcttctgtcaatt

SEQ ID NO: 317640 - DNA, 4001 bp, Homo sapiens
taaaggaaggggaaaaaagcacaacccaagccctttgcgtcgactcctgcgtaccgggaaggggaaagaaagaggaatgtttgcggagcggactgcttgcaagtgcccttgctcgccacttcggctgcggcccgggtgacacggaggcgcgggggcgcctggcccgagcagcccgcgcccccctcccggtcccctgggcaggcaccgccgcggttatttcgcgagggggagatcgatcgccctgcctgtctgcagcggaaaagcacaagctcacacacagcccgagcccgagacaccataaccttaacccttcccccaccctccgtgaacttcaggtgaccgaccacgtcggcctgacacccgggcgggcgggcgctccggctccactcccgcccccagcccgggttttgcaggatcgggctccgagcagcgccaaaccgccgggagaggggagtagtgtggggggagagaagagaaattgaccctccgtctcccccgacccctccctccggcgcctcccgcgtcccctcctccccgtcaccccgccccacgccttctcccctgccccctcttccctgcattcaaggagccgggcggccccgggggatatttttagttgcttctttctccttcacttttagctttagcagcatctcgaaacactcaaagcggagaaagactggggggttggggggagctggagagggagtgggggaaaagttaagagtcgcgcaaagaaaagccggagggagggcggagagggaccgggggcgcgggtggaggaggggaaggggaccgggccgtgccggcgggtgtgtgtctccagttggcgtgtgtggctgccgccggggagggctgtgatgcactttagtcctggactctgctcaggctcgccaaggagggggtctgagagcccgagtctcgcccggctccgtctgctccgactgaccccgcattttattgcggccaggagccctgctcctccctctcctccgctctgcagggacctcgcgcgccgcgagccgccctgcctcctgccttcgcctcggcgcagctcccgcaccccacatccgcccgccgctgcccggcctcgccccccgcccggccgccccgcgccccggcgcgccccctcgcctcggcgccgcgggagcagccgcccggcggcgcgtgtgtacccgtgtgtttgtgtgcggtgcccctacaccctccccagccgctcccgcctcgcccgcccccgactcccctcctccgccgccgcctcctccacctccgcctcctcctgctccagccgccgccgccgctgccgccggcggctcgggggccgaccaaccccggcgcaacctttagccagggacggacctctccctggatcctgtacccggcggctgctgcgcgccctctccccgacacccccaaacgccatgtcacggcccccagccctccgcgcgccccgacccccgcaccctcaggcgccggaatccacaaggaatttttttttttttaagattccaacctctcccacctccccccaccaaacccccgataaaacccccggcatccacactactcccctcctcccttctcttgccccctccccccagcaacccagagtgaggagggggaaggggagggaaagggaaaaaaaagcccgatctcaaggaaaaaaagggggggggtgagagaaagaaagaaaaagagagagagaatagaaagggcacggggctgatcatcaccaacatggctgcctcagcatagacctaaacgaggagtaacccgggctgtgtctttgtcagtttcacctctgtaaccctaaactaatgcagaaaacaacggaggaggctgcggaggggaaagaggagagggagggcgagaaaatggcacgagaggaggtggagaagggatgacttacgtgagggaaggcgcttgggctgctcctgcttcctcctgggcattttcccccttttctcacattctcctccttggttaatgtgagatcaaataaacccccgtgggggcagagaggcagacactggcaggagcggggaggtagttggggggcgggcgggcgggcagggggaaaccccttctccggtgtgtgcaatgggttgaagcttgtttcctggagccagaagaggggttttcttcttttctttcctttcttttttccttttttttttttttttaaatttttggtcgtgcacctggcttgtccccgagcgtaatattcttcaatggaaacggatctaataggtgtgagtgtgtgtgtgtcctatgctcgcgtgtgtgatgggaggtataaataaatgagtgccggtgcggcggtgtctatggccgcgctctgtgtctccgagcccctaacactaatgtcgggatcaaagggcagcggcggcggcagcacagctcacagctcgctctcttgctctctctctctctctttctcgctctctctcctctcgcgctctctctctcgctctctctctgtcacacacacacacacacaagaggcacagactgagggaaagagcgagagctacacacacacacacgcacgcacacacacacacagagcaaagaggaaagtgccccaaggctcccagggcggactcagcctcggatttacaaccgctctgtctggaaagaatggggggcgcgcgtgcgggggtgggatggagttcttcaaatttatcccgctagtcaccaaatctagggggaaaaagtttttctcactctttaaacaacgattagttcattattttactgacttttaaaaaggaaataaatttctctcttcactttcttttgtttattaagctacattttgttctgtatgaaattctgcaggcttttgtccctaccccatcaccttaaatctggaggttatcgtctcccacacactcttcaaaaacattccaaaaaaactaatttaaaaaaaatgaagacaacatatggtgaaatcaataacttggttgacagttgacagaataagtgcccagttttggagtgtccactggagttaaaactgaaaaatgctcctaaatgaacattacagctacttgacaaagagaggaaaataagattaggtcacccctgatggttgctttaactgctacgtgatactcctagagtgcacacagcaatctttacttcggaaattcactttttcccctgctatatactgcaggtatatgaagtttaccctgaagcaattccagtgtgcattatgagcccaatatagcagttttcattaactgatacatactttcattaccttacaaatcacacatctttcttcaaagagagacataaaggagaaaaatagaaaaggacgggtctcactagagcacaaaaggtacttggtgaaagaggactgttctctttgtgacttgcagtcatttggataaaagttcactcagaggttgttaatgatttaaactccaaaacctgctactataattgaaataaaaatggtctgaagaagagttgtttcataaaactctctttgtaagaggaaactttgaacttagcagaatacattatatgtcatgagtcatgtagctagaaaataaaaaggtgcattatttaactacatcttccctttttagcttttttaaaactctgactcatcatcttattatgttaaatattttcctaccaatttttaaatagaccttttcatcaaagaaagtggaggcacagtaaagacatagaacattaaaatgacactctataagcctacatggataactcatgcctctttgaggttgagttaattcttacaacttcagtggtgttaaagagagccatgggggttaaattctgacttgccttattaaaaataataataaggctttatattgcacacttttataagtgaagcttaaagagtgctgtatctcccaaaagatgtctttcactgatagagaaatctcacgttcaacccctccctgccaactccccccaaaagatctagcttcccagtaacaagtaatgctattgaaagc

SEQ ID NO: 317641 - DNA, 4001 bp, Homo sapiens
atacagcttcaataaggtcttgatagttctggccttgttgctcagctctagctttttaagaaaaaaagtgtagattcttagattagaaggctttcttttattattattattattattttttgagacagagtctcactctgtcgcccaggctggagtgcagtggtgtgatctcggctcactgcaacctctgcctcccaggttcaagcaattctcctgcctcagcctcttgagtagctgggattacaggcccacaccaccacacctggctaatttttgtgtttttagtagagacggggtttcatcatgttggtcaggctggtctcgaactcctgacctcgtgatccacctgcctctgcctcccaaagtgctgggattacaggcatggaacacggtgcctggccgattagaaggctttctaattcaacccctctcatcatacagatgagcagtctgagatgcagagaggggactgataacaaagtcatagacccagggaagtgactgttcataggggttctctggttcaacagccctatgcgatgctggaataacctagacaggccaagctgacaagagggcaggagagtgagtctggaaccaagatatgccctcccaggtcacagcgctacattgaagagaaacagactgtgccttcttgaatttcggactgcattctcagtagctgaggccctacctggcagcaaaatatctggtcctggctctgcaagcagttgttgcctctggcatgttagagcccttggccaaagggctgttcctgtcttcttgttctcaaggatagctaaccagcctgcaggtacatagagaaaccagccctgggcccaccgggctgcaggcactcgggagctggatctttcacaatctccagacccaaaggtggcttggcgattatttgtttatcaaactgcggcttcccagcccactgcctgcccacacccacctaccctcccgcctgcccacaggccagcctccctgctcttcccacctctgggacaggcagggccctccatggttttccagatgtgtgcagggagttctcctcagagcccccacagtcagacaatggccacacactgcttcctaggccttcccaggcagtgctagaaggagacgagcagccttcccaggagaggcggccggcgccgctgataaaatattggcaaaattatcacgaaaagccagagtcatgaagctatccctctgccaaggagcacggaaagcaccaaaaaagagcctgggggtcatgtgtccagagatgccaggcttccttcctctttccaggcagcccgagcgcaggctccctcacctcccgcccccacccctgttcccatggcaaaggagaggaggatccacttactgctagtgttcatggtgatgtctttgcactgggtctttcattcaatacggaggccccggctgctttttaaatcttccgttcttcgaacctcactcatcacctggggggtgaaaaggcagtccagtgccagctctgtatcctcaggtgctctctctccctctgctgtcccctctctgtctgggctgtagcccctggccttgaaggcgcgtggactaataggcgcaggtgagagcaaggagaaggaggcggcaggacaccggcgccccggtcctcctgctcctcagattggaatcccgggcagaagtggggttggcagcgcctgctcgcgcgcaccccggactattcctgcccagcggctccggagcccaaagggggtgtggaccacagggaggcagggcgggggcagcgcgtccccgcccggcttcaaggagcagcgacccgccccggaacccacctctcggccagtgtcgggagccagaggcccctgccccggcccctgcgactgatttcatgaatcctggtcctcgtctggggtctcgaattccagggctagcaatgcgaaataggggagctcgacatccatgatgcgggctcgcgggttggcagcgcagggggcgcggccgctcgctgctgccacctgctggacgcaccggcgcgtgtccgaggccccgccccgccgggcttctgcctgggccctagggtgtgatgggagatggacgaggccttgtgagatggacgaggccttgtgtcctgggaccaacgagggagtgcttgagcgcttgttttccctccctcgatcctggggttctaagggctcgacaatgataggaaaagaaacatcattaggaggggccgtgaaggaaaacctggctttgcaggaagacagtttccacccggctctgctctggcaagcttggcgcagtctaggctcaagccggtcactaccgtctctgcctcatctttctcaactatgaatatggcgtctggacaagtggataacacgtaaggggctcttccagcctcccagcgtttatgtcccctcttccctcacagattccctttatcctctatcgctgattcatcattagaattgtttattacctcttttccccacgagaatgttagctccgtgaaagaatgggtctgtccgtagggttcacctacaggcccccaatacctagcacagggcccggcatatagtggctaccaataaatatttgttgacagagcaacccagacattttctgggtttaatattacacagccctaagagtagactgcctaggcgccccaccctgaaacacttccccgtctgaggagaacagcaggtatgtggcctcacaggtccaccctagttttcatatggtcaactaactcttcccccaagttgttgttgtttttttttttttttttgtaattatgtcttatacgtgtgtattgtagaagtttatattccaaagtgttttagtcacaattgattcagtggggtagggctctttacattcctgtgactacttactctgtcactttctgaacctaattcatgatcatagaagcatgacttttgagtgctgaaaaacaagactgtgagggcacatgatccttgtctatagcatgacttcaattagagcatgtgcagactcaaaaggctgtgaacactcacagccccagcttagacaaggaaacagggtgtcagagaggctgggcaacgtgccctaagacacacagcatcttgtggcagaatcggaccagatcttctcacttctagcttgatcctgtgtgagagtggctcagtgcactaaagtctgggatatcagtgtgagattagatagctgccctattaaaattggggaaagacaaatacgatgtttttatacaatgcttttagataaatacaacgtttctaccttacacagggaggaaaaaaaggatatggctcatgaccccgagaggtgatcaggattaaagaatctttggataaacctaaggatcaatagatttgaaacacatttgatagattgttaagaattttgtccacatgttctcactcataagtgggagttgaacaataagagcacatggacacagggaggggaacatcacacactggggcttgttgtgggataggggactgggggagggatagcattaggagaaatacctaatgtaaatgatgagttgatgggtgcagcaaaccaacatggcacatgtatacctaggtaacaaacctgcacgttgtgcacatgtaccctagaacttaaagtataataataattttttaaaaaagaattttgtccaatggggtggaggtaaaaatagccctaatgtcctcacggtcgttcttaaaattttgtgtcgataacaaacgcctgagatacctccaaaaatgcagattcccaggccctggactcccttgctcagcatttgaaacaagcatcccaggtgattcatagacagctctttgaaaagggtagaggcctaaaatagctttgaaaacgtaagtgattagtaaatatttaaattattccactttatgtgtcctctacattttcagatgggattccttgttcagtttccaagttgcaggtaacttgctagattctaatgcttggaaaaacatttttct

SEQ ID NO: 317642 - DNA, 4001 bp, Homo sapiens
agttccttagcattccagagagagaaaagggcagagtcagttgcctgtttcttttcttagttccttgaaaaatagatgagccatctttcttttctgtcacttagtgggaaaggactctcataaatacatttttttttcctagagatagtgagaagtgacaggcaactcacatctttatttgcctgaaaacatgcaaatgcaaacatgtgacccactagctgatagaggctacaggattttcctcttttcctgagcctggtatgaagccaaaacaccattccagcctgtcaaaatcaaaaggcaaaattctttggctgtaagaggcagagggagtccagccacactcgctagcttagcatagatatgcaatacacaaaggaagacagcagagagatgaatcatacaaatacgtagtaaataaatatattttattttcatctcagtagcttttgcttttttttttctcttccatgctaggaggtgggggtggggtggggtgtgtgaggaaatagtaggttttggctggatacagcttcaataaggtcttgatagttctggccttgttgctcagctctagctttttaagaaaaaaagtgtagattcttagattagaaggctttcttttattattattattattattttttgagacagagtctcactctgtcgcccaggctggagtgcagtggtgtgatctcggctcactgcaacctctgcctcccaggttcaagcaattctcctgcctcagcctcttgagtagctgggattacaggcccacaccaccacacctggctaatttttgtgtttttagtagagacggggtttcatcatgttggtcaggctggtctcgaactcctgacctcgtgatccacctgcctctgcctcccaaagtgctgggattacaggcatggaacacggtgcctggccgattagaaggctttctaattcaacccctctcatcatacagatgagcagtctgagatgcagagaggggactgataacaaagtcatagacccagggaagtgactgttcataggggttctctggttcaacagccctatgcgatgctggaataacctagacaggccaagctgacaagagggcaggagagtgagtctggaaccaagatatgccctcccaggtcacagcgctacattgaagagaaacagactgtgccttcttgaatttcggactgcattctcagtagctgaggccctacctggcagcaaaatatctggtcctggctctgcaagcagttgttgcctctggcatgttagagcccttggccaaagggctgttcctgtcttcttgttctcaaggatagctaaccagcctgcaggtacatagagaaaccagccctgggcccaccgggctgcaggcactcgggagctggatctttcacaatctccagacccaaaggtggcttggcgattatttgtttatcaaactgcggcttcccagcccactgcctgcccacacccacctaccctcccgcctgcccacaggccagcctccctgctcttcccacctctgggacaggcagggccctccatggttttccagatgtgtgcagggagttctcctcagagcccccacagtcagacaatggccacacactgcttcctaggccttcccaggcagtgctagaaggagacgagcagccttcccaggagaggcggccggcgccgctgataaaatattggcaaaattatcacgaaaagccagagtcatgaagctatccctctgccaaggagcacggaaagcaccaaaaaagagcctgggggtcatgtgtccagagatgccaggcttccttcctctttccaggcagcccgagcgcaggctccctcacctcccgcccccacccctgttcccatggcaaaggagaggaggatccacttactgctagtgttcatggtgatgtctttgcactgggtctttcattcaatacggaggccccggctgctttttaaatcttccgttcttcgaacctcactcatcacctggggggtgaaaaggcagtccagtgccagctctgtatcctcaggtgctctctctccctctgctgtcccctctctgtctgggctgtagcccctggccttgaaggcgcgtggactaataggcgcaggtgagagcaaggagaaggaggcggcaggacaccggcgccccggtcctcctgctcctcagattggaatcccgggcagaagtggggttggcagcgcctgctcgcgcgcaccccggactattcctgcccagcggctccggagcccaaagggggtgtggaccacagggaggcagggcgggggcagcgcgtccccgcccggcttcaaggagcagcgacccgccccggaacccacctctcggccagtgtcgggagccagaggcccctgccccggcccctgcgactgatttcatgaatcctggtcctcgtctggggtctcgaattccagggctagcaatgcgaaataggggagctcgacatccatgatgcgggctcgcgggttggcagcgcagggggcgcggccgctcgctgctgccacctgctggacgcaccggcgcgtgtccgaggccccgccccgccgggcttctgcctgggccctagggtgtgatgggagatggacgaggccttgtgagatggacgaggccttgtgtcctgggaccaacgagggagtgcttgagcgcttgttttccctccctcgatcctggggttctaagggctcgacaatgataggaaaagaaacatcattaggaggggccgtgaaggaaaacctggctttgcaggaagacagtttccacccggctctgctctggcaagcttggcgcagtctaggctcaagccggtcactaccgtctctgcctcatctttctcaactatgaatatggcgtctggacaagtggataacacgtaaggggctcttccagcctcccagcgtttatgtcccctcttccctcacagattccctttatcctctatcgctgattcatcattagaattgtttattacctcttttccccacgagaatgttagctccgtgaaagaatgggtctgtccgtagggttcacctacaggcccccaatacctagcacagggcccggcatatagtggctaccaataaatatttgttgacagagcaacccagacattttctgggtttaatattacacagccctaagagtagactgcctaggcgccccaccctgaaacacttccccgtctgaggagaacagcaggtatgtggcctcacaggtccaccctagttttcatatggtcaactaactcttcccccaagttgttgttgtttttttttttttttttgtaattatgtcttatacgtgtgtattgtagaagtttatattccaaagtgttttagtcacaattgattcagtggggtagggctctttacattcctgtgactacttactctgtcactttctgaacctaattcatgatcatagaagcatgacttttgagtgctgaaaaacaagactgtgagggcacatgatccttgtctatagcatgacttcaattagagcatgtgcagactcaaaaggctgtgaacactcacagccccagcttagacaaggaaacagggtgtcagagaggctgggcaacgtgccctaagacacacagcatcttgtggcagaatcggaccagatcttctcacttctagcttgatcctgtgtgagagtggctcagtgcactaaagtctgggatatcagtgtgagattagatagctgccctattaaaattggggaaagacaaatacgatgtttttatacaatgcttttagataaatacaacgtttctaccttacacagggaggaaaaaaaggatatggctcatgaccccgagaggtgatcaggattaaagaatctttggataaacctaaggatcaatagatttgaaacacatttgatagattgttaagaattttgtccacatgttctcactcataagtgggagttgaacaataagagcacatggacacagggaggggaacat

SEQ ID NO: 317643 - DNA, 4001 bp, Homo sapiens
gccttgggggccatgactgggattgcagtaatgtggctaaagagataatgctggcctataaaaaactctgagaaaatcccagagaaatcagttttatattactacacagattcagttacaccttggctaaataatgtcccctgcttatgtggtgcctcaggtcaccataaagtgtttaacacaggcgttattcatgttgcccaaaccaactttatcatacaggttttcttaatattagtaacattatcagttattaatattatactactaatagtaatgtaactattaaggtatagagtaattgattgtcaattggatctttccatggtttccaaagatgtcaggtcatagaaatgatgacaattgcaggtgggccattgtttctccatcacaagacagaggcactaagcaaggtaactaaaagtcacttcagtggtctcataatgtattcagttgccttggaaacaggcatcattattattagcaacctcagtggtttatgtattattcttttttcctatgtgtggattaattttgtattcatgtttccattgttaatataaccaatctcaaatcctgttaaaaaaaaaaaaggcttaaacgaatcattgatttctcacaattgtggaggcagggaagttccaaatcgaggtgcttgcccattgtaggtcctagtgagggctctcttcctggcctgtggatggctgtcttcctgctgtggcctcacatggcagagagaagctctccagtgtctcttcttataaggacattaattgtatgggaccaggattccactcttatgacctcattagccttaattcttcactccaaatagagtcacaccaggggttaggacttcagtgtataaatttcggtgggtggtgtgggggatataattcagtccttaataaatgtttttgccatttttactgtcattctgtcacaagaacacagtggagttttccagagactacataagggtgtggtagcagcagggtgaatgcagaagcaggtatgagtagtcagcaatcctccactagccagaccttagagagactcgccaggatgtaacctttatcaccactcctctcgctacacttttgttcttgtggaaaatagttatttcttaattaaaaatgttatgctaacaatgtagtccatttcttttttaaaaataattaaaaattttaaatttccattacggtaaatgtgatataaatagcctacataaacaaaagctgcctgggtgcggtggctcatgcctgtaatcccaacactttgggaggctggggcctcccaacacttcaggatcacttgagtccaggcgtttgagaccagcctgggcaacatagtgagaccccatctctacaaaagcaaaacaaaacaaaactcccaaagtcagctgggcctggtggcgtgcgtctgtggtcctagttactctggaggctgaggtgggaggatcgctttagctcaggaggtcgaggctgcagcgacctctgatggcgccaccgctctccagcccgggagagagctcaacaacaacaacaacaaacaaacaaacaaaaaaccccgcagaagctctctgggctcctcacttgtttaatggaatgaaggagtcccgagagccacacatttgggaaccaccggtctcggccatgcccagcgcgggcgcactgttgcaacacccctatccctggctgcgcagggttcagctctccgcaagtaccttcctcgccttcctaccccccccagcccccagccgccgccgctcccgcagccccggtcccgcgcctccccgcagccccggcgcccgcctacccgccaggcaggcggtggtgtcgatccacttgagcagctgccccgcgctcagctcgccgcgcgcagtggcgtgcgccggctggatggcttggctcatgaccacctcgccgggcgccggccgctccatggccagggcgagagcgctacgcctgcggcccccgacaccccaccatgcccgctccgcccgccccgccctccccgcccagctccagagggcactggcgccgcccgcccgggccgcgaacccctggccgccaggtggtgggagctgcgagtgagggggcccgcactgtcatcccaggactatcgcgagtgggggaaaaccagcgctctcgggtctcaggagaagtctgggaagtgcgcggggagggggctcccgggtagacaggtctggaaggcggctccccgagagccggagcgcgaggaacagcttttgagataaaaaagctgttacactttctagagctgctatcagtgactgtacaaagcagtcctcattagggaaacagtgtctccagaaaacctccagcatctaatggattggtggatgtctgactgtcaggggaggctgctccagggagcacatttacgatggagaactggaaacccggagaagtggagcaagcagctgaggtgataggagccgataagcgacccgatcacctggctggaacccagggctcctgactgtccggaatagcacgaagaagcctagccgactctcacgaattggtggtgccttttcatccttatatttttggcttgccaagcctcagcatggcgacatcagaatggagattctggtatttttctttcctttttaaaagattttttttaaaatgaaagtgaagaaataaggaaatgttgacttgatagcttttaggagcctctgtgtataggtttcaggacaatccaatcataaataggaattgcatgttttcactgaggcaagcatgaagtctgacttatataaaaggcattaaaataacttttaaaagcaaacaaaaacttgtgcatccaagatggtcccattatgtagctatacacttatttcaatgataacgttattacatcgcttttggcactcctccttggaaaatgcctttttaatgacttctgtattgagaaatcataatttaggaattgatagattatcatatattcactccatctaccaataactctgtgagagtcatttattgaccttggacttggccatgtggcttgcttaagaatggaatgtggagagatagcagtgtaccaccagtcttgcctttagaagcaccgtgtttctgttctcaggaacatctgacctctgccatgaggtcaagtagctgcctattagcatctgggtaccagactgaattcacgtattgcagaggcatctcagccagccggaggactcacagcctgaagcagagcaacccagcagacatgaagactcttgagtgagacataactacttattgttgtgtgccactgtgattttgggggttgtctgttatgcagcaatagctgacagttacatgagtgaactgtattaatatttgggaagtttattaaattactggaaataaagtttgcatttaggctgggttgtattattttgggtaaaaagtggtgactaaagtggtgatattgaattatgtgtatggttgtatacttggtttcttataaactaaagaaacttaggccaggcgcagtggctcatgcctataatcccagcactttgggaggctgaggttaggtaaattgcttgagctcaggagttcaagaccagcctgagcaacatggtgaaaccctctctctaccaaaaatacaagaattagttgggcgtggtggtgtgtccctgtggtcccagctactcaggaggctgaggcaggaggatcacttgagccaaaaaggcagaggttgcagtgagcttgagtctcaaaaaaaaaaaaaaaaaaaaagaaaaagaagaagaaatttcaaaaatgtttacgcataagtgtaagaggatgggtttccaaaatgattttcttgaaggggacagcatgtgtatatttgtgtgtttgtctagagatgttgctttaaaagcagacatggtacacaaattcactgctgtgttttcttatctttattatctcctgtttagatgtcttcagattatggtttcatatcttttgttggtttcatactaa

SEQ ID NO: 317644 - DNA, 4001 bp, Homo sapiens
ggccctgtatagtctctcagtgaggcagattccccagtttcccattagaggagggagctgaccactttaggaaatgctccacaaggaaacaggactccactttgagtcagtgccagctaaccctgctcacagacaaggaccccacagggtgagggactttttctcacaggctgctgatgaccccggtcacaagtggtcttgcagcccctagacacctccctgcagccacagaagatcaagtcttcagagagctgaccttggacccatggttgggtggggcctcctgagggtagggcaaaggggtcctggcagtggggagaggctctgagaccatccatcactcaggcattaaatggtggctgttacgaccaccatcaccattattttaattatccttgccctttacctccaaccccagctctagccctgcccttgtctgctggatgtgcctcaggaccagagtgcccctgcacagccagtcacagacactggcagacagaaggagcttagggagctgaggggattagggaggcttcactcactctcccagctcaggggaagtgtccctgtggcctaacttaaggaaatggtgggggtgaaggaagtgattactaggcccaccaaccctccaggttcaggcctgatccagccaagcacttagcattggttgatcaattaaaacctcgaatggaatcccagtctgccaaatatccatgtgacactaggcaagtcaattgacctctgaactcagtaaaaaaagggatggtgccaccgacctcctagggttttccatgaatattaaataacacgtacaaagcctcaggtaaagatttcaagagggtcaacttcctccccttccttggctcagaaaaagctttattaccacttctgatggtgctgtttgaatgtgagataataataaacactaacattcatagagcatttgctgtggcctaggacaggtttaaggccaatttaaggatcaagcactgcacacaaattatcaggctgaatctgcacatgggggttggggtggaggtggagatcctttagtggtattatactctggaggaccccaggctcagagaggggaagtagccggtgcaggtggtagaactggcagataaaagggcctgtggtgagactccaggtgtgggtgtatggggggttgagggaggtaagcgcggaggcgggatcgagcaggggtccttgtagccgcctaagaagtgcagtggtgaagctgactcctgtgaggtggaggggaggggtctggaaacagtggagacacagcagccctgggcagagcagaggagccaggtgaaccctaccttacagaaatcttgtactctggctgaaggacgggcagggaggggtcgtgaggaagcccctcgccgggatcaggaagcctaggtcagtccgggttacatagctgacctgctgtgggacctcggggaccaacaccctcggtttctggtcccaggagatggacaaggacgcaatgtctgttcctggccttggctcagggcctaatctgatccgcggatggtccttgccatcagggaagggggacgcaagaactcggcgggggtttgtggtggggtcgcagagagcaagccctatatctccctccgcagacccaggtgctccccaaacccggcccggagcccgcgagaactgggggcggagggtgtacttaggcggccctggggaccttgacgggacagctcagcagcaggggatgggggctcggcggccgcggagatgtaacacctccacctcgggcgaagacctcatagcctgcgggagatgggagtccgggacgcggacaggacgggcacttacctacgaatagccagagggagccccccgacacgaggaagaaggtcagcatggcggtcagcggggcccggcccggcccggcccggcctccccgacccgcagccccgcagccccgcagcccagcagccccagcagtagccgcgccgccgccgccgctgccgggtatttttagcccccgccctccggccccgcagctcccgcctccccgcgccgctgcggagacggctcaagggggagggcgcggcgcgcactcgcaaccgagccttactccctgccctgcagcctggccggccgggtctggggcttgccccgcactgaccgcggtgtcggaaccgccaagctcccgggcgggggaggggcccggccgcagagcgaaccagccctctccggccccgctctccaacgtcagtacctggcattctgcggaaaccggctggaagggggagcacgggcgacgagcgccagagcgtgacattgagcccaccccgccgccacccaccccatcaacacgcgaccctgcccccgcgcgactcgcagcctgggttttatggctgggcaggctcgaatggcagccgggtcgcggttacctgtcctaggaggtgcacactcctgtgggctgttgcccgctgacaccaacgccccctaggacccgagtttgcagacatggggagcctccgggtgccacctctgcaaaccagtgaggggagggagtggcaagtgttcacctaggctctgacaaatcaggcagctagaccagatagtgcccagatcatctggggacgcacgagttcaggtctgaggctacgcaaggtcacaggagactcagtgtgatcacaggctgccatatgtgttcaccagtagtaacatggtcacaggcagccacatggaatcacaggtgtctcatgaggaaatcatgatcttcgtacacaactgtatgtggcacacgaggtctcaagaagcccctcatagccacaataaatggccatatagccacacacagccacagatgcccacactgctgggctgagggcttggacacctgttgcagtgtctgccattgaaaggaggaagcccagttgcacattttctgaaataataagggtaggcatcctggtgggcaccccatgaacatctgcacctccaagcaagatcacctcttcccaatgcccttgcttgttttcctcaagcatgcagagcccaccaggactccagcaccgaggacagcgctcaggcagccgggccttctctatacgcagccctcccaggccaggagctggctgagccacagcccagaaagaagaggatagaaaaccagagagcagaagtcaggaagcagagagtggaagagcatgagatctcttcaggcccaccagagaccatcagccatgagtgcatgtgggctcacagctcagcagctgggtgtgtgggggggcctgtatctgtagtacgagtacatggcatgtgtgtgcccaggcctgtgtgcaccttgtagtggtgcaagtgtgcagatgtgtgcctctgagtcacttccaatctttacaataggatcctacaccttctccatcataggatctggactcctgggagagctgctccagcttgaactcagccacagcctggcagggactttgctgggatctcaagcttggcagggctcctccaagagggtgtgacagaggctgtatggcaggactcctcccagcaagtaacatggctttgagaatccccccaccccacccatacactcccactggcagcagagtaactggagatctgctagtactgaagaggagacccaggggaaccagaagcctgggcagaaagaacatatctccccagaccagattggtctagggaggtggtcaggtaatttccccataggccagtggttcaacagagcatttcttcacagagcagggggccaggagccaggctgcaagcctcaggcctctgcggcactcagctgcaggagcactccgggccctatgcggctctggcagcctcctcttcagagtgatgtcatgggacacatttagcttggcctccagcaggatgtcgcatcccgttactctccctacagatgtctctgctacttgtgaatattttaattcaaaaaccagtactggagctgtgactgattctagcttagccaagtatttttc

SEQ ID NO: 317645 - DNA, 4001 bp, Homo sapiens
tgaccttggacccatggttgggtggggcctcctgagggtagggcaaaggggtcctggcagtggggagaggctctgagaccatccatcactcaggcattaaatggtggctgttacgaccaccatcaccattattttaattatccttgccctttacctccaaccccagctctagccctgcccttgtctgctggatgtgcctcaggaccagagtgcccctgcacagccagtcacagacactggcagacagaaggagcttagggagctgaggggattagggaggcttcactcactctcccagctcaggggaagtgtccctgtggcctaacttaaggaaatggtgggggtgaaggaagtgattactaggcccaccaaccctccaggttcaggcctgatccagccaagcacttagcattggttgatcaattaaaacctcgaatggaatcccagtctgccaaatatccatgtgacactaggcaagtcaattgacctctgaactcagtaaaaaaagggatggtgccaccgacctcctagggttttccatgaatattaaataacacgtacaaagcctcaggtaaagatttcaagagggtcaacttcctccccttccttggctcagaaaaagctttattaccacttctgatggtgctgtttgaatgtgagataataataaacactaacattcatagagcatttgctgtggcctaggacaggtttaaggccaatttaaggatcaagcactgcacacaaattatcaggctgaatctgcacatgggggttggggtggaggtggagatcctttagtggtattatactctggaggaccccaggctcagagaggggaagtagccggtgcaggtggtagaactggcagataaaagggcctgtggtgagactccaggtgtgggtgtatggggggttgagggaggtaagcgcggaggcgggatcgagcaggggtccttgtagccgcctaagaagtgcagtggtgaagctgactcctgtgaggtggaggggaggggtctggaaacagtggagacacagcagccctgggcagagcagaggagccaggtgaaccctaccttacagaaatcttgtactctggctgaaggacgggcagggaggggtcgtgaggaagcccctcgccgggatcaggaagcctaggtcagtccgggttacatagctgacctgctgtgggacctcggggaccaacaccctcggtttctggtcccaggagatggacaaggacgcaatgtctgttcctggccttggctcagggcctaatctgatccgcggatggtccttgccatcagggaagggggacgcaagaactcggcgggggtttgtggtggggtcgcagagagcaagccctatatctccctccgcagacccaggtgctccccaaacccggcccggagcccgcgagaactgggggcggagggtgtacttaggcggccctggggaccttgacgggacagctcagcagcaggggatgggggctcggcggccgcggagatgtaacacctccacctcgggcgaagacctcatagcctgcgggagatgggagtccgggacgcggacaggacgggcacttacctacgaatagccagagggagccccccgacacgaggaagaaggtcagcatggcggtcagcggggcccggcccggcccggcccggcctccccgacccgcagccccgcagccccgcagcccagcagccccagcagtagccgcgccgccgccgccgctgccgggtatttttagcccccgccctccggccccgcagctcccgcctccccgcgccgctgcggagacggctcaagggggagggcgcggcgcgcactcgcaaccgagccttactccctgccctgcagcctggccggccgggtctggggcttgccccgcactgaccgcggtgtcggaaccgccaagctcccgggcgggggaggggcccggccgcagagcgaaccagccctctccggccccgctctccaacgtcagtacctggcattctgcggaaaccggctggaagggggagcacgggcgacgagcgccagagcgtgacattgagcccaccccgccgccacccaccccatcaacacgcgaccctgcccccgcgcgactcgcagcctgggttttatggctgggcaggctcgaatggcagccgggtcgcggttacctgtcctaggaggtgcacactcctgtgggctgttgcccgctgacaccaacgccccctaggacccgagtttgcagacatggggagcctccgggtgccacctctgcaaaccagtgaggggagggagtggcaagtgttcacctaggctctgacaaatcaggcagctagaccagatagtgcccagatcatctggggacgcacgagttcaggtctgaggctacgcaaggtcacaggagactcagtgtgatcacaggctgccatatgtgttcaccagtagtaacatggtcacaggcagccacatggaatcacaggtgtctcatgaggaaatcatgatcttcgtacacaactgtatgtggcacacgaggtctcaagaagcccctcatagccacaataaatggccatatagccacacacagccacagatgcccacactgctgggctgagggcttggacacctgttgcagtgtctgccattgaaaggaggaagcccagttgcacattttctgaaataataagggtaggcatcctggtgggcaccccatgaacatctgcacctccaagcaagatcacctcttcccaatgcccttgcttgttttcctcaagcatgcagagcccaccaggactccagcaccgaggacagcgctcaggcagccgggccttctctatacgcagccctcccaggccaggagctggctgagccacagcccagaaagaagaggatagaaaaccagagagcagaagtcaggaagcagagagtggaagagcatgagatctcttcaggcccaccagagaccatcagccatgagtgcatgtgggctcacagctcagcagctgggtgtgtgggggggcctgtatctgtagtacgagtacatggcatgtgtgtgcccaggcctgtgtgcaccttgtagtggtgcaagtgtgcagatgtgtgcctctgagtcacttccaatctttacaataggatcctacaccttctccatcataggatctggactcctgggagagctgctccagcttgaactcagccacagcctggcagggactttgctgggatctcaagcttggcagggctcctccaagagggtgtgacagaggctgtatggcaggactcctcccagcaagtaacatggctttgagaatccccccaccccacccatacactcccactggcagcagagtaactggagatctgctagtactgaagaggagacccaggggaaccagaagcctgggcagaaagaacatatctccccagaccagattggtctagggaggtggtcaggtaatttccccataggccagtggttcaacagagcatttcttcacagagcagggggccaggagccaggctgcaagcctcaggcctctgcggcactcagctgcaggagcactccgggccctatgcggctctggcagcctcctcttcagagtgatgtcatgggacacatttagcttggcctccagcaggatgtcgcatcccgttactctccctacagatgtctctgctacttgtgaatattttaattcaaaaaccagtactggagctgtgactgattctagcttagccaagtatttttctgttttcctctgagcatggcttggcttcccctgagagatggggacagaaaggccctagcctggttgtgggatcatggccaggtctctctcctctctaggcctgttccttccactgagtaatgggacttgttctttcctgtcctgagttcccaaggtcttcttccttctctgtgagtctcaatctgtggaccatctgcaggcatgggtagacgctgtgactcaggccctagactgcatgggtgtggcatccat

SEQ ID NO: 317646 - DNA, 4001 bp, Homo sapiens
ctccaaccccagctctagccctgcccttgtctgctggatgtgcctcaggaccagagtgcccctgcacagccagtcacagacactggcagacagaaggagcttagggagctgaggggattagggaggcttcactcactctcccagctcaggggaagtgtccctgtggcctaacttaaggaaatggtgggggtgaaggaagtgattactaggcccaccaaccctccaggttcaggcctgatccagccaagcacttagcattggttgatcaattaaaacctcgaatggaatcccagtctgccaaatatccatgtgacactaggcaagtcaattgacctctgaactcagtaaaaaaagggatggtgccaccgacctcctagggttttccatgaatattaaataacacgtacaaagcctcaggtaaagatttcaagagggtcaacttcctccccttccttggctcagaaaaagctttattaccacttctgatggtgctgtttgaatgtgagataataataaacactaacattcatagagcatttgctgtggcctaggacaggtttaaggccaatttaaggatcaagcactgcacacaaattatcaggctgaatctgcacatgggggttggggtggaggtggagatcctttagtggtattatactctggaggaccccaggctcagagaggggaagtagccggtgcaggtggtagaactggcagataaaagggcctgtggtgagactccaggtgtgggtgtatggggggttgagggaggtaagcgcggaggcgggatcgagcaggggtccttgtagccgcctaagaagtgcagtggtgaagctgactcctgtgaggtggaggggaggggtctggaaacagtggagacacagcagccctgggcagagcagaggagccaggtgaaccctaccttacagaaatcttgtactctggctgaaggacgggcagggaggggtcgtgaggaagcccctcgccgggatcaggaagcctaggtcagtccgggttacatagctgacctgctgtgggacctcggggaccaacaccctcggtttctggtcccaggagatggacaaggacgcaatgtctgttcctggccttggctcagggcctaatctgatccgcggatggtccttgccatcagggaagggggacgcaagaactcggcgggggtttgtggtggggtcgcagagagcaagccctatatctccctccgcagacccaggtgctccccaaacccggcccggagcccgcgagaactgggggcggagggtgtacttaggcggccctggggaccttgacgggacagctcagcagcaggggatgggggctcggcggccgcggagatgtaacacctccacctcgggcgaagacctcatagcctgcgggagatgggagtccgggacgcggacaggacgggcacttacctacgaatagccagagggagccccccgacacgaggaagaaggtcagcatggcggtcagcggggcccggcccggcccggcccggcctccccgacccgcagccccgcagccccgcagcccagcagccccagcagtagccgcgccgccgccgccgctgccgggtatttttagcccccgccctccggccccgcagctcccgcctccccgcgccgctgcggagacggctcaagggggagggcgcggcgcgcactcgcaaccgagccttactccctgccctgcagcctggccggccgggtctggggcttgccccgcactgaccgcggtgtcggaaccgccaagctcccgggcgggggaggggcccggccgcagagcgaaccagccctctccggccccgctctccaacgtcagtacctggcattctgcggaaaccggctggaagggggagcacgggcgacgagcgccagagcgtgacattgagcccaccccgccgccacccaccccatcaacacgcgaccctgcccccgcgcgactcgcagcctgggttttatggctgggcaggctcgaatggcagccgggtcgcggttacctgtcctaggaggtgcacactcctgtgggctgttgcccgctgacaccaacgccccctaggacccgagtttgcagacatggggagcctccgggtgccacctctgcaaaccagtgaggggagggagtggcaagtgttcacctaggctctgacaaatcaggcagctagaccagatagtgcccagatcatctggggacgcacgagttcaggtctgaggctacgcaaggtcacaggagactcagtgtgatcacaggctgccatatgtgttcaccagtagtaacatggtcacaggcagccacatggaatcacaggtgtctcatgaggaaatcatgatcttcgtacacaactgtatgtggcacacgaggtctcaagaagcccctcatagccacaataaatggccatatagccacacacagccacagatgcccacactgctgggctgagggcttggacacctgttgcagtgtctgccattgaaaggaggaagcccagttgcacattttctgaaataataagggtaggcatcctggtgggcaccccatgaacatctgcacctccaagcaagatcacctcttcccaatgcccttgcttgttttcctcaagcatgcagagcccaccaggactccagcaccgaggacagcgctcaggcagccgggccttctctatacgcagccctcccaggccaggagctggctgagccacagcccagaaagaagaggatagaaaaccagagagcagaagtcaggaagcagagagtggaagagcatgagatctcttcaggcccaccagagaccatcagccatgagtgcatgtgggctcacagctcagcagctgggtgtgtgggggggcctgtatctgtagtacgagtacatggcatgtgtgtgcccaggcctgtgtgcaccttgtagtggtgcaagtgtgcagatgtgtgcctctgagtcacttccaatctttacaataggatcctacaccttctccatcataggatctggactcctgggagagctgctccagcttgaactcagccacagcctggcagggactttgctgggatctcaagcttggcagggctcctccaagagggtgtgacagaggctgtatggcaggactcctcccagcaagtaacatggctttgagaatccccccaccccacccatacactcccactggcagcagagtaactggagatctgctagtactgaagaggagacccaggggaaccagaagcctgggcagaaagaacatatctccccagaccagattggtctagggaggtggtcaggtaatttccccataggccagtggttcaacagagcatttcttcacagagcagggggccaggagccaggctgcaagcctcaggcctctgcggcactcagctgcaggagcactccgggccctatgcggctctggcagcctcctcttcagagtgatgtcatgggacacatttagcttggcctccagcaggatgtcgcatcccgttactctccctacagatgtctctgctacttgtgaatattttaattcaaaaaccagtactggagctgtgactgattctagcttagccaagtatttttctgttttcctctgagcatggcttggcttcccctgagagatggggacagaaaggccctagcctggttgtgggatcatggccaggtctctctcctctctaggcctgttccttccactgagtaatgggacttgttctttcctgtcctgagttcccaaggtcttcttccttctctgtgagtctcaatctgtggaccatctgcaggcatgggtagacgctgtgactcaggccctagactgcatgggtgtggcatccatggaacccagggcccagaaatgcccaggccaggctggggagcccttggatatccctcttggtccttagccagcaaatccagccaccttagcggccagccatgttcacacatatctcctcccagactagcatctctaagtgggttggcaggcagga

SEQ ID NO: 317647 - DNA, 4001 bp, Homo sapiens
ttttggtatgagaaggttcagtaagaaagatattaaaatataatttgaccagcagaactccactatgagctgaaaatttagatgatttataaacattaatggaatggtggctgtctcattatgcttatttagtaagggaaacaattaaaatatgtacctagtacaacgatgacttttgggagtaaagaaattcacattagctgttcagatagctagatacatcagcatatttcacaatatattttatttccctggtgcttatgtatatatggatattattgaactttataattcattatctccatacaaagaagtaaacaaaacaaagatacttaactagtaagacacggctgctaaatgcatacgcaccttttttttttaaacaagtttatacagcctgttcttgttaaatattttagcgagaactaagttttaaagcttgataattatagttatccattctgaaatgacatttctcgtgattttactccttgtcacttatatgtatttaagctggcctacctatctttgaacagtataggcaaagaaaaaggaatatggtattagaattcaccttcacttgatggagaaccggatgtggttatctgggtaagagcccaggttacttggatggagagatgggtttgctggtttacactaggaagagtgacgtatttacctcgattctactgaaagcggataaaagcagtaccatcactgtgacctaggaaaagggaaaatgtaagcccactaatatggaagcccattcagaaacattttctgtgaacgataggaggaccagcctcatcatattcctgcttactgatccacatctgctggaatgtggacaggctggcaaggatggagcccccaatccaaacagaatacttccgctctgggggagctatgatcttgattttcatggtgctgggtgccagggttatgatttctttctgcatcctgtcagcaatgcctgggtacatggtgctccctccagataacacggtgttggcatagagatccttgcgaatatccacatcgcacttcatgatagagttgaaggttgtctcatggatcccactggactcaatgcccagaaaggaaggctggaaaatggcttcagggcatcggaagcgttcattcccaatggtgatcacctgcccatcaggaagttcatagctccgttccggtgaggaggatgcggctgccctgaccatctcctgctcaaagtccagggctacgtagcacagcttctctttgacatctcgcacaatctcccgctcagcagtggtggtgaagttatagcctcgctctgtcaggatcttcatgaggtaatcagtcaggtctctccctgccagatccaggcgtagaatggcatgaggcagggcataaccttcatagatgggcacgatgtgagtgaccccatccccagaatccatcacgatgcctgtggtccgtcctgaggcatagagggacagcacagcctggatggcgacatacatggctggtgtgttgaaagcctcgaacatgatctgagtcatcttttcccggttgatcttggggttcaggggtgcctcggtgaggaggatgggatgctcatctggtgccacacggagctcattgtagaatgtgtggtaccagatcttttccatatcgtcccagttggtgaccactccatgctcgataggatacttcagggtcaggacgcctctcttgctctgagcctcatctcccacgtagcagtccttctggcccatgcctaccataacgccctggtgtcgaggacgccctatcatggaggggaacacagcccggggggcatcgtcaccaccaaagcctgccttgcacatccctgacccattatccactaccaaggcagacagctcattgtcagtcatggtgctggctgagatcttccagacgagtgaacaggacaagtgaatagacagtgagtaagagaaagtgaacaggcctaaaacactccagaaatgctttcagacacgggaggctgcaccgggaccacaggtatttaaaggaacacactgactccgcccatgtcctactccaccagttcccagcatttctggatgaggtcatctctgaggtattaatgatggtgatgattacataaacaattagatctttctacataaagagaaaattggctgccaagtggtcaaatctcaggttcctgtaattaggcaacccacacatgaccgtcagcctgcctggtgaggtctctagataactatgatgatgcagtgggggatataaaagcaagatgaaagaaagctggtgctaggtatggcaacactgctgggaggaaggctccctccttagcgtccctgaggattcacttttcctacactagcttaccttttcattcttaagatactgttctgatgaggggtcttaccctgcaatcttcactttttcaagatttttgtttccattagattcctaatcccacagggtgtcatcatcgtagagactgttttagtaaatgaaaataataaatggctaaggatggcctgatggctgtaattacaatgcacttgtgtcaagcaaaatgtagagatatttaatagacttctaatccatcagagatcaagcgaaaggaatagaatgattgctaaagttaacccatatagatacttttttctgatataaatttctaacaaccaaatttcattaaacatttactgtgtctagacattgttcatagaaccaggttcattgggtccatgttaattgtataatgactgaatgtcaactattttgcatgatttattaagatgcaggttataaaaatttatttatttgcaacaactcttgagttctgcaacaatggacaaaatgaagtgataagacaaatttgaaaaattatatatttaaactaatccttaaaacattttgatcttcaagatacatatactatattataacattaaacctctatgtagttattaaaatctatacaattagaattatactagctttccttccatttcaagatatattacaccctgatcacttcatagcaacaatttgtttgggttccatgtttcatatagaaatacagactacctgaaaagatgtgtatgatggtaaaatgtaggacatcagcaatgtgttacagagaaatagcatttaagaaagctcattacttctgctcccctatgtgttaggcgaatagaatataattatctttgtgagctcttgtaaagcaaagaaattttccatgtctacatctgagttctccaaaataatctttatttgggttcatcattcattcatttacccaataaagcttgctttgtaagaggtagcacagcccctatttactggacaaaaaacaccctccagctcaaggccaggagaactaacctgagtctttgcccagtgagcctcttggagagtcatggtgtagcatcaagctgtgagcatccagccctcttctttgtctatagcttgatatagatttattttatccagtgctgtaatatgccttcaaaacctttctggtgacaatcagtcatggcagaatgtatgtttcatcacaagatccatggttttgctttagggctcaccaaaacagtcctttcctttaatcttttctgtaactgcaaaattccttcttcaacagtgttaaaaaccttcacactgaatggttttatgaacttccttgttatgtagtacaaccaagcttttgattaaaacaacattttattgctataggatggtgcttctgggaattttttaaaatcccataacaaactacatgcacattttacaaaatggaaaaaatgaaatacacattgtatttagcacaagtccccatttatgaatgctccggtctggaatataaaacaaagccaagttggtggaaatgttagtggaggagcccacatagtaccaagtgcagccttagatcctacacttactagagtgctgtccttagaatcaccttcaactaagggatatttggtactgagtccaca

SEQ ID NO: 317648 - DNA, 4001 bp, Homo sapiens
ggggcatccaccatttctgcatctgccctgggccacatgatttcaacattctttctccaatgcttgtatcacccctttctaatgctccctgaatcagctttactctcctgtttgctacctcattaatgagttgaataaatcttggccacatttgtatgagtcgtgtttttaacttttgaaaactttgtatagagtcattaaaatcatgttttacagagaatttgatgatgtggaaaacgctcatggtgtgaagtgaaaaacgcaagacacgaaactgtacttatgggtatggttccaattttatcaatatatatccataggaacacacaaagaatgtggaggggaaaaaaaacaaaatatcaacagcaactgtggatttgggggttgcagatcattttcttttacacttttcgttatttcccagatattctacagcaagtgttctccaaggactcaaaactcagagaaggcgcctgtgctaggagcagtaactagctttccttgtctttcttcatgcttttctcctgcactaagcactgacacaggcctggtgctaccctagaacctcctctgtgcctcagtttccccttcggaacaacagctcaaagggcggttcctttgagccctttgggaggaccgcccgacctcggcccctggaagttccgaactgtcggaagagctctcagcctctgggtttgaggcggcccgggggtccagccagcccaccctcgctccgccggtgctcgctctatttgaaaacgctgactgttggtcccccaagcagcagtctggagtcagcccagcccgtctgcagcggtggagccagggctaagccttctccggtcataatgagagaacccgggcaccgccccccgggaccaagccttccgcgaaatctgcttatagcccccgagggatggagccggggaggggattggtgtctgggaaactagtcctgagaaacacggacatcacccggcatcttagctggaaacatcgagtcagaccccttcgcttcacagaaggggaaactgaggaccaaagaaggcggccgtcgggttggcgtggaaagagagccctggtttccagtgccaccgcggacctcaacccgtggcgtggccttgggcaagtcctttcccttttgtgggcctcggtttccccatctgtgaaatgggtgcgtttgacttggccttcagtagggctcctgccagctcggggatccgaagtgtgtggctgcagatacccagcgagccatcccctagccaaggctaccacagtctgccgcgggcattttatgtcctaccccaccagtgtggcaggcaccgagcctggtcccaggaagccgctcccaggccacacgggcagggcgctcgggatgctcggcgttggcgagtgcagcgggcggtagagagaaagacagagagagaggcggagcggacacgagggaccgtgagaaaacggaggaggataagccccgagaacggcggaaagagaagccaaaagcagaaaaacagaggaaggagaaggcgagaagggaaggctagccagtgagcggaccggctgttttctggctgcgccgggtttccccgacctctgccacctcccagggcgcagaacgtgggaacaaagcccgggctcccaggctggggacggcgggggcgcaggccccgcggagttgcgggaggcgcaggggtcgcggtcccagcgctccggacccgcaaggctactcccaggtctccgggccacccagcctccatccccccgcgcctggccacttacttgtccatccaggctcccgcgccgcccgcggccggaggggctgcagggcaaacgccagcaagcagagccgggcggcgcctgcgccccctggcatggtggcggcggcccttagcgctcggcgctcacacgccctcagccatacctgcccactgcccggcggtggaggcgcgtctggaaccccccggctcgccccgcgcctccccacccggctcccagccctctgccgagacgctccgcctccagccccgcgggcctccgccaggggatggaggaggggaggctccagcccggagggggctggagggaggggccggggaggagctggcgagactcgggggagcggggctggctcaggtgagggagaccgcggggaagggagaatccgagccccccaggaggagggatttgtggtggacgcggcctgtagagggtcggggactcgggcttctaggagttaaactggacccctctccgcacagcggcccgtttactgtcccgcactgtgccagacgccttgggtgacactcagaggtgattcacccagcgccgtcccccgggggccgccactctcggagacaggctcagaaagagttaacccaaccgccaggcacaaagaactaagtgctatatggacttctttttttttttttttttttttttttttttttttttttaagcaggacacaaatccaggagccattccttctgcctgggaggagggagtgatgaagaccagaggaatcccagaggagaagccatctgagatcgggaggaggagaaatggaacatcaggcggaggaaacagcccagacaatcgcactgggacgtgaaaacccttgggctgcatgcggggagaaaaccagaattggggatggttagggttttggagggaaacacagggacatgtgaccaaaaataataataactactgttacttattgaggactttctatgtactagaataagaaaatcatgatagctaagactgataaaacgctaagtgtcaaacgctgtcttcagcactttacacatattcacttatttaattaatcggagaaaataacttttatgagccagggactctgcatacattatctcttttcattagcccagtaatcccatggggtaggtactagtactatccctgttttagaaatgaggaaatcaaacctgagaggctaaaccacttgcccaagattacacagctaatgtcagtgcctagattcaaacccacatccgtataactccagagcctgatgcaacacaccttattttccaggtggagaaactgataatgagagagaaatgacttgcctaagatccctcagcaagttttagcaaagcctcgttgtagaatcccagcctcaaacctcgtccatctgttcctttttctgagcctctttagtcaaacccaggttgactagagaagtgctaagtgttggagagggcgaggcactcctgaagatgatgggtaggtaggtctatcaaaccctactcatgggcacccatgagggaaatcaaataagtggttctggccattaatgtcgtttgggactccgttagtctccagctgctgtaaaattcgtatctttctgtgaacccgaaatatctgagataggtctcagtcaatttagaaggttaattttgccaagcttaagaacgtgctcatgacacagcctcaggaggtcccaacatgtgcccagggtggtgggggtgtagcctccttttatatattttggggagacatgagacatcaatcaatatgtgtaggatgtacattgcttccggtccggtaaggcaagacaactccaagctgcagaaagggtggtgcttccaggttataagtagataagaaacagaagaggttacattcttttgagtccttgatcaaccttccactgaatacacaatttagtctagctcagtgaatctacatttttacataaacaatagggcagaagaagcaatcagatatgcatttgtttccggtgagcctcagagggatggctttaaattctgtctgtcctttgtccacaaggaatttccttgtgtgaaaattgtgaggaaggtatgtagctgtttctctttgtagctatcttatttaagaataggatggtggcctggcattgtggcttaggcctgtaatcccagcactttgggaggccaaggcgggcagatcacctgaggtcaggaattcgagaccagtctgaccaatgtggcga

SEQ ID NO: 317649 - DNA, 4001 bp, Homo sapiens
ctttataggttttttgaacagtggatactctcagcacatagctctagatagaggtgactagggaaaataatcatatctcactttccagagagcaaaaaccatggccccgtggtgtctgcttcacaccaagctgaattcccttacaaagaagatgtggagcagagctgaaaaccaacccaggagaatgtgtgtctttgaacgaaatcatctccaaatgccctgggaagtgcttgcaggctttgtttgtgctgccccagaagggagacttttcacaaaggaactgtttttcaaagaacaacaagccctgctattttaaacttgggggtgggagattgtatctggaccgtttacacaagtgagtgctggctgactgacatctaaccccagtgtttgctggctccagctttccaagtaaagcaaagagagggacttgcttctgatacgtcttgaagccacagcagatgagttgtccagcaatatttgaattttacaacatgagcagaaaaccctgcttagaaatcctaaacaaggacaggctggtgatgtttatcacccgagtggccttgggaattaaagggatgtcagaaagtcatggaggacacttcccgaggcttcagcacagtcagcaaacacaggacttagtgcatgctaacccagtgctctgtgtgcgtgtgcatgcgtgtgggtgcatatgcgtgtgtgtgtgcgtgtgtgtccctattattgctacaggacagtgctgcatgattctaagagtcagactacctgagctgaaaactctgctctacattagctggcctcataagctctccaagctgcagcatcctcatctgtacagcagggacagcaacactggtacctgcaccctggaaggctattgccagtgatcggatgggctgacacagagtgccacgcgggccattgctgctgctaggactgtttacccccagaggtacaatgaaccccccaccaaacatgaaggtgcctctgacccttccaagtccaataaactgctgactgttaggcttaaaagaataaaacaacaacaacaaattgtccaccagaacgcttccaatgcttcctacaataacatgagttcagaaattcataaagagaagcagccagctgtggtcagtgagacaggacaggaaaaagtgagcccttatggaggtatagttcccccaaaaggactattctttcaaaaatacaaccctaaatctttccaggaaaccaaaacacagccaagcctgctcagtaggggggaagaatcacatttcccctttcctgaccagaggtttaaaactaactagaaacactgcaatgacggccagtagccagttagcacttaaaaaaaaaattttccatgtttagagtctgaaaaataggggatcaaaacagtacagcattcaaagaggagacaaaagagaaaaagttaccagctacctcttgggtctttcaaagactgcagtgtcatccctgtaaaagagtgaggtactcacctttctataagaatgaaggactcatcaccttaagcactgaattctgagaaagcctaggctcctgaggtcccagcccagatttccttacaacgcagccaaatggcttttcagagttcagttctgccgggtgggggaagggaaaggggagcaacaaaattcccgcaagtcttaccaccactgttttaaaaagaaataaagaagagtcactaaccttgcctcctgtccgggaagcgaaccgggcctggctgaggctgtctcccatagcaaagcgccccaaagttaaggagctgagccaccacggaaaggtttgcaagccagctcctctgggcacatggcatgattcagatgttgaggagaagaaaagtcaaaaaagttttagccctcagctccagaaataaagcgctcgcctgtggcccagcaggaagatgcaggggtgcatggtcaggcgcgagaaggcagcgactgcaaagctgcccgcgatctccctgtgcttttttaagcagaaaggagctagacacctttttcccctccctcctcctaaaaggggagtgattcagctgacagtgtccgctttcggcggggtgtggaatgggccagagcgggagggcgcagcccaccccggtccccacccctccgcctcccgcatgccccgcggcctcgcagcccgcccgctcggtgcatcttcctcccggactcccacccccgcgctcctccggccccgccccgaacgccaggcccagctggccgagccggccaaataggggagacccgggagagccgccctgggaggcactggaggaagctgcgagtgagaggcccccaggccagccccccggcgtgcttaaatacaagctcaaaatgaggagaacagagttgaggcagaggggggccccactccctccatccttccgcgctcagcgctgccccctcccctgctgttctcctccaagttcctgaacttttcccaacatcgctctatcaagactcctcacccactcggaccgctctgggattctcttccactggaaaaactaataggcgatttttctctttgccaagtcacacaaagggaaatgggctgcgctaatctgctaatgtgacctcagacaagccccctcagctgtgcaatgaggtgactgctgcaaatgcctgtgggcccctctgagtctgcagatctctgtgcggctcttctgattctagaaccccatctttcctagcccacctccattcactcaaaaggaaaccaggaattaagtcaacccaggaaggtgttaaggtatctccccagtttccctgaactggctaccctggagagggcgtccattcattcagaggctcaagcttttacatcggtcagagaatgccacaatccaggacgcttgccaggcatcttgagaatttactgggctaatccagccaagatttttcacctctgagctgaaacaggcctccttactccattcaggaagaattcggcccccaatattgacttttccctggctgccagccaaccacatgtgttaatcaagagttctgggataccagcttactcaaccttgtatagggacagagcctccaaggcaaactcagtggtctgaaagcaaggtggtcctctcagatgtggaacacatgggcaccaagactttgagaggtatatgctagtttcctatttttggtgttacaagttaccataaattcagtggcttgaaacaactcaaatttcttatgtgacagttctgatctgaaactggtctcactgggctaaaatcaaggagttagcacagctgcattcatttctgaagactctaggggagaatctgttgtcttgccttttccaacttctagaggctgcctgaattcctcagctcatggccctcttcccccatcaaagctagcaatggccctttgagtctttctcacatcacatcactcttcttcctcccttttccacttataaggacccttgcgattacattagactcatcctggttaaccaggacactctcctaatcagctgattagcaaccttaattccatctgcaaccttaaatcccctttacgtgtaacagaacatgttttgttgtcacaagcaagtaaaagaactactctgagccttttttctgttacgtaaacattaggaagcaggatcacaactggagttaaaagacattcagataacacaggcatgatgacctgcatttgcaagggcattgaagaacaactttgggctagaattctttttgcttcttttcttttcttcctcttccccttcttctttgcttcccttcaccctttccttgtttctctctcctccttgtactcttctgtcactcttcttcttccacctttttttctcctgctgctccttttaatagcaagcaagatcttgtccaaagggcaagatcactcctagctcccaggtcctggagaagagatttgtctctcaggcagaaacctgaagaactctggagaactgctgagttccaccaatatcagggatga

SEQ ID NO: 317650 - DNA, 4001 bp, Homo sapiens
cgttgtgacaacaactgtggtgccaggtgttcagagcagcacactggcaccccactcccagagaggatgctgaagcagattgaatcactttaggagaaaagcacacttaggcacgaagccctggcttttcttcttctttcttctgtgtctataatgtgttttatcttaaataaaacttcataaatgccataaactattgtggaaatctcctgagtccctctggaattttcatggttttagggaactagaatttttttttttttttttacaaaaatcttacttaaaaaggtgaattagaattaacctttaaaattgtaagaattaacttttagtattgtaagcaaaaccctaaaaaggacaaggacaaccacaagaggatagtctgtaaatggacagataattaactttctcttgtaaattcactgtgacaattttttttaacattttatatcatttgcacctagcgccccctggtggttctcaaaaaggtactatggtgagcgtcaatctgacaccggtcaccttatatactatttgtgtactcatttggcagggaataatttcaaaagttaatgcatatattaagtgcttgcctttatgttattttatcaaattgaaataactatactgagaaattctgaattgttaactttaattttctagatcttctggaaatacattgagagaatgaaacctagttcttcctataaaagtcaattaatattaacatttgatacggcaatttattgttggtaacaatgcaaaataatatttattaactgtcattggatgggttcaggttaaaaaaccacctagcaaccagtgcgacacacctgcgttctcatttacctgatgcagtatgaagacacagagatccctttccataagacagcaaatttccaaatgtcacttgtaagtggcagaagtaaaagcatgcattgaaaaagaataagacttgccctcatgtcaaattgtggcccaggatatgaacgttgctgatggtgtcacaatcagctgattagccatttcaggcactattatgtttgaagtacgccctgattgttggagcattaactttggtattgagatgctaagcgcttcttttatctccttcactgagaataagcaacgatagaggaatattttaatctataaaggaggagaaggaggaaaggttggggacgggaaggaggatccgaggatgtagaaggggacggaaaagaaagtaatttgctctttatgacggctttgatgcatacattaatagctttagattcttcctaagctctttagaataaaataaaatgaacttcctcacctttttcctaatgttatatcaataactctggcaaaccgttttgccagggaataaaatgtaaatattggtggaaatccactcatcggggctcgctcatacagttaaaaaaaaaaaaagttcacaacagcatcttaaaagtagggttccacagagtcgtgaacattcacagcacctaataaaccagcggcacggagattacgagctgctaaatggcaaggattagaagcccccacctcacggacttaccgcccttttccatccagcccggccgctccgcgggtggaggaggacgcgggacgctcgggctcccaggcgctgccgctgcgggtcccatggcgcacgcaggtgcctgcggaaaacagcggcgacatcgcggtgagacggcggggtccgcgggagaggagccgcgggggactcgcctccagctgtccggacccgcggtttccgcgctggtgggagcgcccgggactcacctgctcggccacctgcgccaacagcatccacagcgccgccaagccccgccatccgcgcgcgcggggcttcatccaggagcgctccgaggggctaggggccaccggagggtccccggccggcagcgtgcgagcgggcagggaggacccgacccaggcagagcgcgggaggattccccacagcgactccgccgccgcgccggggttattactgaagctccgtgcggcgcggggggcggagtggcagccgcggcggcgggggcggcgggagcggtgggagagcgcggggcgggcaggggagagaggaggggaggaggtgagggcgggggggtcagaggaccgaggaggggagagtgcagggacaaagagcagaggggaggaggcgaggtcagcggggcgctgaggcggaggcgagcggggagcagagggaaggcgggagacagcgggcagcgccagaggaggaggacgcgggaagatggagctgcccacggcctgcagtccgtgcctctctgcccgcgcggggaccacacagttggagaggctgccgggcaccggcgcgggcgatgctcagcatggacctccggccggtgcgcgctcctgccctgccttggggctggggactcggcgggactccagctactgcagtggctccgcgggctcccacctccgggccgcaccggcgccgccagaggccgggacacctgcagcccgcggagtgcggtctggccgcgcctctgtgcccgggcacagctgtggggacactgggtgcggaaaaccgggcgccaggacgtgggagagccgcggacctgcctttaaaggcgcgtgcctcgctctggagtttgcggagcgatcggagacggggaggctgaggaggaaactcttcccccgcgccatttgccccgagatgtggcggcgctcctggccccgcggtcacggccaccctcaactggccaggccgcggaggccggtgactggctgctgggtgcaatccctagggaggtctcagggctgcggatgggcctgggtctcggccgccacgggggtcgatcgggctactgtgtggacagggtggccaaggaggcagcaggtgtgcggtcaacagcctggccagaattctgctgtagctggatggggtgtgtgagcgcgcgggtgtacatgtgcctgggtgtgcgcgggtgtacatccacacctgactgcgtgtgcgcgagtacacgctgtgagcccatagtgtgtctggaattggtgggttcttggtctcactgacttcaagaatgaagccgcataccctcgcggtgagtgggtacagctcttaaggtggtgcgtctggagtttgttacttctgatgttcagatgtgttcggagtttcttccttctggtgggttcgtggtctcgctggctcaggattgaagctgcagacctaggcggtgagtgttacagctcttaaggcagagcctctggagttgttcgttcttcccggtgggctcgtggtctcgctgggctcaggagtgaagctgcagatcttcacggtgagtgttacagctcatgaaagcagagtggacccaaagagtgagcagtaggccgggcgcggtggctcacgcctgtaatcccagcactttgggaggccgaggcgggcggatcacgaggtcaggagatcgagaccatcccggctaaaacggtgaaaccccgtctctactaaaaatacaaaaaattagccgggcgtagtggcgggcgcctgtagtcccagctacttgggaggctgaggcaggagaatggcgtgaacccgggaggcggagcttgcagtgagccgagatcccgccactgcactccagcctgggcgacagagcgagactccgtctcaaaaaaaaaaaaaaaaaaaaaaaaaagagtgagcagtagtaagatttattgcaaaaagcaaaagaacaaagcttccacagcatggaaggggacctgagccggttgccacggctggctggggcagcctgcttttattctcttatctggccctagcgacatcctgctgattggtagagccgagtggcctgttttgtcagggcgctgattggtgcgtttacaatccctgagctagatacaaaggttctccacgtccccatcagattagttagatacacagagtttccacacacaggttctccaaggccccaccagagcagctagatacagagtatcgattggtgcactcacaaaccttg

SEQ ID NO: 317651 - DNA, 4001 bp, Homo sapiens
tgtaaatcacagaaccataaccctttgaacacagatcggattctaatgtcacccgttactcaacctccagtctctcagttgagtccctcccaactcctttcacaagaacagtgaacaggtgtccagtatgactctggatgtgtttaaattctagacaactgtcagagtaatcccctatagaactgttctttcaactttgaagtaggttatgaaaaagctctaagataacagatgaggaactgagagtgcggcgcaaacacgaaggagattcatcagtgagccgactggttgtctttcgagttcctaaaagacatcacgtggagcgcttagtttggaaaactctggagaacagaaagaagttgagccattgggaagaagttacgaaaaggcagagtttcacgcagttttgaaagacacataaccatctggaaggagaaggccatttatccacccaattaaacttccgatttacacaactgccctggagatgttccatgggaggcaaacgatgtagacacctgggggtgcagtctagggccaagctcaaaaggagcacactgaaaggggagaaggtgcatgcaaatcatcctgacctatgggcaaggagaggagcagcaggggaaaatggagagctagggaaagaaggcgcttaccaggccacctccacaggtgctgaaagaagccagcgagccagggtgccgcagcacagctccggtgtagaagcagcctgcgtctggtggcgcgggaggttgcggggcggatgctgcccccgtggggccggggccgggatttggccgctgttccactgcgaagcgcggcgccaggaagcggccgtctctccggagcagcaggtacaggtcccgagagaaggccgggatccgcagcaacacttcgtcgccatccggctcggcatgctgggccgggggcggggacgggggcggctgcgggggaggcggcggctgccacgaggccggggcgcccggggacaaggcggcagccccgctggatccccgcggcagctcctgcgactcgagctcctcgtcctcctcaccctccgacggcggcgggggccggagccgggactctgatcggccctccacgggctcctccaaaggcaccggagccacagagcgcacctcgcgtgagctgccggcagcctgcgcccgggcgcttccgccgcccccaacgccgcgcacccagcccgggtccgcgctgcccccgctgccgccagccgggtccaccggctcccggcgccagagcgcaggaaacacgacttcccactcctcgcggtcgggggcgaactgcagctctgcgggcggggcagacagaagtgcggggcttaaagtgccgcggttccagtagcacaaacatttccaagctcacagtccatagatacagggcgctcgcgttgaatgcaatggagaccacccgtctagaccctgaaactctgcaaccccagaagccttgcgatcagattacagaccccagcattttcagagtaaaagtacgattatattaggggcgggggagggggaatcaaagtttggtgaccgcacttcattgttgaaaagaaaaccgatgcaaagactccagcacgagtaaacgatttctgaagtgtatgctagagcagagcgttgctatcaacttaggtacgttctaattttcctccaggtgctgtaaacgtacctttgcaaatattattgctctaattagaaggaaactattccacatacggttaaaacgaggccggcagaagtgtgcttcatttccgaacttgaccccttaacctgcacctcaagctcatttttattgctacccactgagccctgctctccacgcaccggttgcaccagccctgccgacccgtacgttcgcggtctccgctgggatggctggaaaggaagcgagaaagtcacggaagaacttacctgaaacgatcccattcgacaggaaccccagctggtaaaggaggcagcagcagcagatgtgagtcaggcgcatctcgcggttcttccccatactgcgctcccgcggccgcggcttctcgcccggcgcacgcctccagcgcgatccactccggggcgcagcggcctccccggagcgctaggaggccgggcggcgaatttgcccaggccctttgtctgccgggggagggggtgttggggtgggggggtaggctgtgtgactccgggaggccgccgaagccctggcgggggtggggtggggtcgggttgggggaggagcgggggaggcagccccgcggccccgcagccctcgagctccctggcgaattaggagatgagtctattttctgtgttctggacgctgcaggagtttccgaggccgagcaggctagtgctggagccccacaagacagacccacagccagccgagagccgggagtgctgcctctggacaggcagaggactgcccggcgcgggcaggagagctgtggtgtccgagccgaggctcgccgcctgcacccgcgcggaacgggcggaggctggtgtcacagtctcagcaacttggtgtgccaagctccgcacactcctcacgctccttaggacgcaccgctgaaggctctcacccgcagcggcgcgggagggaatgagtagggagatgggaagacacgactagagaggtgggttgtagagcagaaaagaatcaagcacatctgaccagaaaaagggaccaaggggtgcccgccaagcgtgactttgcgggacaaaggtcccagaacaccgtgcacgtgctcaaacgccggttgggatggggtggggacccaaaatccctcacctgactattgattggccactcgggaaggcctgatttgcatccatcccctgcccccgtgtgcaggtagaggtgcctcccccttcccatcccactcctcaatccagcgcctctttttgtcaaattcgcacatcacacaaggcaaaaattagtgcagacttgaccacaaaactgaggcctcatttatcaaaggcctttgatttgtcttcccatctttttcggaattttctaagcccggagataatgtaattcgtcatggaatatgctttaaagtttcccaggacagtaggcacccttaggtttcagagcctcttttccttccttgtctttctagctccccattcatcagtactatcagtttctctccttcccctaccccaccccattacacacacacacacacacacacacacacacacacacacacgagtcctaaaaggagtaagagtaagggaatcaacattaaacattatattctaaagatctcagaccaggtgagattattttgtcttctgtactttttacttgtacataaaaaaatatgtttttgctgtttctgtcctctttggggcaattcaaccccatatatttttttttcctttgttgcaattctcttcatggtacctactcccctttccacaactctccctcagccacatcaaagcgttcacatccgatttaaggatgattgatctgaactgccatttgcatcctctggactaggccagacacctagaaatgataattaatgcaaatcagttttttttttttttaattccagaactgaggttggttcaccacttcctttgttattttaccttctgttccttgtgtcaaaggtgactactatgcctttaagggaagcagacgatcttatttcaaaggaaagccattgtttgaattagctgagtcctataatactttctttgagttgtccagagtttagaaacaaaggcaaaaacactcaaggtgactttgtcaagagtgatctgcctctaaacgctgtcttataaaatctctaatgctggagtaactaacatgtgggtttccagatgctcaagaaatatctgggttacttagaaacctaaatgctttttttcatgagactcaattttacagatttaaagctaggcaaaaaatcagaggcagtttattttttgagtatagcaagctatttagattgaaagctaatttcaatgaaacacctc

SEQ ID NO: 317652 - DNA, 4001 bp, Homo sapiens
ctcacaaaggtacacacacatacacggacccacccccggatgcaagccagagacctgttcaggcaggcaaaagagagaggcgcacgctcctgcctgctgagccttttggagacccgggcgctccccatgcataaatggccccctgctcagaccagtcaaaacaacctgctttccagccaagcccttcagttggagcacgaggctcactaaagcacgggaagggcgcggaaagtcctcagcgcaggccttgccctcccaagggactcccaggtaacccttttccaaaacccaggcgagagcagcggagagaaaggagctagagaagtgcgtactcaccagcccatcgcagttgctgagcgccacagaggaggcttcggctaggccggccacgtctccgacgtagagacagctcccgagcaggggctccacgcgggtggtgcccttctcgccctgccactccatagtggccccgggcgccacgaggcgggcgttgggccgcagccgcaggtgcaggtctcggccaaagaccgtgacattgtagaagaggtgactgccaggctcctcctcgttgcctccggggaagctcggggtccggaccggggcggccctgcgggctcgtacccctgctctggacgtagctgccgacaccacgtgggacaccaagcggccctgggcgtcagtgcgcacgggcaccgccaggatgcgctccgctccgtgccccaggggcccgcctgcaacgggaaggggcgttagatcggcggagaccacggagccccagtgcctcagagacccgccggcaagccacgcccccccagaccccgccccactgcgaagggaaggggcattccgccaggcgaccccagaagccagcctgcacctccccggctttcctgcaaccgggaaggggcgttaacagggccaccactccggggctccgccactccccagccgttccctcctccggagaccttgcctgccaagagctctgccccctgccccgttcagggttggggctcggtgggaacctccccgtgcccgaagggacgaccccgtcagagagtcccccgacccttgcacctaccgtccttggcaggacgtggagctgctcggaagccattccgggttggcccccttacccgtgtgccacgacccctcggcgggcccctgccgcccgagtgccctcaccgccagcctccggagcggcggagtctcggcttccccgagcacgagcggcctgtcctgcctgtccagctcccgctcagcccgctgccggccccgtctccccgagcgcccgaggactgggaggggtggaacagggtccctccgatctccggggattccctgcggggcgccccaaccaatccttagggcccaaggctacgcgctcggcagccggctcctccggagcgtccccggacgcgagccccggcgccgcctcgccctggctcccccctcggacccgctggggctgactctgcgctcttggccgcggggcttttcccggccctccgtccccaccctccgcgactcaggagccgccagtgctccgaggctcccccggcccaaggcgctcgggggcggtgcggggcgccccctgcgcgaccaacccggccccgaagttggccaacttggccccgggcggggcgcgcggagtttgcccaagtcaggctggacgacgcctggggagggggcggcggggcacgcgggacagggccaggccggcgggggtcccggggagtaggggccgggccgcacctacctggggggtcggcggcggcggcgagcctggcgttcgcgggcggcggcggcggcggcaggagcggcggcggcagcagcagcagcagcagcagcagcgcggggcagagcaggcggcgagcggctcccgccggcggatccatggcagccggactgcagccggggccccgcactcgcagccggcgcgaaagttccccgcgagccgcccagcccacatctgggggcagctggagccgcccgcagctgcagcaccgcagggcgcggggcggaggaggcgaggcgcggaggggcgggcgggggagcgcggagggaaggcggggagagggaaggagcgagcgagcgagggaggcaggcgggagggagggaggcgagcgagggggagggcggggacggcgggcgcctcagcctgcggtgacccggcgcatcttggcgcggccgccgccgccgcccgcttccctcttcgcgccgccgtcgccgcggtgccgggctcgcagcgaagcagagacaccccgaggcggcggcagagaagcgccgcgggccgggccgggggagccccgccgccagccaccccaggggcacaacctccgaggagcggcgccggccgaacgtccccacctagagagcccttggggtgccgggtcccacccatcagccctggaattcaaggggtgcatccccctgtctctgtgctctggggcaggacagggtgagggaatgaaaggggaggggggactgactactgggtccaaggtctgagccaggccgaatgcccaaatagaggccgcaaaggccagaagatgctgttaggagggtacacccagggcgcgaccccaaagatcaacttttgcccttactgagagaggcaaggctccttcagtccccagttcctcttcctctgaagtccctgtcccctgtcccccatctgccttcccatccctccgctgcagcctcagcacagcctcttcctgccagacctgggctctctgcccatgagcacagtcaggctcctgccctcacctgtcctcaaccccacgtatgcattctgtcctcccgccattgcactcccggcccccaacctgaaatggcctctccaagctctgcctaccttttccacccaagcatccaaggacacctgggcccattctggggccagtttgctgttagagcccgttgccaaccggaacccctccccagtccctcctctccagcaaggccctgatcctcccatgctgtctgagctcagcggcctctctccagggcctgcctgagagccccctctcaggctgttgatcatctctgccctgggacccccaatttctgcctcacttccccagagggtgaacacccacccctttgattttctcatttgccctgccccaggtctgtgtggccagggctttggtctttgctttggccaggggcagaggacccggagatgactcaggcctctccctgctggccaggaggtcccagtcgttgggggaaacacgacttacacagcaggctctaactgtgatctcacgtccttggttctttcgattgtgggtcctgggtgtgagagcatcgcagctggacagccatcttcacctgcaagctgtactctttctgtgtcacctaagggtgcccgaggctggatccagctcccaggcatggtgagatgtcacatggaaatttagattggtaacttttcttgagatattggaagatgtggccacgctagccccacagtcctgcttagcaaccattaaatgggcacttaccttgcagtttgtggcaggtcccgcctctcctcactctctgtaggcatctgctctcgtgacctgtgatgacccaactggttccagagaaagttggaactggaatcctagtataccacagagatgactccagagctgggcatccaggaggacttcctgtaagaggtggcatgagttgaattgtgaaggctgggggagctaggcagcccagagttgggtccagccagttgctgtcctggaacccatgacgcattcctcctgtggttgtcagcgcttccatcctcttcgaaacacgagtgaaacccaaccagcagccgcccctacttcaaggggcatgttctgcaccttcctgccgtgtctatggttgggtatttctttacacagcgcctaaaacttttttcaattttttaaaggatactttaaatcactactataaatggaaaagccagcatctcaccatgtttccataaatcaaagataattgctaaa

SEQ ID NO: 317653 - DNA, 4001 bp, Homo sapiens
ttgcagctgtggcaaatgaatgaatttgatttgtttgaaatcaacgtatttgcctctaaatgctattcttcaaaaattcaaaacactaacgatcacatttaagcacagaattaacataaaccagactgcagttaccactttgctgcaacacaagaaaacaattatctccaaaattaattttcttaatttctttcaactacaccaattttgtgttacgtttcttttcctgtcatgaattctgaaaactgtcatccccacatctaaacatttcagtctaatcaacagaaactaaaaagaaagaaaaaagaacagaaaattagtccacgacacttgaacataaaaagaacatgttgaaaatcacactcaagtgtctcttttaaagttccaagcaatggttcagtttccctttttctctctgctctgcacaccctcacctccccccgcccccaccattccacttcgcccagacagagggtaacagtctgagctgccctggttgagttgatcctaaagttaacattcagcagcccatttccagacagcagcgctaaatctatttggataaaacgcgtgtgacccagacagttggcatctggcccaaacgcgttgcaccggcagctcaaataaaaacaagagtaagaaactcactctcttgttccctctcagtgcgctttctcaatctctcgctcacttttcctctagtacagggaaagaaagcatcaaagacaggaattgtagcacatattatcagaaagaggcttcccaataccccattcctgcactctcactctccctcctcaatccctgaactttggtcccatacaccatatatacagacctaccccgataaacaaggctccggagggttatgagtctagcacgtcccaagtggccaaaagtaaatcaaaaacacacgtttccatctctttgattagcctattaagagcttaacatgtcctagagcatcggggctacagctagcacattaatgctaccctctgagcccaggcataaaatatgcacttgtctgaagacttaacgacactgacatgaaactacaaaatgcataagacttttctgtaagaaaactggaaatcaatttaaaacacacacatcattattaccttccggattactatttggtgatcagttaaaagattacaataatcataatcaagtccacttcacaaaacatgtattgtatattcataaaataaacgtattttttttgcatcataaaataactgcaagtcccagaattctacaacccccgacaagtctggagttaaaaagatatctatttgtaaaatgagttcagtcaagctcactcattgccattaaaaaaaaaaaaaaaaacacacacacagaaaaaaagttttctaagcgttattcggaagacaagcaaagcacaagttgttggtttaaaaaaaaaaagctccattgaatattgttaagtcttccttaccgttttcatcttcaaattctgataaaaagtaagtttcagacaatagagattgcactggacgactcacgtactccctctcctctctaactttttttaattttttttatttttttattttttgcccccctttgcaaagccacaccagccagttattctgcagccagaataaaaccctatggtctggctaacccgggctttagagaactgactttccgatttggcagaataagagatgccttcaatacatctaggctatcactctgagatgctgcctttgcaaaccccctttctctccctccccaccccccaaaaaaggaaaggaaaagaaagaaaagacgggaaaaaagacttattgggggtggaagtggtgccctctcttcctggaaagcttagtgcctttgctatgcaaataacatgtgcagagcatcaaaaggtatcaggagaaaagaagacaagaggagcaggaagggcagcaaagttttgttgaagtagccctagatctcactaccggcccccagccaacttgaattgcagcaggagaaaattttggcagcttttcctcggaggcagagcacactgacgtcagtctgcagatgtgcctgggctgcgtcgggtgcgcatgtgtcctgggtcgtcacgtggagggggaggggaggtagaggtacaatcggggtaaccaactaccagccattcagaagggcttagacaatgtcaacttttccacactgtgaatgagagaaattctggcctctctaacctctctgtcctatctcattccgcctcttttcctcctcctcctctaaactctcttagaaattctagcctggtttgctattagttgtttcttggaaaaatgaagggggagggagaaggatgaatgactttagatggactaatgtcactgttaagatctctggtgtcattctccgtgtaattttatttttaaaatccacacaatcaaaatgttaaaacttgcacgcaaacagtgcctctgaggaaacttaaagcttagattcgtgcagcaggcacaagactcagtagctacaagtgtacaaaatgcctgtgttttatacatacttcagcaagtaaggttagcaccaaaagggaaagtaaactaaagtaaactaataccagcacattttccatttgattatcgacttcaggttatgtggagctttaaaagaagaagaagaagaaaaaaaaaaagtaggggaggagggagcgggggaaggaagagagaagcttgcattatttccagatgagggtgagactggatggtgttttaaagtgcaaccgggaaaagccacaagtggagtgtatttttttaagtcagtccattgaatgaaacttcaatgactgcccaaatgaaaataaatccgaagtaggaccccaccaccaaaaaaaaaaaggaagggaaaaaaacaggaaccctgctgcgatctcaagataaacaaacaaaacctcaaaactggttcttcaaccttcccaatcccaccctccctcccccctacacacaagctgccagtccagactttaaggataaaataccgctacaatgtagcactttcactttcatttgctgagaatgaaagccgctggggagaaaatgcccagtgttttccatgtcctaagcaagcaaacaaagtctggcacatacatcggaaacaggaaaaaatgtgaaaatagctcaggacaaatgttgcctttcaacggtgtaatctgctgcatcatttatctgtctctaccattgagtgtagaatagggagctgtttaagagtttccgaggttgggggcaggggaaaattgacgccttgaaattccagcccttagttaatgccaagtcaatttccgatggtgagaaccagaaaggagaactggaccggagggaagggggtaggaaggatgatctttctgaataccagctcttaaatatcaagcttctgctaacattattgcccatttgatttttttttttcttcctacgccggaggtagtaggtgtaattcttctggtgaatctatgaatagttggctaaaaggaggcatgaatcagactgagaacgtccaagaatacagttatttcaattcttcttcaagggttgaaagtggaaagcatctgtccacagagtaaatagtcctcatcctgaccttaatcagtagtatctggctaaaagccatttaaaatgtagaaatctgttcaatagtgggcattgagttttaaataaagatgattcatatgtatgtatgtatgtgtgcgtatttgtatgtgtatatatatgtgtgtacatatatgtgaaatacatgaggtagcaaaatatagcaataattgtaaacaccaaaaataagaaaagtaggcatcaaatgactatttaaatagtgttgaaccttaaccttccttaatttttcaagtactggcagtaaatagggacagccagcacacacacaaaaaataaaggtatgagcagtaaacatctatataagctctgaaaagattttaccctcaactaagataaactgccctacaaagtagcagcttg

SEQ ID NO: 317654 - DNA, 4001 bp, Homo sapiens
tttcacacttgtctttaaatatattaatgctgctataaataggtcatcacctgctcctttccatttagaagagaacaagccagagcaggtttgaattacaggttcaagagaatcacaagctgaaatgccccagcagaacagatttccaaaggaaaactctgatgtttcttttcttcctggcaagtaaaaaataataagtagatgactttagagatcctgcttgcccatgagactgagcagaagtctctccccaagtcctttttgttcctaaaagtagtaaagagagataaaaatgccattccagagagcatagaaggctggttacatgtggagagagtgagggtttctccggactcctatctagactacagggatcaaaagttactctctgctctaggtttgatagtacaagagccagtgtgtgatctgtgacttcatggcctcctacattctatttctattcttacctcattgaactcaatcagtagacagctaccattgagtggtgtgggggaatttttttattttttaaaaacatgatggtaacaattcttcccatgcataacatttgaacaccatctggctccggacatcctaaacaaattgccaaataccaaggacagctattttatgcatggtgaaatataagcaaaatccacttctttggtggtggacacatataaatataggcacatatttatattctaagctcaaaatacatcacccagtggacacattcacagatcaaccactgactaaaaaaaaaaaaaaaaaaaaaaaaaaaactcactggtggataatcaatgcctcgcacaaaatctgcacatgcatgtcacaggcagtgcaaaagtttgaaccacacactcagagatcagtaacaggaagttatcgccatctacagacttcccctcacttttcaagggagcgagccaaggatttctgcttgaaaaatataaactggcaaaactgacatcagctgttgagctgcattatactcctcgtgatgaaatccactttaataacctgtccaaaaccctaaacacgttacttctttagaaacgggaaagcaatcgtccgtcccaaacgcttcttaactgtagtctctgagatgaaagattgattcacaagtcaacaccacatcactttccgtctatcgggctaaagagctaaatgcatacagatttaaaggcaaagatgtatacttaatttttcttcttcattttccttgtcattaaccactttcccaaggcaggctttctgcagagttgaataacgcccaatcccaactaaaatgccaactgtggggccatgccagtggaaccgggcaggagacagcgactcgcccaggaagcccagggctgagtcggggaagacctattccagcgctgcgggcagcggtgcccggcggaaagcgcagagtttgccagcgggtgcgcaaagatgcaaaaagcacacgccctgcccgtccacctggtgaacacctcgggaactttattttgggaagagccttcccaggaaacttttctcccgcccgcagcccttgccagagtccaccgggccgcgggccagcaggagaagcagggagccgcgggccgaggggctgccgcgggccgaggggctgccgcgggccgaggggcagcccggagcgggacgcggctcggctggccgggctcctctcagggccggggaaggcgcggcgctggacccgcggggaggccactcaccagcccgagcgcgaagaagacggcgagcagggcgaggcaggagcccatgacgatgagcagcaggaagacgatgagcgggtgctgctggctcatgcagtagtaggactcgtagagccagtcccgggaccgcggcagcccgtctccgccgcccgccgcctcctcggagcggtcccgcaggtagcggcggcgccgcatcgcctcctgccacatcggggccgctcacagggcgcccgccgtgcgcgcccggcccgggcagcgccgctcgccgcggccgcccgcgtcccacccccgcgccgcctcggccggcccggctgccggcacccggagctgcgcgcaggggcctccggcgcgggcggagctcggcgccccgggctgggcgcgctgacgcgcgggcgggggccgggcggcggcctcgggggcagctcccggcgccgccgccgccaccgccaccgcgcgggagggggcgggttccacggggccctccgcccgccgctccccgccccgcgcgcagccggcctccgtgcaggggcggtgtcggcccccacccgacggcccggctgcaggctggggacggcgggggctgtacggtggggggagtggcgaactgaggggctcccgctgcgccccggcccggggtcgtcctcgcccgccggcctcccacactcagccaccaggtcgtccacctcctctgccctatcccgagtgcagcgtgggtggggtgggagggacggccctccccgctacgaagtgagaacacagcctaaggggtggagggagggagtcctacccccaccactccccccgccccacctggctcggagcactgcggggctcctcagctcctctccactacctcaaggtcagcgggcagggacgctgccaccctcctgtttcctccaccccttagtgggctgcggggcctgctcccaccctcccccacagtcacagagcgcagccggggtcagaggacccggggggtccctcctttagtacgcgggtcagaggacagcggggtctccctccttttcactcttttggggagctggagaggatttcccacccttcccgcctccccgcggtgggcaccggtttgccgtccagcccttcttcccctcagcgtagcagggttgagggctcccccatcctctccaccctcttgagagggccggggctccctgcgagggcggcagggcgcggaaacgccaggggacctaactggagaccggcaccatgtggaagtgaagcggcagtgactgcactgggagcccccgccacggcctcgcgggggcagcgtccgttgcgccctgcacgctcagcttcagtcacactttggaggtgccgtataagcctgtcatatcacaggtttacagagctgccccgtggctggtcgtggtcctcgccgagcccctctgctgagcggggatggcggcaaaggggcgccggggagagcggctgggcgcgggagcgggcgggtcggccctgggagtagctccctccctgtcaccttgggggcctggacgcaggaggcgctagagacccggcaggagcgttgtgggggcggatgtcaccagggacagtgtcccctcccgacacgcgtgggagcggaggccgctggccttcgccctgggggccgaaggggcttcattgcttatcaccaaaggaacccacccttctggaagtttcctcctattcgagtgtggtccggcccaaagagcccccaaatcccacctcctcccccaaagccttaccccaaggaatccaaggcacaagagccctcccttctcctgccaccagcgagcatcccagagggcagccccagagggctgttccatgcacttttcatctcttccaggagatgaccagctctcaggactcagccttgtcaccacctaagacctcagaaccttctcgaatggccccatgccccgcctccctggctgtcctgtcctcctcgctggcagagggcatgtaagctaggtagctgcgttaccctgagcacagggccaggccgggcacggatccttccagaggttttcattttagcatccgtcagtgcccacagggcctaaggatgagggctcaggagctgcacagctcacccgcagatctcatagacaccagaggcagggaggtggccgaggagactgggcccagggctgcgtgcagtacctcaggtccggccccaccaggctccctggtccctggacttccctccttctgaggacctggaaacaaggagtggaggaggaggcaatgggtgggggggtgtccccctga

SEQ ID NO: 317655 - DNA, 4001 bp, Homo sapiens
aaaacatcaggtagccttttgaacaattcagttagtaggaccaccaaacaaaaagaagacgaacatgttttcataagagggggaggacgcactgaattccatcttaccaggatttggtctctgtcagctgagatgagggacaactataatttgattctgggcattccataaatcactagagttagaaacatttttgggtaaaaactaaaaatgtgtgaccctctagtcatcttctctttcacatctcaagctttcaataacttaaaggctggttggggctgtgtggctgtaaaatgctcttattaacggataatgaacgtagtatatctgggtgatagctgtcagtgaagaggggagggagagaatgcagcctctgcaaagctcttgagaagcgtggcttctgctctagccctggaaatgctgaatgaatgctgcctttctgtgtacgagctgcctccctgcttcccaaatgccgcgtctgcagtaactacaaactattttgtatgctgcattagtgacgctgccttagccgacacatcattactactgaaataacgccggtgtgatattcaagcccagtgaatatcctttttaattattaaaccgaggctgttgagtgagtcattcctcataccagattttccttccctggttctatttccagaagctagtgccttagcgtgttctactaacacctgagttggtttttagccagctccccaatctgcaaaccctttgcagaacaaacaatattattcaatctccgaacacgcacagactgcataagaaacaaaacccacaaaaaactttagagtaagctcatcagtaaacccaaggtccaaaaatgcccagtccccctgctgctagtccccaacttaccaagcggtagagcgatgaagaagggtagccagcacaagatgaacataccgaccacaatgcccaacgtcttagctgctttcttttccctggagaacttaaaaagtttgacagctatggaactcctggggttgtggcccttggccttggtactgctaagggtgtcctcgtgaaagttcttggaatggatcctcagggtcagctccttggagttggacatctccttcatgactcctgcctctaggttcttggtggttctcttggccactatatagacacggcagtacatgactagaatgaccgccagagggatgtagaaggagcccagagaggagaagagggcatagaagggttcttcggtgaccccgcactccttgtcatcgttgggtgccggctccttccacccaaggagaggcccgatggagatgacggtggacaagacccagacactgagcagcgccaagatggccttcctccgggtgaccagcgtgggatactgcagagagtagcgcaccccgatgtagcgatcgatggagatggcgcacaggctcagaatggacgctgtgcagcacaggacatccacggctgcccagatgtcacagaagatccgccccagcacccagtagccgagcacctctagggccgctgagaagggcaggacggtgaagctcaacagcaggtcggccatggccaggttgacaatgaagtagttggtgggcgtccgcaggtgccggttgcaggccacagacaagatgactaggatgttgcccacgatggcaaagaggatgaaggcgcccagcaccaggcccacagagatggccctggtgatgtccagctggggcagtgtggagttgctcgaggtctggttggggccagtgaagttggcatttttcaactctccccagtgggcaggtgctgatgtgttgtggccggtgtccaggtcgggattcatcttagagtccgccctccatagccagggggatgattgggctcggaagggctgcggcgaaggctcctcagctgccctgaaactttgcttcccccgtggtcttcttcccagaggcgccctcctggcgaggagtcatctcccccgggcagcccagcccggcagcacgtctcctgcctgcaccgagtcgctcgctcgcctgtcagagggaggaggaggaggagaggggacgaggcggcagctccaagtttaatggtccacgtcaggcgcgcctggccgggctcgcgggggagcggcggggaggagggggcggcagggccgggggcgcccggcggtgcccagctcgctcgggtctgcggaccgcggcgcgtcctccgcccagcgagcgccgaagagggtctgctttcaatgagccgcttctgggctgactgcacggcggtgacatcaggcgggggagcccggcgccctgactccgcgcggcactagggggcaatgcgggtccagccaaggcgcccgcagccccgacgccgccaccccgcaagccgggaagccagccgcgtcccccgccgctcccagggcgcgccctctgcggggggcggggcgggggcaggggccgcgagggcgggacctgggcgtggagatcgcgggtcacccacccctaggcggcccgctggggttattttccccgctagtcactcttccgtgtcaaaggtgggttgggggctgcttacctttaatagggggctcccggagtgggccccggatttaacgggatatgcaacttgtccagcacctaaaagagggaaagagaattctaggattgggcaggtgggagggacttgagtcggatctgaggccagccctcatccttcatctggctcccctcgccccgtgcaaactctttggccccagtaaaatctggcttctcttcatcctttcattcgctcaggcattcactcatttattcagccgattcttacggagtctccactctctgccctggctctgggcgctgtgaacatagcaactgaacaaaatagacggactcctgccctataggagcgtagcttctcccgacagaagacagacagtatactaaataagcaaatgatgaggtgtgtaatgtgatgacaggtgttaggctgaaaataaagtaaggagggggaaatgcagtggggtgtttgtggggtggatttgaaatgttaagtgggtgcttgggatgtcactgaagtgatatttgaggaaacatgaagggaattgagggaggaagctagctggctatctgggagtgggggtgagggaggtcagagacctggggaagggacgtagaggatcttggttatttgttgagttttttcctttctgtctgatatccatgttggacattcagtcacagggacgcactcccaaaggtgggtgaatggtacttagaagagaaagtatgggccaagaaagaaagaaagaaaaagccaaagaactttatgttagttcacatttatccaacatttattttgtcctagacagtgtgctgagttctttttgcattttctcatgactctcatgagagaaagaatacactcttcaccatttctatttcatggatgagacaccaaattatggggaagtttagctgttcgcccaagttcacaaaggcatggaggagagctgctgggaactgaactcaactgtggggtctctcccaaagttgggtactcagctactgtgtcatacttttcccccggggcaaggtaggggatggaaccactgttatagatggagctgccttttgagtagttaattttggggcctgagccactggtgctgggcagggactcccatgaattgagcgcttactgatagccatgcatttactcagtttctttgagactttacaattctttgagagaagcataaccattgttcattgagagatgagaaacagtggttcagagagagtcagttgattcctgaggtcataggctagcaaatatatggcagagcaatgggcagtggcagctggagattgaaaagtaaagcctgataccttcttttactccagttcacaagcctgcatcttgggtttctcaccttctgctcttgatacttgttataacttgatattcacgggtggggaaaacagaagtcactcaggatgacttacatctaagcttctcaacct

SEQ ID NO: 317656 - DNA, 4001 bp, Homo sapiens
ttagactttgctcgggaaaacaactgaagctgctcctcaaatccctgcctaaaataccccgtgtgagcaaataagaggagtgggggaagagtccatgttcacagctgaaaggtccgagatactcaaaatcctcaagtccaagggtgtaggaaggaaaatctccttcagatacaaattaccagcagcaatatattacccctaatacttgaatagtgaggtagatacatggaaaagtcatgaaaatatagcagactcaggtcctctaggactaaagctctttagacataaacttacaaattccatgcaaagaggaactgaactgtacaaataacaaataatcactcaaataagttttctctctttttacagcttaaaaaaataaaaaaggcagaaggatgcccttccttctgcatatctctatacaattttacaattttattctaagtttattaccctcaagttaaatagtctgtttagtgttctgttgggggggggggtctttaaaagtagaaaaactgctttacagcagtgagtcatttgtactacaattcctcccttgtgaatcaatgttatcgctaggcacagtaccttgatggcccacaaagtcttccgtgcctgggaggtcttcacacagcagtttattttctttctcctgttccacgtgatatccactctgctcccctgtgttgccgttgctggagtagccattcccataggccttcaaagaagacctgcgcaggcacagaagctcctggaaggcaatcctgaaatctgggctccggcagtagataaggggattgaaaccagaattgacatagcctatccaatttaggaggatgtaaacttccttacggatgaggttatcctggatcacatgcacaatgttaacgatgaagaagggcagccagcagagggtgaaagtgcccatgatgatgcctaacgtcttgagggctttgtgctccttcaagcagaacttggaagatctgcggagtccatgccccgtccgcccatcctgctccacctggctaaggttctggacatggaagcggccctcagatttgtcaatcttctggagctgccttttggcctcctgaaagaccctggagtagacgaagaccatgatcaccaggggaacgtagaaggacacgatggaagaggcaatggcataggcttggttcgtgaagaagtcacagcaggtctcattggcatagcagttgatggcttcctggtgggtggcccggtaccagtgcatctgaatgggcaagaaggaggtaaggcctgacacaatccacaccatcagaatgatcacccgggccttattcttggtcagcaggctctggtacttgaaaggtgaagtaatggcaaagtagcgatccactgcgatcacgcacagggtctcaatgctggccgtgacgcacagcacatcaatggaagtccaaaactcgcaccagaagttgccaaaagtccacattttcataagaatatgggcggccccaaagggcaccactgccaggcccatgaccagatcagcacaggccagtgaagtgatgaagtagttggtgaccgtctgcagacgctcgaacttggcaatggctgtgatgaccagcacattgccaaacacgatggccaggacgatgagagacatgacgatgcccatgcccaccacccacacctcgtccctttcctgcgtgacgtcgtggtccggcgcatggcttccattgggtgccagcaagaaggcgctgccgttcccgggttgccccatggcgcgcagtctggcaggtgagcgcactggctgggggcgcctcagcgggcggacccacggcggggctctgcgggccgcgagcggacgcctggaagcctcattcagcggctgtggtgtgggtgtggtggggactcgtcctgcacactcagcttgtcgggtgctaggggctcgcggtgcctgccagttccagcccgtgctctgaagaagccgcttcgcagtgcgttctgcccgttatgtgcacaggactttaggggaactgccctcgccgtgacgtacgggaactttcggccaatggcacgccggcagccgcgaaggggcgaggcactcctcccctttccctcccctcccctcgccctccttctcctggggctggcccgggcggggcccaactgctccctggagggcgggccaccactgcttcccggctaccctggctggccccagagggctaaagctggaggtggtgtccttaccagccaacccgggagcttttggctcttctgtggccgctacctgcctgccctgggcgcctgcgcggcttgaggtctcaaggcagagggcagcacaccggcactgccccacattcggaaggaaacgagagtgcccaccgaggcacgcacatacaggcacaaatacaccctggcagacatgctcagacttataccgaaccacagccatagacactgagacacaccctcccagctcaccgacatgcacactcgcgcgcgctctcacacagaagccatccggcacaaagtcacccctgtccaacacagaaacgcggccagaaacaaacacagaagcacccagaagcacaaagacatggtgacacacacagaaagtaaacacacgctggcttggaggcatccagagcgacacagacacggatgtctccatctgggtactccgaacttgcctcacccgagcactgataatgctcccctcccaacatacacccggtaacccagtgtattccctttcaaacatttggcaagagcacaggaggtgacttcaacagctgctgatttcctcagcacactcgctgtcaagtactttaggtgccctccttaggaatttgcaggcatgaagacagttttaccctttggattttatctggagcgggggtatgcaagtatgtattttgggacagagagagaaagttgtgtgcttttgttttaatttttttgttgttttgtttttaactcttgagagtgtggcatcactcactcattatctgttgaactggagatgcaatgagaattcaaacaatttcttcagtaaacccaatgaaactaaaaaaaatcctttcatctgctggatagtttgttaatctttcgggttgtgccatgtgaaattgccaccatctggcgtctgtgacttaccaaaatggcaaattcatatggttcagagtattaagaatgtcttaacattaagaacattttgaagctatagaaagcaaaagatcctggccaatatggtgtaactcttgtctctactaaaaatacaaaaattagccaggtgtggtggcacgtacctgtagtcccagctactcgggaggctgagacaggagaatctcttgaacccgggaggtgaaggttgcagtgagccgagatcacgtcactgcgctccagcctgggtgacagaacaagactccatctcaaaacaaaacaaaacaaaaaacacaagataattctcccttaagaaaaagaaaaaagtaagaccaaatctcaaaagtaagatctttgttcatgaaatactatcctttccatctggcatgtgactttactgctaaagtgaaattaattttcagggtttgatttcccatgtattagtggtgtctttgaaaaactgaaagtatttcatgaagtgtaactaaacgtactttgtagattacataataacataacaatggttaacatttatggaccattctgctatttgcttttcatgcattattctatttaatccttcccacagtcccatgggggtggggactatttttagcttaattcacaaatgaggttcaaagaggaaaatggcttgcccaggggcaatggctgggcagtgccagaatctggatttgacccaggtctgcctgagtccaagacccatcttttaatcttttcaatgtattgcataattacatgcagacaggagtgatggatagggaggaagggctacaactggaactggaatacccaggttccagattcaccaaacttggagctttctagttcat

SEQ ID NO: 317657 - DNA, 4001 bp, Homo sapiens
atttaaaaactggtggggagtgggggtggtggagaggttggggaggtggcgggcgactaggagtgtgaaggggaggggggatggtggtatttgctttagacgcattatgcaggaggtgggaacagcaggactgaggggtgtgagaggtgcctcttctctctgtttttcctccctgatgtacactcttcacacttgcctagaaatcagttaacaggtgagaactgctttacaaatctaggcctcagttgctaaagaaccaaacagaagcccactctctttcctgcctgcccttcccagtccctgaaggagaaggtgaatgcagtattctctgttggggaggggcaagtgaggaggttgaactggaagccaggagtcccctctggccctctgagctcgccaagcctgactttccgtttaacaggagtaagggaggttaccccacacctgctcccggctcatccctgccccagtgcctgctaattgctcccatgcccctgttcccttctttttttcctcccttcgggggctcagcacagcaaacaggcagatgggggagaggtgtgagattatcgtggggaggggaatgaattttccattattaataacagcaacaacaacaacacttcgcctgttggcacagcactcactagtttatctagtgccgtcacacctgtgatctctttggatcccagaggtgcagactgaaaccctggggttctgattcccagcctctgacactgttcacatgtccaagcaggccacttctttacagacacacacatgcccatctggccattgccaaaggccatgtctagacctttacttaaaatgtgcgctgccgggcgcggtggctcacgcccgtaatcccagcactttgagaggccggggccggctgatcacctgaggtcaggagctccagaccagcctggccaatatggtgaaaccccgtctctgttaaaaatacaaaaattagccgggtgtggtggcgcatgcctctaatcccagctattcgggaggctgaggtaggagaatcgcttgaacccgggaggcggaggttgcagtgagccaagatcgcgccacttcactccagcctgggcaacaagagcgaaactccgtctcaaacaaaacaaaacaaacagaaaaaaatgtgcgctagccccctacgaatgctgccctctcggcttatgtcaatctcaatttcagtaagtcccctccacttctgtgaaacgtctaccaaatacactggaaaagggtcggcaaggtgccttggagaccatctagtccaactttgtcgctggtccagagagaagggctgggccgaggacacagctggtgcgggatagaaccacccccgcctcctccctccctggcgcacacatgcatgcacacgcgcgcctgctcacggcgctcctccttctcgcaatgccctaggcagctgcaaacttcggtcccctagagcttctccctaggggctgcccacagcgggtgtttcgggagttgaacctgtacaccttgttttcccctttagagtggaatgaggtgggaggagctcgctgtcctccggaaactagagggggatcttttatgaagttacaaatcgttagcctatgaaaactctgatttcacacacgagaggcgagttggccccaggacacgggcgttgacacgcaccgggttgtcccggcagccgaaggcacctttgcataagcgccgcgtctcccagtcccctccgagcgttcctcagcccccgccccaccgcccgcctctctccctcctcctctccggcttcagatcgtccagtctccctttcccgcccggcgccgcaacaagtgcgggcgtcgcggcccctcttaccctggcctcggtccatggcgccggcccggtccccggggagcgggccgcagggcgcaggggctccggcgcggctggtagcggccggcgcgctgcgctctcaggccagcccagcggccggcgctctctgcggtcccctcccccagacaggatgctcgccggcagcccccgccccgcccgcgcccgcgcccgcccctcagagccgctcccggaatagacccgagcacgcctcgccccctgggccgcagcccgctgtcccgtggtgccgcacacgccccgccgcgccctgccgctcgctcgccctccgcggcgctcccacttgggcttggaggacccttttccccgtccgcacgcgttcgttcccgcgcccgcgcggcctgccccagcccggacccaggaggtgtgcggctttgcttgcactccgctagcgatggggtcttaccaccgcacccctcagccggctccatgccggaatgcggagactgttggagcgcgtttttatcctagggaatcaaaacccccttccctgcagccgccacccatttcctggctttgggcttgtcttctccattcgccgcgggtctttcttgagcaccttctaagccagacagtgggcccgcggcgatgccggtgcaatgtcagtggtgttgcgaaagaggagttaaataataacaaagatcttcagaaagaaaagcacctgggaaagggagaaagagaggcttgctgaaaggtgggcaagggcttgggacactttcaacttttgaggttccttgtgtactaaaacgtgaaaacataacgaggatctgggagaattcagaaaaagaatagaaaaatgagtaacacgtgaaaacatgcagaacagggtgataaaaaatgtggaaatgaatacttttagcatacaaaatacagtgcaatataagtgtacttttcgcaagattgtagaaaatattgctatgaccagtgtggaacagtaatgggatctaagtttaaagctgtatgaagaatgtcaacttcttcaccttattagtatatccctgtgaaaataggtctcactcatttatacacaatatcaaatgtctgactttaagacccttcataaagtccaggaccaattgttctcctagacactgctcctcccaccatgggccaggccatggttttcagctttgagctgaccactgttccctacttagaacattctggaacagggaacagctaccacagaggtatggaggcaacaaaaggcctgggaaagaccctcctgtactttcctggactgggaatattttcttttcttcttttttttttttcttgaaaagtctccctttgtcgccgaggctggagtgcagtggcgcgatctcggctcactgcaacctctgcctcccgggttcaagcaattctcctgcctcagcctcctgagtagctggaattacaggcgcccaccatcactccgggcaaatttttgtatttttagtagagacgacgtttcgccatgttggccaggctggtctcgaactcctgacctcaggtgatccacctgcctcggcctcccaaagtgctgggattacaggcgccagccacctagcctggccgggaatattttctctattgcttttatgggcaaattaaaattaacattttcttaaaatattgcatcagtaatttagtgtgtgtgtgtgtgagcactcagaccaaatgtgatgttgtgaacagtgtatgaaaacttgtgcatggctcttgttctgttagtttggtgcaaaagtaatagtggtttttgccactgaaagtaatggcaaaaaacgctattacttttgctccaatctaaatactacatagtataataacttttcgtcaatgaggttttcttgctcatctgtgctatgggaagcctcatactgtaagtcctcacaggactgttggtagggcaaatgaaataatacaaacccactttataaaccacaaacagctataaaatatgagccattattattttctgagttcctttttgttgctgtccccttttccaatttgaaaaggtcagtttcaattctaaagcagccaaccaacaatttaccagtggattaagttttaaaagtttattgtttgaactctgaacacttggaaacaaggccataaattgtattttattt

SEQ ID NO: 317658 - DNA, 4001 bp, Homo sapiens
cagcttcaccttacactcccaaactgtagatcatgttccaattaacacagctgggctcttttttcagacaccccatcttgtccccacttgaagcaaaattttatttaaagtaaaatttgcctactgtttctagagagttaacaaaaatcaaagtaccagcctgcaaaccaccgcaaattgaatgaaactgctggtaataaaaaaagaaaaatttgactgcttccaggtttttagtaagttaactctgaaagataacttaaaataacttactgggaatttttcttatatttaggagctgaaagatgcagtgataataaggaaaacgaatctgagaaatttaaagaagccagctttgttgaaaaccaagtggccacttgccaacacttctttatgcacgtatgaccaaagatgattctaggcagactcacagaccacaaaggctctttatcaaatcccaaattaagaaagttctcataaatatttcaattttgataagttaaagaccagttaagttttaaaaagcactttatgaagtgcagaatcaatacagaaacgaagctttgcgcttttcatatctgagcccgaaaaacagcacacattttatgttacatttacagtctattcacagacacctatagcttagattccatcaagaaaaacactggtcaatggaaaagtgactggccttagtataaaatttccatgtggccagcagggaagaaaccgcataattctgaattacaactgacaaaactacgagaaccctaaatcgaactcttcgccttgaactccatatacaaacatttcagattcgtacttccacttcctgaaaataatactgtttgtaaacgaaaaggcaataaggttactcccaaaactcctgtactccatgatccatcctcaaagagtggaaggaacagcaaagtagaaggaacaaagcactgacgtcaattacgagattaaccccaagcacaggcagctggaggaaaggcctaaacatcaatatccacgcacaagctactgggataactaggtaacagaccgattcagaagttgtaggggagggtattcgagtattatacccccacgttcccatttttagtcaatccccttcgcaagtcgaaggcggaaatttttccttcttttttttttttttttgcgggggtgggggtgtgggagaggtgcgcaggatcgcgagaaggaaagcgagaactagctgggtaatgttagccagaatctgggcctattttctctttaattagacataatttgaaattgaggaggatatgaaaaagtaacaaatcagccgatggaacgtctgaggaaagaaagaggaaaggagaaacactaaacggatggatttctgggaatttttgttaggattgggttagctttttttattttcttatctttgcgggaaggtggtggggtgggacgcgcagatgagaggaggggtgacgcctgattgagcagccccagcccggagggtctccccgaggctccccgcagaacttgcgggcccccacccccacccggccccggccacaacccccgcggcccggcccggccctgggtcagtctgtcggcccttcttacctccagtcccggctccgctaggcccgaaccatctcctggctgcggcagtggcggcgccgggcctgcaccttcaccggacgcgcattcgagcccgcccagggggcggtgacaggctgccaagggcgaggggctccgggaggcggcgggggttccggaggcctcgacaaacgaaggcggcgtcggcggcggcggcagcgatgcgcctcacacggaacaggcgtaggccccgcaccgctccatgacggtcgggcccgggctgggacagctgactgaggcggcgggggcgggttaacgaagacctggcaccaggatccccgccccgtccgctggcggcggcgacggcagctggactcctgcagccagggctgtgactgacgcagcggccgtgccaccatgtgaccaagaccgggcgggtgcggggcgtcacgtgatgcctctgcgcccctccccgctgggggagtagggggcgggggtctgtgggccggctgggccgggaggcgacgcccggggtggtgacgttcccggctgtggggtctgatgacccgggccaggcaaaggacccgcccgagcggtataggcctgagcctctgggcactgcggccgcgtccggcagggctgccacggcagtacagggcctgcacatccgggagctcacgccctcctgcgcgtagcccgctagtgaggttccgaagggcggggccgggccgaaccggatatgccggttctggggctcaggtgacaaacccaggccttccgcccctcgcctctggtggggatccggcccaacccggagcttcctagacttgcttccaggtgtcgaagcctcgagtcctcaagaggtccagcaaaaaggcaaaggacgcaggaggctgttcggtatttccagtaaacttaccctaagaagccaaaccgtccctctttcttcgtcatttaaacatcttctgccactaatgttttccttttcatttatttattgagatagatctcgctgttgtcgcccaggctggagtacaatggcgggatctcggctcactgcaacctccgcctcccgagttcaagcgattctagtacctcagcctccggagtagctgggattaaaggggggagccaccacctacggctaatttttgtatttttaatagagacacggtttcaccatgttggccaggctggtctcgaactcctgacctcaaccaatccacccgcctgggcctcccaaagtgttgggattacaggcgtgagccaccgcacccggcccactaatgtttttcttcagcatatcattctgaacacttctttcacctctaaacatctactatttcttttaagcttcactctttatatgcattttctctatagagctatataaattaggaaatgtcttaatagaaaactcaaaacatgacagaataaaaaataattgattctcccatctctgtctgttagctgtttcagtcctggaaggcaatcacttagcatttaataatgtatctttccctacatatttgtaagtaatacattaaaatatagggatacttctttttacacaaaaggtaacacactatatacgctgttcagtcctttttttctcacttcaaatatcttggataggctgggcacagtggctcaggcctatgatcccaacactttaggaggccgaggggggctgatcgcttgagaccaggagtttgagaccaaccccggcaacatggcaaaaccccatccctatgaaaaatacaaaaattagccgggcgtggtggtgcatgcgtatagtcccacctactctggagactgaggtgggaggatcacttgagcctaggaggtcggtgctgcagtgagccgggagcttgccatccagcctggatgagagtgagaccctgtctcaaaaaaagaaaaaagaaaaaaatgtcttggacatcctgccatatcagtatataatgaactacctttttcttcctagaggcagaataatattccacttatgcaaacatcctaatttatttaaccaatcccctacaggtggatattccgcttgttgccaagccattactattacatgctaagctgcaatgaataacctcatacaagacagggcaacatagtgagaccccatctctacaaaaaataaaaaattagccgtttgtggtggcacaggcttgtggtcctaactactagagaggctgaggtgggagaatcgtttgtacccaggagatgaaggctgcaatgagccctaatcgcaccactgcactccagtctcagtgacagagcaagaccctgtctcaaaaaagttaaaataattaaaaacgaaaaacaactccatataatgagcaaattatacctgtatgataaatccttagcctggaatctttagatcaaaaggatttttaattttgatagatattacc

SEQ ID NO: 317659 - DNA, 4001 bp, Homo sapiens
ctgtgttagccaggatggtctcgatcttctgacctcgtgattcgcccgcctcggcctcccaaagtgctaggattacaggcgtgagccaccgcgcccagccacctctccctgttttttttttttttttttttttaccatatttgtattttcctagcatagttattacacaccgtaggtgtttaaattgactaaacaaaaactttccaataatgtcatgtcaggaactccatgtaatggtcatacaaagtcattgcaactcaacagttattttcatagtccatttggtaacaaaacaaagaagtctgatgacgtttcagtgttcagcctatatactggttttaggaaaccaccaataaattatgaaggactagacaacggtcaaattgaaactagttactatgtggaaataatctgttggcagagagggcctgccaacaaggtagaaaaaaatactatgctcttggttttttggtttttattttgagacagagttgcactctgtcgccctggctggagtgcagtggcacgatctcggctcactgcaacctccaccacctaggttcaagcaattctcctgcctcagcctcccgactagctgcgattccaggtgcccgccgccacgcccggctaatttttgtatttagtagagacgcccggctaaattttgtatttcaccatgctggccagactgctctcgaactcctgacctggtgatctgcccgcctcggcctcccaaagtgctgggattacaggcgtgagctaccgcgtccagccaaggttgtttttaatgtgacagtttaagtattaacatttgcccctaccatcttggaaacgaaataagctgcttaacgtctccaacaaaagcagttatatatcgtccctacttacacaagaaagccgaagatgataaacgcccagaagagcaaccttaaacaggtatagcattcaaaagtttgtaaaattgtttgttttacttcacctttactactgtgagctatcattctcatttaatggggaactgagactcggtatataagttcacacacccagtgaatagcagagatgggattctgactcaagtccagcattttaataaactcaaatgtgatctacagtaaatgcgcctactgccaatgggatgttaggtcaagtgagaatgaagacaatgtagccacagtacttaagttcaattcacgccagccgcgagacattgatttaaatcaagtaacctgaactcaggtttgctcctaaggtacttggaattgtaactgcgctgagcttctacttatttactttaagtactctacagtagttctgagcccctgccagggaccccttccgaggctatcacgggcttcgaaggcctcgcctgggctggatggggcgcggggctgaggaggaccgcgcacctgcgtgcggagctcctggttgttgctttctgcgttctggtacagccgttctgtgtgatgcagcagcttctcgatctcccgcacctgccgcttgcagctccgcagttcacgttccaacttctccaccttccgccttagctgggccagctcaggctcgggggaggtgggcggcggcggcgaccgcggcggggacggcgcctccgaggccatgagctccggcgcgagactgctcgtcgccgcggaggggctgcgttcaggccgaaacggacgccggcggacccagagaccactggagcgcgcgggcagcgaaaggcagcctcacacccggctggccgcggtggcccctggccatgacgccctgaaactcacttgtagccgaacggggctgcgagcaacgagcaaggggaccgaggatggcccctgcccgatgtgcgcggcctgcaaaccggaaaactttcctggaaactaccttctccagctacagagacagagggaggagcgtcggataagcagtcggaaaaccagaggccagaagagctccagcagctccccagttgagccggaaacaacggcgccagcggcaggcgggaccaagacggaacaggaagcgacggaaagcgggaagacctgacagtgtacgtgccgacgtctcggcctgcggaggggcgttacctgagggcgtggagagctgtggcaatgtggctaccgaagccctaagagcgacagggaggcttgcagcctctggtctcagacatttgcacgtgcggatgttctttgaacaaacttttagtatagcatgcatttcctatctccttgttttacaaataagaacagagtatcccagaaatgatttgtggggactatgatgctctacttatgtcaactgaagaatgaggaggttaataaatttagaaaagggctttatttctcatgaagggttacagcctgcagggtggcctttctgacaggcttggaagcatagcctctggtcagaagctgagaacagacacttggaaggaaggacaaagggaacagaaatttatgctgagcagggtggccaaatatattcaatgagctgtaggaggattcatgaatatttatgaaaggagaaatatgcacatgcacaattaagcttcctgcctctctatgggacccatattcaaaaaatggtggtgttagcatgatcccagtgtgaagttttcagccctctgatgtcaaatggcaaagcagaggacatgaaaaccctcgctgtgagtccctggtagattggccagaacttctctgtggttggtggtctcttatcaggaaggaatgctggttggtgtgaaatcagcccaactgtcctatagaactgatgtttatggtttcttttgaataaacctggaaatttaccctcccagtcttaaaacttcagaaagttacatctttcttatctgagttcctttcttgggaaaccaaccatgaggcctcccagatagtatcaaggaattgaaacttaccagatcactgcatctggacaatgaggcaccatacccctcacccatcatgattgcctaaccagccacctgctgcctgttgaacaagtcctcatccttaccgctcactaattcctgttttctcacatgtagtcacatttctcccttgccatataaacctctaattttagttggttgaggagatggatttgagactgatttcctattctccttggctgcagcacccaaatagaaccttcttccctggcaatactccttgtctcaatgactggctttctatgtagtgaacaatgggtctattcagtcagttcaggggctcagaattttacttttatttctcatttagtcattcttctggttcctgagtttagaccccccgggaaaatagagcaagtacattaggtctgagtcgcaaaaaggagcatccctggtgggaaaataagagagagacaatattctgtggaaaaggggagaaaaatgctctggtttggtgcatttatttggtcttttgtctgcatgaccctggcattggtttgccaatatttaaactgatgtggccttctttggaacacacttccttcctttgccaaagtcatttagaattagatcatgagctcagagtcctgggcctgagatttgtggaggtcagcagctgtgtcatgcagatgctcctctctcagggcccagcacagtgcctgtcgcagagcagtatccgtaaatgctgaacacagctgaacaagagaatcctgtttggtgtcttagatcagtggccacttccattaactatattttcttattttttgtattcttgatgctctggcatctggggtctccctgaccagggagataacccctccaagggttagctaattcctagacatagcaaacaactcacccagcatgccacacactgatcatctaccttctttatcaggctgttacactccatgccaatattcccctgccctaatcactccagggcaaagtaccagacaactaggaacaactcctacatctcagatcccactgaaattatgcaaactaaacctgcttatcctgatttgtccattccttcctgcaaaaatcacataatgtt

SEQ ID NO: 317660 - DNA, 4001 bp, Homo sapiens
gagttgctcaagatctctaggtactaggcctcacctgccctctctaggttacctgctgctccactgtgcaactccacaatgttcagaggttggggtagggaaggggagggggcagtctagggcatttctcttgctaggtcaacagctggtactttcagcataatttcctcctcactgagcataagactggttataattttacctgcttctgagaaaatgttggagttaggtgatgttctggcaaaagaaactcatgaccaagggaaaagagcagtccaaacaggattggaagactaggggaggatagacagggcctggtagaatctcttcgagttcggagtcagatagacctggctttgaatcccaagttatcacatacatgtttctgcctttgaccacatttcttagatattccttattctcttgtctcctcatttgtggaatgagataatagtactcactaacaagtttggttgaagataaaaggagataatgcatttaaagcatcatgcatgtgtcaagtttcaaaaaactgcaattttcaggggtaagaaagcgaagaggagaggaaggaaggagggtgaaagggaaatatgaggagaaaatgaaggcaaagttggtcacaatggggaatgtaaaatggtcccctgtacctgtttacggcccgtgaagcacaggcacataaatgtacagacagttgcttaatctcatgtttgcatgagggaatttgctgaggaggaggtgaggctctcgtgaaacaagatccatgtgaaaatcacaagcatataggatattactcataaagccaccaatgtctggttaccccacatctcctcatattttctgttcttgctgcagagaggagagtctgagtagatggggagggcctggggtcaagccctggcttggatgactctgggtgaatcacagcacttgttggcaattgagagcgtggtctcacttcctagaggcatgatgaaaattcatgcagatgctttacatcttttaaaatagtcatcctagcctggtgcaatggcttaggcctgcaatccgagcactttgaaagactgaagtgagaggattgcttgagcccgggagttcgagaccaacttgagcaacatagtaaaaccccatgtctacaaaagttaaaaaagaaaaatagctaggcatggtggcatgtgcctatagttccagctactcaggaggctgaggtgggagaattatttgagccttggaggtcaaggctgcagtgaaccatgatcacaccactgtactccaacctaggtgacagagggagaccctgtctcaaaaaagaaaaaatagaaatcatccttgggcatctgtaaattgaagtcacactctattttgattgctttcctttggtttttaaaaatattgaagctgagatagcatgtcatgttgaaattgtgtatagtcgggtttcattatccacgaatttcatttcaaaacaaaaaggagcattacaaaatattggctatgaaaatggggcattgactcagggtgagaacctgtgtgtcaaaaacatgcctcatctctaagacctcacccaggtctaacattccagaatcccaggcagcagccttcggagctcaagtcttaccctctcgctgatcctctactgacccacgtccccctggtttccacttacggctcaggaaaggatgcatctcaaggatcctgggagcggaagtgaccaggcacaagggtctcagcaaatgtctccagattagagtcatttctcccactcagaaagccaacccccatggaagcagattggaggccgggctctaactgctcactatcctgctggactttgagattaagatggggaggaggcgctaaaaggggaatcctggagtggtgactgcccatggcttcaggcaagccccagagctctctatttctagtaacagtgccttcaagggggagaaaaagagagtgaggaaaagagatagaatgaaaataggaaggagagagagaagaggagagaaaagaaaggaaaagaagagaacagaagggaagaggaaagaaagcaggcagataaagcaaaggtcatctgacaagttctgttagtttaatattccatcggagtttcatccgggtacacttttctctgcaggagggtggtgctgggtgtgggagaaggatcaggacatggttgaaggggtcggagattgtgaaacgaggtatgtgactaagagaggaaaaaggaagatatgcatgaagtgaatgaacaaataaattggttttgggggtcttagagaaagagaggagaaaacaatggggaaggagccattccaaagaaaagctgagagtaccaaatagctaggtaaggttctggacagctgtggatcatcttatgtgtctgaggaaggcaaaaggttgagagctaaggagttagtgtgccttattttcattatttcttaaattcctatttatcccactccagcctccccttaccttcaatccccataagcaagtatttagcatgcttatatatatccttttgttggaacgcattcttgtaaaatgtgtattgtttagggtgaatgcagttttaatttatgtaaatatgtgtaatatgtcttttttcttttcagttagaaccatgtttttaagatccaaccaggttgcgaagagtacatctcttctaggtttcccactgcttcagaatgggggaccacgtgctttacatggcagtgcctaagggggacagtgacaaagctgattgcaactagggggtcgagggactggggatgggtagatatcattaatcttgggtcaccctgtaagggagacaactgacttggccacatccttcacaaacacctgcataacaaccttttactccaaatgcccataggaggtgaaggcactaggtaagcagagggagtatgttacattcaatataattgtccctttttgtgtgggtttccagctcccagtcaattctgctttgggggcagtagggagtgatcatatgagctggctggtcacgtgctgcaggagtaatccaagtcagtgaggccagtggacacacagcatctccctggggtgcacagtctgtcctgtggttggacagaggggagaaaatgttgagttcctgaattctggtatatgctcttcagctctactggactgtggtcaatgttgcctttgtgaacaccgcaagtcttccttgacttgagatttttcttggtctgtaagatttgagatttttgtaatgagaggcacccaacatcaaggggtcacctggagtggggaagaaaaacagtacattctgaataacttctagagggaaagtgggaggttatacctcttttatttaaaaagaaaataaattattcggattaccataacataatatgtacttctgttaaacaaactcaagcctagaattgcataaagaagaaagaaaaagatcacaacaaacctgaccattatatttcagtaaatttcctttcagaaatctttctctacatgtgtctatctgtgtatacacatgctgtttcagaaactgaaagtcttcatattttttgtttaataagttccttttgatggatagctgtattttctctagcatcctaggacagagaattttctgtacttgactaattatttttttcttcagataagttccttgaagaaggattcctaggtcaaaatgtgtgtacattttaaatgcatctcagtaagatgacatcaatttataattcaactaaactaacattgcacgaaactacattctttttttttttttttttttttgagacagagtttcgcacttgttgcccaggctggagtgcaatggcatgatcttggctcaccgcaacctccgcctcccaggttcaagcaattctcctgcctcagcctcccaagtagctgggattacagctactccatgcccagctaattttgtatttttaatagagacggggtttctccatgttgaggctggtctcgaactcctgacctcaggt

SEQ ID NO: 317661 - DNA, 4001 bp, Homo sapiens
cctctgactctccagggcccacagcactggtggagtcttggaacagccctgtcaggaaaacctgctttaattagaaacagaccctcgcctatgtcctatttgctttcagtctaactccaggtccaaatacaaaagaatctataactacctttatatgtagttgcaatatggctaaaaaacatagaaaaattcagtgtgaattactgctgcagagaaaatgataaatcacgtggtctcttttcaagaacagaggttaatacaggactgcaataagactactcctggtttgatcagaaatatgttacaattaaatgaaaatccacaggatgaaaaatcatgtgagaaacagcatcgatgtttcttcccaacagtccacaaccctgtgtgcaaccagtggctgtttttcacacaaccgttccacgacgtgcaccgttccacgacgtgtgtggtgtgtggaccaggggctgtttttcatacgaccattccacgatgtgtgcagtgtgtgtggacgatgctgttgcgtgcaggacccactgcgcaccacacaccagcagggaaggatgctgggtgagctgcaccccagggtaagggctccgcagaggagtggctcccaggccattcctctccggtggggaggtagctccccatgtatcaacaccttttctagcactaaaggctgagccctgccactactacacttccaagttttctctccctccatcagtgtgacgtagcaacatatgcacgaccagcagggcacagtcatctggaaaagcccccagctacacccacactaggactcagacacctcaccacacacaggctccgcaaggaactcagggaatcctcacaagactaaaacacgtgcatggatgggaggcgagggaatgagccccaggccgctctgggaaacctcgagacacaatgccatggtccctgtgaggcagaactgaacctgggattccatattaaagaggtctgaagggggctgcacctcccagcaaagggaaccttccagaaatcaagtcgggtagggatggaaacatgactctcctgaacacctgcctcccaggcctgcctgcccctggagctgcagctcccacctggctacgggggatggagacacagcacgactctcctgaacacctgcctgcgcctggagcctcagctcacaccccggctaccgtctgggcatgggggtgcacacctgtaatccccactttttgggaggctgaggcaggaggattgcgtgagcccaggaattccagaccaggcctgggcagcacagggacaccctgtctcttaaaagaaacaaacaaaaacccagctgcctatacagctggggagaccctggacccaaagaaatgatgcagaccctcacattaaggctacacatgaacccacaaaacaaacaaaaattacagaagcatcaaggaagttggtcactctgtgtgggcttgagcaggaaaaatatctggctgtagaccaccctcccaaggacttcaaacacagtcaaggagctccatgtcacaaatatctagcgcttttcaaaaaagcatgttcttaaaactgaagactatcatatgaaatatttgaataaagaatggaatcacaaaaataaataagcaatgtctatcaaaaacacccagataagatgtgaaagtaactaataatttagaaattttaaatatatgtcatctttagaattagaaactgaaaggacaggttacaccgtacattaaaaataaacagaatcaagaatagagcaaacatacacggagagatgtgaaaaggtacagagacggagggagagggatgaaagggccgacgctcatctaagtggaattccagaagggagcaaagtgatacggacccacagacaaaggaaacacaagcgggtacccaagcgggtcggatacaaagcagcccaggttggtccgtctgccgatacttacatatgatcgacctgacagtcactggattaaagggagtccacgtgcctgaaaacaaacaacaacaggagttaaagtaaaaggaaaatctttctgggacactgagtttgtgatctatacctggaggcaccaggaaaagcagtgggggctctaaggtagtggttttctagacactccaggtgacgtgtcggctgccatgactcctgggagggggccaaagcactgcctggtgggttcacaccctgctgtgtgtgggagtccttcgtggcctcccagacctccaaggccgtccacagtcatcgcggctggacatgcactcttatttaacagataaccaagaaatggttctgtatcattttacacacagaatttttcaaggatgcagtcaccagctaagttgagaagttcgcacttagttttgttagaggacttcacgaattcccatttcagaaaatccatcatcaaggccaccactgcctgcagacacctgaacatagcttggtcgctgtggcattcacactaattctactgaaaggtgcaagtaccagaccccttccttccgttctccctcagtaatcatcctaaagcacggtgaagacatccatcacaccacacttcaaacattcctgacaaattacggtctgggctttatatgattttccttgaaactgaataggaaagctgtactatcctcagactcatcgttgaatctgatacccttgagcgctcacaaccatttatcaactctgagaatgaagattcactgatgaccttcgcacacaagaacctatcttcagagtgatttgtaccttcagtaatttccatactcactaaaaatgaactaaaaaaatatttttaaggtcaggagagaccagtggctctcctcataccccgtctgtgttagacacacagtttttttttttttttatgcacaaaaatgccacagtcctgggcagtacacagagacagccccctgatctcagagaacaatgtcaggctcctggtggagcacgggcggtggggtctgctggcatggtcccttaggcctctacgtgccaccactctgggctcatggggctcctcctagtgccatgcccgctctcacctgaagtgcgtcccctcctaagacacacacaccctccctccagctccttcctttccttcctcagggagacttccacgggggtaccacattctcccagcccagaagttaaatccatttgctccgcctgagcacctcccaacttccccttgggaagatcccgccctccagcagttatgcagggaagctgtgctcttcccacaaaggcaggtgcacctgaacctgaggcatacacacagagcagcactcaatgatccgccctccagcagttatgcagggaagctgtgctctccccacaaaggcaggtgcacctgaacctgtggcccacacacacagcactcgatgacccaccctccagcagttatgcagggaagctgtgctctccccacaaaggcaggtgcacctgaacccgtggcccacacacacagcagcactcgatgacccaccctccagcagttatgcggggaagctgtgctcttcccacaaaggcaggtgcacctgaacccatggcatacacacagagcagcactcgatgacccgccctccagcagttatgcagggaagctgtgctctccccactaaggcaggtgcacctgaacccgaggcatacacacacacacacacacacacagcagcagcactccatgacccgccctccagcagttatgcagggaagctgtgctctccccacaaaggcaggtgcacctgaacctgaggcatacacacagagcagcactccacgacccaccctccagcagttatgcagggaagctgtgcccttcccacaaaggcaggtgcacctgaacctgaggcccacacacacagcagcactcgatgacccgccctccagcagttatgcagggaagctgtgctcttaccacaaaggcaggtgcacctgaacccgaggcatacacacacacacacacacacagcagcactccacgacc

SEQ ID NO: 317662 - DNA, 4001 bp, Homo sapiens
caagaacaaaaacaaaactgttcatgttaaaattaagcagtctgaaaattacctctactgaccccttgcgcccttccctagagataaccactgtaaaccagtttcctttcccaaagaaaccctatttatgtttgcatgtaaatgtacatatatgtacatactctttgttatataaatacaacacatattcccttttacataaatgacaatactatatacattgttctttaccttccccttctgatacctattaaaattacatttcaagatcatcaaattcataattttcagctattcagatttaacatccctgaaattaaacttaagcataaagataacagggataatccagttcccatacccaggagaataacggtcacctcaagtccactataatacaccaagtctgaaccctggactcaacatgttttcaataaaatgttcactttaaagttttgacaatgacttaataaccagggcactatgtttgatccatgcaaaaagatgtaaaatcttccgcttaaggaatctaaaattctaaacgttatttgtggggtggttaatctgcacctctcagaaacagacatgtcttgtgcgctgccaacaattttacctttgggtgaatgatgtaactttactgttcccacaaagagtcttaatttttctgtaccttgcaataaaatctacatgcattagatttttccacgaatggcctacaatttgataaacactttcaggactaaacggctagcaaaaatattcgttaaagtcgttatgcagcattttaattcccttcactgataacatgcaccctgagtatggcttcaaagacccactcctacgcgagaaacgacccgaaatgctctatatgccttccttttaaggggcggggggatcctttgatgtaactcaacaaaagcatacagcaatttcgtcacgtcacaaacatctgaactcgtttaccgaaatctaatctgaggcgtttatcagaagcaaagaaaaaataaaatacggcccacggaggcctaaggagtgaggcatccaccattaatgactctaccgggaagcagatatggccttacgttatttcgctaaaaatcccaaggccaaccctgccaaagaatcaacaacccattttacaaacgaaataccagattcagaaagactaagcaggttgccaagctggagagctggatctgccgacctctctccacccccccccgcccccccccggagcctcaggccaacggaattaacgttccgcgtcccctccctcgcctcccgcaacgcccgcgagggtcggctcccggggcgctgacaaccgcctcgtggccctcggccggcctctgaagagggcagtgaggggcccccacctgggcgcccgatgcccagagcactctgcgcccccagcctgccccagcccagtccctcccggccgcgcgccctgaccggtgagcaggatgttcggaagcaacatggtccccgccgcgacggcttcgggcgcctcgctcacgtgccctttgctctacagggaggagccggaaggggcgggcggcagcaaaagcccacggccccaaaggccccgaagcccaccgcggcgcccctagcctgccccggcggcccagccgcggcccactggttacctggctttcgatgacacatttccgtcgcaaagttggagggtgggcataactcgggtcggtacttcgggtcaggcagtgcgctggatgcctaagtcacacactccttcggtggtccccgcccttcgcttgcgccgaccagtctggaaggtccccgggaggccgtacctccgagaggctcggcgttgagcccgggtagggccaggtggctgccctttcacctagggtagtccctggtcgcctccgctcttcgcctaaaaggggatgcagctccgggaaagtaaggccgccgcggttgcggctatattatgtatatgtcttagagacgtgagtctatctctgccttcaagctttcctgggctctcgtcgctcctcctcccgacccgcccatcccatctggggatgagaagattgagggtgcagagccctgtcctgcagcggggatttgcgagctcaacccggcaccccactgattacaggattacgttggacgaatatttgagcttagtattccctgttcactgtgtggggtggtggtgggtcggctaggaatagtcttgaaggtctacctctgacatctcatttcagtaacctcgcatcttcagggacagttatctgctttttaaaggaggtaattgtcaatcttgttttcaagagtgaatagagacctgaccgtgacaacagtctgcacctttttttgtttgtttgtttgtttttgttttgttttgagacggagtctcactcttgtcgcccaggctggagtgcaacctccgcctcctgggttcaagtgattctcctgccttagcctccagagtagctgggattacaggcgcccaccaccacgcccggctaatttttgcatttttaatagagacggggtttcaccatgttttggccaggctggtctcaaactcctgacctcagatgatccgcccgcctcgtcctcccacggtgctgggattacaggcatgagccaccgcgtccggcccctggtctgcatcttttatttcgagctacaaactatatttactcaaataggtgttttttttccacctgtataccttttgaaacgtcacagtctctaatcgtgaacgatttggggcggagggctgaacaatgtgttttctagtgtgtcgaggtgtttataggctatgtgtgcctccaaactgtaaagtagtccagtatactttccaatgtataagtttgtagaccttaaacttttcttctggctaacttaaaatcgttgaattcactagtttgcataaacatttaagaatttgaaaacacggttgaaaaacagtgttaccaagaaattttgtaataacatgttcaaatgaagacaaaaattttacagtttaagacttaaattcttcgtccacagcaagtgaattcatggtattttacttttttgggaaatactggaaatgaagacctgcaactgtaatttgaaataaggaaaactttaattttcagtataaaaattgctcaaatagaattgcctgattttaatgacaaaaggtaagtacatagtatgtgtggtttttttgtttttttttttctaatacatcattgagttcatgtgaaaaactcttaacaccacaagtagattatttgatacagttatagtcattaaaattattttagaattttgatttcttgtatcacttaaatttactgttctttttcactagttcttgagcctttattgtattgttgattatatcagtatacatttattactataattgggcatttacagtttttcttcatttgagggcttcttcccccccccccccccaggtgaattatagtttaatgtactgcaagtcctaaactacggatgggaactattacagtttataatgtcaaaaacttttcttagaccaaaggtatcttccacaaaggtatgatacactggaatggccatgtaataattgccttaaaataattataaatttttatatatattcttaataacttattactgctatcaaagtaatagagccgagtatctattgtaattaatgatttaagcaagtctggtaataagttgtgaaacaagtgttctctaaaagcacaaccttaattttgaaaaagtgttttacagtcccagtcacaaaggctgaaaacatttgaatgaaagaacatagaagagagaaatatgagtggtagttggtgttatagcttaaccaaaagcactgcttcttagaagtaatgtaattcagtgtgtgagttctcagcaagataggggttaaggtgggatgggggtcagacagtttcatgcatgcagggtagctatttccctaagtggtagctctaaattttctttgatgttaagtaagttacttaactttgctgttt

SEQ ID NO: 317663 - DNA, 4001 bp, Homo sapiens
atatctctttgttacctaggctggagtgcagtggaacttggctcactagagcctttacctcctgggctcaagcaatcctcccatctcagcctgtccggtagctaggaccacaggtatgcaccaccatgccctggttaatttttgtagagacggggtttggctatgttgcttaggctaagctcaaactcctgagctcaagcgatctccccacctccacctcccaaagtgctgggatttacaggcatgagccacccacctggcctatttgctttaacttataaagatttaaaaactgttcatggccacgtgtggtggctcgcgcgtgtaatcccagcaatttgggaggagaaggcgggaggatcgcttaagcgcaggagttcgagaccagcctggccaacataatgagactctgtctcaaacaaaaacaaaaacaagaacaaaaacaaaactgttcatgttaaaattaagcagtctgaaaattacctctactgaccccttgcgcccttccctagagataaccactgtaaaccagtttcctttcccaaagaaaccctatttatgtttgcatgtaaatgtacatatatgtacatactctttgttatataaatacaacacatattcccttttacataaatgacaatactatatacattgttctttaccttccccttctgatacctattaaaattacatttcaagatcatcaaattcataattttcagctattcagatttaacatccctgaaattaaacttaagcataaagataacagggataatccagttcccatacccaggagaataacggtcacctcaagtccactataatacaccaagtctgaaccctggactcaacatgttttcaataaaatgttcactttaaagttttgacaatgacttaataaccagggcactatgtttgatccatgcaaaaagatgtaaaatcttccgcttaaggaatctaaaattctaaacgttatttgtggggtggttaatctgcacctctcagaaacagacatgtcttgtgcgctgccaacaattttacctttgggtgaatgatgtaactttactgttcccacaaagagtcttaatttttctgtaccttgcaataaaatctacatgcattagatttttccacgaatggcctacaatttgataaacactttcaggactaaacggctagcaaaaatattcgttaaagtcgttatgcagcattttaattcccttcactgataacatgcaccctgagtatggcttcaaagacccactcctacgcgagaaacgacccgaaatgctctatatgccttccttttaaggggcggggggatcctttgatgtaactcaacaaaagcatacagcaatttcgtcacgtcacaaacatctgaactcgtttaccgaaatctaatctgaggcgtttatcagaagcaaagaaaaaataaaatacggcccacggaggcctaaggagtgaggcatccaccattaatgactctaccgggaagcagatatggccttacgttatttcgctaaaaatcccaaggccaaccctgccaaagaatcaacaacccattttacaaacgaaataccagattcagaaagactaagcaggttgccaagctggagagctggatctgccgacctctctccacccccccccgcccccccccggagcctcaggccaacggaattaacgttccgcgtcccctccctcgcctcccgcaacgcccgcgagggtcggctcccggggcgctgacaaccgcctcgtggccctcggccggcctctgaagagggcagtgaggggcccccacctgggcgcccgatgcccagagcactctgcgcccccagcctgccccagcccagtccctcccggccgcgcgccctgaccggtgagcaggatgttcggaagcaacatggtccccgccgcgacggcttcgggcgcctcgctcacgtgccctttgctctacagggaggagccggaaggggcgggcggcagcaaaagcccacggccccaaaggccccgaagcccaccgcggcgcccctagcctgccccggcggcccagccgcggcccactggttacctggctttcgatgacacatttccgtcgcaaagttggagggtgggcataactcgggtcggtacttcgggtcaggcagtgcgctggatgcctaagtcacacactccttcggtggtccccgcccttcgcttgcgccgaccagtctggaaggtccccgggaggccgtacctccgagaggctcggcgttgagcccgggtagggccaggtggctgccctttcacctagggtagtccctggtcgcctccgctcttcgcctaaaaggggatgcagctccgggaaagtaaggccgccgcggttgcggctatattatgtatatgtcttagagacgtgagtctatctctgccttcaagctttcctgggctctcgtcgctcctcctcccgacccgcccatcccatctggggatgagaagattgagggtgcagagccctgtcctgcagcggggatttgcgagctcaacccggcaccccactgattacaggattacgttggacgaatatttgagcttagtattccctgttcactgtgtggggtggtggtgggtcggctaggaatagtcttgaaggtctacctctgacatctcatttcagtaacctcgcatcttcagggacagttatctgctttttaaaggaggtaattgtcaatcttgttttcaagagtgaatagagacctgaccgtgacaacagtctgcacctttttttgtttgtttgtttgtttttgttttgttttgagacggagtctcactcttgtcgcccaggctggagtgcaacctccgcctcctgggttcaagtgattctcctgccttagcctccagagtagctgggattacaggcgcccaccaccacgcccggctaatttttgcatttttaatagagacggggtttcaccatgttttggccaggctggtctcaaactcctgacctcagatgatccgcccgcctcgtcctcccacggtgctgggattacaggcatgagccaccgcgtccggcccctggtctgcatcttttatttcgagctacaaactatatttactcaaataggtgttttttttccacctgtataccttttgaaacgtcacagtctctaatcgtgaacgatttggggcggagggctgaacaatgtgttttctagtgtgtcgaggtgtttataggctatgtgtgcctccaaactgtaaagtagtccagtatactttccaatgtataagtttgtagaccttaaacttttcttctggctaacttaaaatcgttgaattcactagtttgcataaacatttaagaatttgaaaacacggttgaaaaacagtgttaccaagaaattttgtaataacatgttcaaatgaagacaaaaattttacagtttaagacttaaattcttcgtccacagcaagtgaattcatggtattttacttttttgggaaatactggaaatgaagacctgcaactgtaatttgaaataaggaaaactttaattttcagtataaaaattgctcaaatagaattgcctgattttaatgacaaaaggtaagtacatagtatgtgtggtttttttgtttttttttttctaatacatcattgagttcatgtgaaaaactcttaacaccacaagtagattatttgatacagttatagtcattaaaattattttagaattttgatttcttgtatcacttaaatttactgttctttttcactagttcttgagcctttattgtattgttgattatatcagtatacatttattactataattgggcatttacagtttttcttcatttgagggcttcttcccccccccccccccaggtgaattatagtttaatgtactgcaagtcctaaactacggatgggaactattacagtttataatgtcaaaaacttttcttagaccaaaggtatcttccacaaaggtatgatacactggaatggccatgta

SEQ ID NO: 317664 - DNA, 4001 bp, Homo sapiens
taggtcgtaataaccttaaaacaaaaggatgatgatcatgtatagaaaacgtaatcccttttgaagtaagggaatagaccaaacggggaagaaaaacaagagaggaaaaaatgatataatacccaaactcaaaaagcttaggttaacttctgttacatataaaccactctacagaggttgtctttcatttctgacttaaacattagaaactacctttctgcaaaactcgcctctgacatctcaatattaggcatataaacaaaagccttaacataagcagttattttgtctctttttccattaataacagaccaaactgactagttttagttatttcttctcttccttactctgcccaccctctgctcagagatgaaatggccaaggcaggaaaactgttggaaagtcccgtgtccacaccaactggagaggtctcaggtcaacaatgaaagggaaaatcaaggcacagctaaaaaggcctccaagagcctaatgatcagataccacacggaaatcaggatgaaacaccgaggtctgaggagcaattaaaattatctgtatctcctacagccactgattaccaaaagacgtgttccctctaccaaggcaggttcattatataatatacaacgtccaacaaagtttgttaactgttacataacatcctcctataaaaaactttcttttaaaaaaaaatctgggcgataataaccttacctttccattgtattctataaaacattgttttgagcagtaatgggtatcaggcgcggtgttaagccctgggcaatggagaaatgctgaaaatccagtcctcaaaggagttcacagcccaacgtacaacatggcaagatttcggcacgtccaagcttgcaaactcccaaagaattcaggaaggaagataacttaaaactacactgaagaacgttacctgcggtgcacgtcacagctgaagagccagagttaagctctaaattaagatcagttgcaccgctcagtgtgccacatttctcacaagaccatagatcccaagaccataaggttttaatttttttttttttttttttttttgagacggaatttcgctcttgttgctcaggctggagtgcaatggcacgatctcggctcactacgacctccacctcccgggttcaagcgattctcctgcctcagcctccctagtagctgggattacaggcatgcgccaccacgcccggctattttgtattttttttagtagagacaaggtttctccatgtcggtcaggctggtcttgaactcgctacctcaggtgatccgcccgcctaggcctcccaaagtgctgggattacaggggtgagccaccgcgcccggtagaccataatgttttaaatatgcgcgggaagtttagcccctacagctccaaaatgacgtcgattctgcatagcacacaaggacctaaaatctaagtttttgttttaaaggcaccctacacgagaaaacttttactgtggagcttcaaaatctcccatgctactaccgcatccagcgccagcggggagtcggtaggtcagtgcccgcccggcctcctcgagcgagccccggcggctgcagagatttcttgagcgcccgcgtacctctccccggcctccccagcttccattatacacgccctcgttttcctcgcggagccccagctctttcagccacgcatactggggctgattgatgaggagagtggacatgaaggcggcaggcctgctccaaggtccagagagcttgctggtctttgcagcgtgcacacacagcgcgcgaggaaggcgccacatactgagcccgggactcgggatgagcccaaggccctgagagctgctgaaatagagccccgccccccgcccgggagaacccattgggcagacccgacccctcccactgggcacgaccccgccaccgccccgtctgcccctggtcttccggaggagcctgcggctgaatcctgcctggaacaatgggagtgctacagggaggagtgggctgctgccatctggtgaaagactccgggagccacagttccagctgggaattcttttcagcaaaatattggcgctgaagtacagtaggctatagcaggggttctgaaactgtaaaatgcgtgtaatgacctggtcgtcgtggtaaatgcacattctgattcagtaagtctgggctagggtcggagagccgacattcctaaccagctcctcagcgatggtgacgcctcttgtccctggagtaggcaacggagggtttgtattggggggcgggggaagggttggttgttttcactgttttggtagattacaaattaaagttttctaattaatgataaatattagattgctgcatttcctctataaatatcctgcctgggtatattcttactttttttttttttttttttttttggaaacggagtttcgctcttcttgcccaagctagagtgcaacggcgcgatctcggctcactgcaacctccgcctaccgggttcaagcggattctcttgcctcagcctcctgagtagctgggattacaggtgtgcaccaccacacccggctaattttttgtatttttaggacaaacggggtttcaccatgttagtcaggctggtctggaactcctgacctgagatgatctgcccgcctcagcctccgaaagtgctgggattagagacatgagccactgcgcccggcctcttacttttttttttttaagatggagtctcgccctatcgcccaggctggagtgcaatggcacgatctccactcactgcaacttcaacctcccaggttcaagtgattctcctgcctcagcctccccagtagctgggattacaggtgcacaccaccacaccagctaatttttgtatttttagtagagacggggtttctccctgttggccaggctgctctcgaactcctgacctcgtgatctgcccgcctctgcctcccaaagtgctgggattacaggcgtgagccactgtgtccggcctattcttacattttttttttttttttgagacgtagtctcgcactgttgccagggctggagtccagtggcgcaatctcggctcactgcaacctccgcctcccgggttcacgcgattctccttgcctcagcctcctgcgtagctgggattacaggcgcccaccaccacgcttggccaattttttgtattttgagtagagaaggggtttcactatgttggccagactggtctcgaattcctgacctcgtgatccgcccacctcagcctcccaaagtgctgggattacaggtgtgagccaccacgcccagctcttactcttaaagaataaagacagttttgatcaatttctttcattctccatttctgtcttcctacaatatcctttccattcatgcatgccccatctcatttcacaacaactgggcctaccctgtaaaacggaaatactaatatctcaatcatcattatttgaacatgagtttaaaatatgcttgcccacgctagagtgcagtggcaggatcatggcttactgaagcctcgacctccgaggctctagtgatcctcctacctcaacctcccaagtagctgggactacaggcatgccatcacacccagctaatttttgaggattttttgtagagacagggttcccccatgttgcccaggctggtccgcacctcctcggctcaagggatctgccttgcgcctcccaaagagctgggattacaggcttgagccaccactcctggcccctttcatctctgcattcaaacataagctttatctcttccacccttatagtacaaatgatttgaacaaacactctgcatgtatcaagcagctaccagaaactgcagttagtactaggcatacatgaatgatgcttccttttgtaaatgctacagttttttcctgttagggcaaggaccatctctgactcatctttgcattgctccacagttcctagcattgttccaagtttacgctcacttacatg

SEQ ID NO: 317665 - DNA, 4001 bp, Homo sapiens
tctctgtttccctctaggtttatccaagcctatttattcaatccccagagcagggtctcatccctttagtaaatcccttttctctttttctataccgcatcagtgtttaccacatcccaccttagctgcacttgcttgtacatgcatacacttatcttccctatcagctcatgagctcctcctgcagaatttacacctgatgtttccacaggcgctaaagtgcctagcatcagtaccttcacgaaaaagtttagcacccatctgtagaaagagtggttagtgacaatagcacctgagagtttttaagctatcaacaagtatagtatttatagcacaaaccccaggtaaccagcacctgaaatttcctgggattaaaagtaatcaaaattacataataaactcactatctttaccttcctaaggctaaaataaatcacagaaaacctctagtcatctacctaaacaccagtcacaactcctcacccggaggctatatccgtattcccagccgaccttcctcctaattacaagaccttggacaagcctccctcatcttaaatggagcattcttaaattattacataatcttaattattaaatcattattgttacaagcctcaaatacagctgtgagggttaaatgagttaacgcatttaaataagccggctgtgccgtaggcattcattcattcaccatttaccgatttcccactatagaccaggcaatgctttggatttctacttgaacaaagttattctggcagctgtctgagaatccactggagtgataccagccccaaacaccagtttttaaaaggctgtcacaccagtgtcaaggcagttgcagcaggtatggagagaaatagtccgagtgggctaaggagcaaaatgactgtattgatgatcattgaaattggatgtgaaaggaagactggagtccatgatgaagtacaagtttgagattcaggcattcactgaaataaataatacagaaggtggagatgctgttttagaaggaagaaggaaaggctcattttgggatttgtggaagctgcctggcgggcagccttgacggcgatgcccaggacctgtgtatgccagcgtctgccgctctgaaagggggaagtctacaaaaaggtgaaaatgatgggaatgggtaactgggcttcagggagcagatgctgagacttagaacgccagcatttcaggcagggaggagcgttagcctgggcccgtggatggcttgagggtacagcactccaaaacggtagccgaatgaccgcctatatgcagttttccaggaagggaatcctatggctttcattagattctcacagggttcaagaccctcaattaattaagaaaggcaaatacggaacgtttcttagaaaaaaaaggaggaatttgggaaggagtcagagaggcaaaaggagaaaccgggcaacagcagtatctcagaacccaagttttggacaatccagtttgggaagaatgatcactaacaataccctaggaggcaaaaatctggaaggctggggccgacaagggttcttgcggcaacagggcaaaggtgtggcgggtgcagcctcgatcgaacggccaggcccctcccctccgcgggaacttcccgagagcagcccgcggggcccgggctcaccgcggcggaagggctccagcagcacatccgaccgcttgcacagacgccgcagcacggcggctccccgcggctgcttcaggtccagcactagcgagcgcttgccccggcccaagcggctcacgtcgtagcgggagccgggccggtccacgcgtaccacacgcgccccgaagtcagccaggaccatagcacagaacgggcccggggccaggccggacagctccacgaccgagatgccctgcagtgccatggcgcttcccagtgccccgctgaaggaaactgagcagcccttagccccagcccagcagcctgcaagaagccctcccaatccccggcgccacgcccccagccgcggcgccgcgccccaaaggcaccacccccgtccctcttttgcgggcctgcgcaagcccgcggagtctgcgcactgggcgcttccccacccccggcctcccgggaccgccagtgccaaatgcagtaggttgctttcctttttgtgcaacctaaattcctgagtcttaaattgcagggactgacctttggagctcctgcctgttaccgtcctctctggacgcttttattgtaccagggcgatccccagcccaactgtaccattcgagtccctactcctgccttgctctagggaaataaaataacgtaaacacgtaagaacaatgcgaaagcgttttcttccctaggctgcagattgtcttcttcaccgcccctgcttagctagctagctagctgggaatttaatccagaaacggcttgcgatacctcctagatgcactcgttttgagttacaaactccgcggattacatgtctttttaaaaaagtttagactacactaggaaaattattttagtatcagaagaatatcaggggtgtagtactcatcagagctaaatgagagcgctttaaaaatgttagtttgtcttccgccatttctacagaaagctgcaatttcaggttttcaacctaataggtgatatttaagaaaaaaaaaaagcaatcgcaaatagccccactgcttttacaaatcattttttctcttctaggtatagcctgtcaggtggcctaatgtaatttttgacatctctaggaattttaatagaaccagaaatgggtgccagagatatgcctgcactaatcttaagtggggatttatgtatttctcaagcaagtgattaaagcaaaactaggcacgattgaaatcaagatcttttaggcaagaaagtcatgatgagttttagaattattttaggactctgtggctttctcttcatagaaatagaaaaaaaaattgtataaaaccacaaaaggtcctgaatagccaaagcaacactgaacaaaaagaacaaagcaggaagcaacacactaccagaattcaaattatactaccaaggtgtagtaaccaaaacagcattctattggcataaaatagacacaaagaccaatggaacagaataaagaaccccaaaataaatccatatatttacagccagctgattatcaataaaaacaccaagaacatatattaaggacattctattcaataagtagtgctggaaaaactggaaatccatatgcagaagaatgaaactagacccctatccctcaccatacacaaaaatcaactcagaatggattaaaaaacttaagacatacaacccaaaactataaaactactataagaaaacagataaaacacttcaggacattgacctaggcacagattttatgactaagacttcaaaagcataggcaacaaaaacaaaaaataggcaaatgggactatattaaactaaaaatcttctgcacaacagaagaaacaacagaataaacaacttattgaatagaagaaaatattttgcaaattattcatccaacaagtgactaatatgcagactatacaagaaactcaaacaactcaacagcaaaaaatgaaataatctcattaaaaagtgggcacaggatctgaacagacatttctcaaaaggcatacaaatggccaacaggtatatgaaaaaatgctcaacatcactaatcatcagggaaatgcaaatcaaaaccacaatgagatatcatcttacttcagttagactggctattatcaaaaagacaaaaaataacaaatgctggcaaagacgcagagaagaggaacttatatatactgttggtaggaatgtaaattagtttagccattatggaaaacagtatggaggtttgtgagaaaactaaaaatagaacttctatatgatccagcagtcccactactggatatatgtccaaaagtatcgggggaacccgcccccaatatttcaacataggttctttctattttcccta

SEQ ID NO: 317666 - DNA, 4001 bp, Homo sapiens
gaagcatccctgtacctaggaaaggccaacctctacacttgggctctggatcccatccccttttatcttttcaagtgtttcatatgtcaatctcctggaaattatctcttctttcctctagatcacttaatctctctccagtggatcactcccctcaaaaaatactgagatgccataataccctatgcataaaaaaccctcccttgaccccagcttcctttccaactgctgctgcatttttcaactttccattaccccaaacttaagtattctataattgctgtctccatttcttcatctcacagtcttgtctcaacccatgctaatcagacatctttcccacccctctactgaaactgctcttgttgaggtcactccgccttgccaaaacccagtcatcatacctccgtcatgtgcattgagctcttggcaactttgacacagaggaacacacactccatgtaacatgttcttctctagaggtctggtaaaccaactttcgctttctagtcttttctactggctctttttcctttgcttgatctccaactattagaatgccctagggtttatataaaacaaataatctgttgatgtaggcatgattcctccattttacagatgaggaaactgagatcttcaaaagttataccacttgctcatgctttgtaagttatagaattgtcccaggcagcctgactccaaccacattaccctgtctcatggccttcactgcacttaccttaaattatcttattcatttatttgcgtacttattttattgtctatcacccctccaccacaacagaatgttccaccagaacaggggttgtcttgttctctccaaccctacatctagaacatgcctagcaaatagttaagcccttgaaaatagttctagaatgactgaatgaacactatattgatgaattggtgtatagcttccaagcctggtttaggaaataaggccgtcccagccagtaggcttggatggtgtgccccgttaagaggcttgagtactgggaaggctgaggtgggaggatcacctgagcctgaggaggtctgtgattgcactactgccttccagcctgtgcaacagagcaacaagaccctacacgcggggcggagggcgggggcggggcggagggcgggggggggcgggggcagacttaaatcgctttcagctttcgaactgcttaacagctgcctcagtttatgctacacattattcccaaggcatagatgatccactccatgctttaaaaacttaagtgcagaaagattaagtgactgacttatttaaagtcagacaataaatcggagcatgagtcacgatataggagataagagcacatgaaactcttatttgcaaaaggacttaatcattatttttaaaagcctcctccttaattcggaagaataatactgtccttccacccacagtacatggtgggggtggattccaaagctgaaaaccagccaacagggagtgcagcggtgcaggctgggactcggggtcccagggctgagtcgcctcgccagtttccctcctgcagcgtccggaggtgctgctctgggtaccttctcaagtcccttcgacccagcccgccccgcagcctgattttctgagacctcgtcccgggactcacggagctcgtgtccggcaactgctgtgtcctcctctccaagaccctcccgcttcgggatccgggacaggctcctccaaggcagggcggccgcgccccacaggtcttccctgagacccttggcggccgcagcagcccggagcagcagcccccctgccgtggccccttggccccgggcgcgcccggcggggtccatagtctcctccgcgggccctgagcgcagggccagacccagactcggacccagatccagacccagactcggacacagatccagacccaggcaggcccagggcgcgggggctggacgcaggcaggtcagcccggccggagcgcaggatcgagtccgctctctgttgtggcggttcgctgggcaacaagcccctagtttccagccctgccctgacttgggctggcctgggataatccgccctcaggtgtggcgtgcacagtgctaaggtttggttctctggaaaataaaacatccagcgaccatcgagaacgggccatgatgacaatggcggttttgtcgaatagaaaagggggaaatgtggggaaaagagagagagatcagattgttaccgtgtctgtgtagaaagaagtagaaataggagactccatattgttctgtactaagaaaaattcttccgccttgggatgctgttaatctataaccttacccccaaccccgttctctctgcaacatgtgctgtgtcaactcagggttaagtggattaagggcgctgcaagatgtgctttgttaaacagatgcttgaaggcagcatgctcgttaagtcatcaccactccctaatctcaagtacccagggacacaaacactgcggaaggccgcagggacctctgcctaggaaaaccagagacctttgttcacgtgtttatctgctgatcttctctccactattatcctatgaccctgccacatccccctctccgagaaacacccaagaatgatcaataaatactaaaaaaaaaaaaaaaaagaataagcagagaaattggggagggtattcaaagctgaacaactaatggtccaaggatatcactatcactatcattaacacatgctttagtcaccaggaactgccaattttacttctcaaatctcttaattacatctgcttctccatttttatttccattgccatcattgcttgtcactgaatttattgtaataacttcttcataagaatttattgtaataccttcttcataagaatttgttgttagatggatttattgtctgttgctacatttcaggcacagaattaagcaccttttgcacagcctcacttaattctgaggtatggtgtattctattattagccccgtttgatagaaaaggattctgaggcttgaagacgttggtggaagaaacagaacttgcccctaacgagcatgacttctaagaatgtgttgtcaagggcgtgactcactcaccttgctctacagcagggggtcactttgctccatccccaggccaaatcccgctgctgcctgttattgtaaataaaatttgttttaacacattaaaaaaaaaaattcctgcaaaatctacaagccccaatgaactcccagctctactctaccacttctttgtataattttgagaaatgtcaaggttgaatttataactaacactataggaacttcaatattaaatcatttctaaatgggcttccaacattttcttttgaataaagtaagacttgatttctcatttgaagaccatgaattttaatctttcctggcggattcttttgaaaagtgaaataatacagaagcaagtcaaattctgaccccccaaataaacttcaaataagaaaggtaatcaggttttcatttatttattcttcttacaaatttacaaaagatgtatcattttaatgtaaattatgtaatatcaatgttcatttcaaacttgtcagtttttcccttcaaattattgtgcaccaaatttgaggcattaaattcaaaacaatgtttcctaatcaatgaaaaaacaaacatgacaaaatattatttattttatcagaacaccgcccataacctcaaactttcctcttttaaaaaagggaaatgggcctaatgtttgtaatagagatatgataaaaacaatagcaggtaagttgaattgagtattatgcagaaatatcagacaatgtactaatatggaaagtataatatgtaaatggaaaaacagggcaccaaattatatgtatatgtagcatgtttacaagtaaaattctaaaaatcaaaagaaaatacccacacaaaagaaggaataatagtgaaaacagcagcagatcaatggaaagcatacagccaagtacagaaaa

SEQ ID NO: 317667 - DNA, 4001 bp, Homo sapiens
cactagttatctcgatatgattcttacatgcacacaaacacacaccagttcagatgagcagcctgggctttctgacaacctttggggcagctccaagaaggtaagccttaaaataggaaaggctcgagtgaatatacagcatttgactcatctaaaatgggcaatgtagtaaattcgtgtctaaaagcttttctacggattgtaggaagtgttcaaagtcaccagttactatagaaagaagggaaggtgggcgggtacagggtggagcagggaagaagcccttggggtacccttgtgaggcactggcagggcacagtggcaacggaagagacaagattttatcaaaggacattggctggcgcggtaaacaaaggtctctagagaatatgccatattgtgaacacctatcaccaacaaaattcaaagtaaaaagtagcttacaatgtgggctacatattagagagcttacagagttgcaattattcaaaagttttgagcacagaaagacaaatccaaacagatattcgtcaaacgaaggagtcacacaaatctccgatttgtaactgcctcctgaaagctgttttacttttacaatgagtactgcatcaaaataggtgcatattctagataaatatccgtttaagtctcttgacttaaaaggaaagaagaaagacagtaccacaatacaggagtgccgctcgtcacacgctctggccacttgggacacctgcccatcagggtggcatgtcactgcctccccatcaccaaatcctctccccggccttagaacgcagctgcatcccgctggtggccctgccaaaacggtccccacatgcaaagtgcagggtgccaatgccccatcgctggagagcttgcagcgctagattttcaatgacgccacatggagaaaacgtgaaaagaaacaaggacgagaaggcgaccccaaacaaaaatgtgctccccttctttagtggtccatgaaaaaaaaaaaagaaagaaagaaagaaagaaaaaaaaagaaaaggaaaaggaaaaaaaagaaatcccaaactagaaataaatggtcaagaccggcttatcaggacacattcgggatacccctaatccttacctggactacgaaacaaatgtttaaaaatggaagtacctgggaaatcaacttggacgcattataaaacagaatctccccaccgtcaccattaccaccagccatgggtaaataaaaacccagcacttaagctactagaaactacattttaattagagctgaggtttacataatcgcaaattacataatactgccgtgcactaaaaacccttccataggtgaagcttcacaccatccagtctttttaacattttccagagagggctggaaaagtctgctgaataattgaggggagggagggagggaatggggtgctggaaaagtcacccttgacaagctgcacacccgaccaaatgtttcaggataaagagggactcggagcaggtgactcccctccgcccccgtgtccgggcgtgtaaggccaaggcagggcgagcgggcgtggggcgcggggccggggcttacctgctccccgaagtcgatggctatgttggtgatgcccaggggcaccaagaaccggatcaggggccagtagtgcgtgagcgccgggaatttcaccatagtccccgccgtgggctgaccccacacacatctgctgccgcgaggggactctgcggggaggcgaggggcgacggggcgacggggcgagcggggcgcgggccgacagaggccgcgggcggcggggcctcgggcgcggcggcggcggctcctcctcgcggctgcggcgccttctccgagcgcggctgctctagcaggggatccgcaagctcaagtccatccctgctgccctcccacacaacaaagatctgccgggaaaaaaaagaggagggacggcggcggcggcggcggcggcagaaggttctgctgacagcggctccattataagcgctctggggcccggaaataaataaccgcgcgcacgaggcgccgccgccgccgccgccgcccggaggaaatcaggggcgggcgcggaggcgcggacaccgccagcggccccgggggcgggctggggagggggccgggccgggcgcgccgcggcctcctttcctgtgccgtcgcctgcgcttggcgcggccgcggggggcgctgcgcacgctcgggccgtggggctggcgcctccggggcgctgggcgggactcgccgcggagcctcggccggcccgggggcggcggcgctgagggcgcggcggggacggtctgggggcttggggacgccggtggggggtgagggcggtgggccgcctggagaccccggggtgccctggctcgccggccgggccctgtagccctcgtcccgtggggccgggggccggggttcccgcgctgtgccgggagggcccggccgtctggaagacttggcagccggggcaagcgacgtgggctcggacgcgcgaggagggctggggagcggggcgcggggctgggaagggcgccgtccggcggtggccgggctggcggcgggcggggactgcggaggaggcagcttgcgccggggctggggcctgcttcgggggactagcggcccgggaggtatggaggtgccgctccggggggggcgaaagaaacgtggaaaggtcgcccaggagggagcctgtcccccagggtttccaggggcaacggtggcccgtgtccctggaggacatgcgccagggcagcagggagtggtccccgcaggctcccaggctggggccggccgccttctggggcgctcagacctgtctgctgcagtttgcaaacagtacgcccgaattcttttcattgtaaaaaatttctattaaaaataactcgtaaagcctatcatctcttttaaataaaggggaagaaagaggaaagtgtgttctgttttgtaataccgggccccagtgatttcagggtaactagtcgcggtgctgagagtttgacctaaagctcggcagtgtgacagcaacgccagcatccccgcaccccaggactgtgacgcgagggaggaggacccagtgaatgaaaagggactctgggcagggctggcttcacgggcgtgcgatctgtgaagtcacagagggcccgcacttaaaaggactaacgcgctgctgttgcactcttgaatttgaacaagggtctctgcattttcattttgtagtgggcctggcatagtatgtagcctatcgtggtcttactattttataccaactctcacacacatctctgcatttaataaatataacgaagtaaagtaatttattattaaaagtaagaaactatcttgtacctagaatgaaccgattaactcacaatttagctttgtaaagcttttgtaaatagtgagcttgagacctcaatatcctgggttcaggtatttcccaactactttgaaagtgttaaatgtttccataggccgggcgtgagcggtgggcgccggtagccccagctactcaagaggctaaggcaggagaatggtttgaacccggaagacggaggttgcagcgtcacccatggcactccagcctgggtgacagagtgagactccctctcaaaaaataataaataaataaataaatatttccatattttgcatcctttttaaaatacttttttgaaattccacacaatttgagcaggctttgaaaaataggaagctaatttaccttgtagctctgatgtaacctcaaattacattccctatgattaaaattaaacttggtaagtatttattgttaaatgtgtcaaatagcaatactgtatttaaaagatttcccagcaaaacaggaggttcatgtggacaggactgtcttcaggagcaagttcctgaaaggtgtgttttaatatatttgaatctaacttaaatatacaaaaagggagcttgttatttaaaggaattctctgggaaagaggttttttttttcctaaaacaaata

SEQ ID NO: 317668 - DNA, 4001 bp, Homo sapiens
acaccaagaccagaggttaaaataactggtcacaggtgacaactcaggcacctcagaaccaaaatagaagaaatactctgagcacttaaaacaatcacggtacagtactctacgcaagccacagtcaacagaaaaaagtatacacataaaataccgccccttgggatcacaaggtcaggagatcgagaccatcctggacatggtgaaaccctgtctttactaaaaaatacaaaatattagccgggagtggtggcacgcgcctgtagtcccagctactcaggaggctaaggcaggggaatcgcttgaacccaggaggcggaggttgcagtgtgccgagatcgcgccactgcactccagcctggcgacagagcgaaactccatctcaaaaaacaaaaacaaaacccgcccctttttccccagaacccaaaagaagttaatgcctaccatcccaggttgctcagacctaaaaatgtgtacacattagagtacacacagaagagttaaagaaatgaaggacttcactgcaaaggcagagtgaaggtgtccagccgggcacggtggctcatacctgtaatcccagcactttgggaggccgaggcgggcggatcacctgaggtcaggagttcgagaccagcctgaccaacatggtgaaaccccgtatctaataaaaatacaaaattagtcgggcgtggtggcgcacgcctgtaatcccagctactcgggaggctgaggcaggagaatcgcttgaacccgggaggcggaggttgcagtgagctgagatcacgtgtattctagcgtggacaacaagagcgaaactccatctcaaaaaaaaaaaaaaaaaaaaaaaaaagaagaggtttccacaggttgccccactttctccaagcctaaaacctccgagttcagctacccagctattccgaagctcagggatgccctggaacttccttttcctgtctaacttcacaaaaggtcccagaaggaggagtcacgtgatttttcagggtaaaagccgagagatccctaatactcaaacctgtctcaaactgaagagggagaataagaaccgtccttaagcacacaggtaagacacacacaaggcagaaggcaaataaacgtatccctcaactctgaggagaggcaaagaagagaaacgatctttgcaccagctctgtctctgtctctgtttgtctctctcagtaccaagggcagggactctggcaagaccccgccccccacccccaactccaaagcagggtgggcgggaggcagcctgaggagtccctgttcccgcgcgaagctcagagaccaaaggactccctattgtgggtctacgaatggtgacgggaacctgtcccgctcgagctaaagagtaagccgagggctcactaggccctcaccgcggccaccgccgccatggagccgaccgctgtcacagaagggctccaccagggaagcgggaggatggccccggcccagagcctacccaaagagaattcacgcctcacaatgtgtgggaggcgagggtcccggagccttacctcggacacttcgtcctcgtcactgccagaggcaccacctccacccccggtcctcagcacggcagccgccaacttgaaatccagcgccgcgtcccctccgcccgtaccgctgccgctgccgccgccgccgctgctgccgactcccgacgctggcccggcctccccaaagagcctcacggtgcggatccccagaccgacccctcccggcggaggcggctccgaggccccagctggggcggatcgcggagccacagagtccaggtcctcctcaaaggaggtgccgccgcctccgctatcagtcagcattgttcgcacccggagccggagacggtgccgacccactcgcggtcaccgccgccgctgatctcgggaacgagaagagcagcaagaggaagaagcgtctcctttcccccgtcccagcagcgccactaacttctcactgcctaacctgctgcctcccgccccctcgactcgccactggctgcaataccctggcggctgcagatcattggccaaagtgacccgtcgctcaggctcttcgtcacgcgccgctcgctggctcgcagccgccaagctgcgttgacccgcgcaggcctaggcggttgcgaacacccgcctcccactcttcaccagctgacttccgctcttttcctatgtctattggccaacccgcctgactatcgcgtcacgaccttaaagtggattagttggccttgtggtcagtcatagtgaccccgaacaatgggagaattcattggcgccataaagtgtcggtcactttgtcgcgggacgtcgcgtggtacaattggcctgtgggagtaccattgatcccgccctcatctgaggtgacgggaaagggccgggaaatttccacttctgaataaaatgactgctgaagtgatgacccgcaagaattggtcaaatttggagtagacttcaccctgcgcttggtgaaacttctacgtcaaggatgcaagaggcgccgaagtaacgcagctcccacctgtcgctctccgctgggcgccgagactatggccggagaatagctgcaccgggattggagaaaggaagccatcagtcttaggaaggctccaccttcctgccattgcctggttggaggagcgtagcgtcagtcactagagcagtcaccacctctgggacaggtgaagatgtgtaacctatttgccgggggctatttgggagggaatagaggacggggagcgatgaggggacagtcgaggggcaaggccgatctcgcttcgcgcctcccgcctttctgagttgagcctagcgcgcgggtctgagggacatccggggagctgcttgggatggccgccttggggagactcgacccgcccgccaggacccggccgcgcgccgcagttcgggcgccttcgggcaggatcgcccagcggggccgcgttctcctgcttgcggacggctgcgggcctgagggctggacagcgccatgcctcagtaccgggaactgtcccacgtaggaaggtgggaatgccgcgaacggcgtgcggaatccgacctcaaggtggaacggggtggtgaagagtgcatgctccgaggcagtttcgagttctggtgctgccacttacttgctgcctgacttcggcgcgtttgctgtttcatttttgtgactttcaactcgctcctctgtgaaatgggagtaatattagtaccttcctcattgggttgttgttatgaataaattagatgataatatagcgcttagcaaagtcccaaacttacaggaaagactcatttttgctagttattgtctcctcttccttcaggaactctctgctcgcccctgggtcctgccagcccaactaattctagttctaatcagatctgtgtggtgcaaaacaaggctagctgtggtggtcttccctcctctaaggagatctcttcctccctatatgcatctctctatctctgtctttatcttgtcagtaaagaggggggttaaaaatattcagattctatagcgggcgccgtggctcacgcctgtaatcccaacactatgggatgttgaggcgggcggatcatttgaacccagtagttcgagcccagcctaggcaacatggtgaaatcccgtctttaccaaaaatacaaaaattgggctcggcgcggtgactcacgcctgttaatcccagcactttgggaggcctaggtgggcggatcatttgaggttaggagttctagaccagcctggccaacatggcgaaaccccgtctatactaaaaatacaaaaattagccagatgtgatggtgcgtgcctgtaatcccagctactcgggaggctgaggcaggagaatcacttgaacccaggaggcgaagtttgcagtgagccaagatcgtgccactgcactccaggttaggcgacagagcaacacatcgtctcaaaaaaaaaaaaaaaattagccgagcatggtggtgcatgcctgt

SEQ ID NO: 317669 - DNA, 4001 bp, Homo sapiens; identical to SEQ ID NO: 317668

SEQ ID NO: 317670 - DNA, 4001 bp, Homo sapiens
tagatacattatcatttgggacagaaaggaaattaataacatccagttaattttttcatgttagggttaattgcctcttaggaattttgagagggtgcagggtgtttcaaaattggaattggaattaaaagaaaaatgcattaggatcgcagtggagcaagggtcgcgaaaccatacatttacagataaccaccttctacaattttaaaaacattttcaaagattagtctttataacaatcctttgagtaggcaggtcaggtaatcatatgtccacctaggaggggtaaaaaaggaagctcatgaattatgagggcttactcagctcttctgactccatcactctgaccattaaaatgaggcagccctaaacaaagccaaaatctccacgagagagttgaataaataacacatagtatagtaaggaaaaaaaaaaaaagcaggaagtaagaaggttaatacatttgggcaaaaagaaggaaaccagaaaagaaaattagttcagtgattcaaagggagatggatgtgcaatgcattagtccatgcgtcttaaaagggactggacaatgtgaactgtgtttcctgagggaagaaccatctccccctttctcctatccagcggttggctaagtgcaactcccctaagctctctgagcaccctgcatgtatctgtattttagcattcaccatccttttgacaatttccatttaaataacagctaaattgaaaactcccctaggatggggaccactcttactaatttttgcacacagaacagtacttggtcctaccaggtgctccataaatgttttctgatcttaactttaacaattttttccatattcttttctatttctaacatttgctgattagacctggctttccactcccaacatcgctactaactagctggccactcctggacaaataaataatacaagttttctgaaattcatctattataaaaaggtgttgaaataggcctttctaatattctttccagctctaaacagcttccatgttacaaatcagggtttatagatggaattacaggtcttcgagaggagaatagcaaatgtgcttaggcgaagggggtgggtggaaaatgaacgcttatcttggcacagcagtttaacgagaggagaagcaaagttgattggtaggccaaaattttgaagaacaggagagggaggcgggggtgaggggagtggggtaacaggacttagaagaggtggtggtgagaaaaagggggtaaggcaatcgatagctaggttcacctcgatctgtcagagcccagggatgaagggatagagagtctacggagataaagtgggcagctatgctagttcctgtggatgctaataacaggagcccctcgtttcttcctgatcctggaattattctacaaggagaggaaggtgctatgaaaataaatgatgcctcacaggcgacaggtgtcccagcgtcccgagacaggagcccgctgtctcccgctggaggggagactcttgcaggaaagaaagtccgttctgtcgccaccggccagctgtgcccgaaaagtcccaggaagaaactctcgctcatccgcggcgagcggatcccgggcacaggggctggaggccgacccggtgagagtgcaaggtctcgcgaccaccgacgacagcagacagcgagtcgggccttcccatctgaggccagcttcagtacaggcctccaagcccgggcttgttttggccgcgacgtcacttccgatttcttctttcgccttctggctaaaaaacgttccgcagcaatgcagctgaaactttcgggttttcttttttttgtccctctctccttttttttaatatttttgtttttgccgcctttacgctccgaggcccatcctgccggagtactacacagacagggtcatttcagttgacggttctgggtcaccagagcagaggaagccccaatttcgccctccggtcacacctcctactccagatcgccccgcccacctgacccgcctctgcgccgccgggctgcgtgagtctcatgagcgtgctctggtacgtcatcttcgcgcgacgttcggttcgctgtgtgtgtcgccggctccttgagggtccatgtgatttttacgccagtgctgctgaactgtgcagggtagggagctggcacagtccgattaattgtccttgggtcgaggtgtctcgtcggaccctttggggctcagtggaggtaggtgaaggcggctcccattgagggaagcccacactcacacccggccttcctgtgttaatctggcatgctcttctggggcttcccaggctatataggagagtggccaaattctttaaccggctcaagttcccctcaattaagcttcgacctaggttcttctctgcgattacaccctttcctgtccaccgttgttagttcccggagtaatcagcaactctccaaggcaatggacacatttccatctttgcctttgcttacgaggctccctcaggtgaagtgaacctaatggagttttaaaatatttgggagataaaatcagcagatcttgttaactatttggatgttaggagtgaggaagaaaaggacacgtcaaggctgagtctaggttaatatctggtgccagtcaccagccaaaatggagtatattggagtaagcaaaggcacagaccatgtctttatttcattcaccattatagccccagtgcctagagcagtgtcctgcacattggtaggtactttaatgaacagaagagtgttcccaaagaccagtgaaatacaatcattggtcattgtatttcattaaagcaccttttaaatatatgttacacctatttatcgtggtgttactaatgtaaagttttcaggctttttggaatagatgatgagcagcacctctggaatcatttacctgataacattgaatctcttttgcaattgagtcgttctggaaaaatgttttggcttgattgcatgttatttaaaagttttatcctattctgccactttagtgttgaatttaatttcaggactgctttattacagttttctttcctactgtttaaaccttttaaagtaaatttaattttaagcttctacattagaatattagctttgtgtttcttacttcttggcatttttaggctttcaggaaatcaaatccgtaactataattgttatagattaaatgtcatcttaaacttggtttcaggaaacttgtatttgcagtttcaccttaatatttcctgttgccaaaaaatggacactcaaagccagcatgatcctttttggtttggctactgtaaggctgtgctagatttattcctaagtgttgtaaaatggttggctaggtgtgagaacctttgtgtacagctgaatagatggtgcgatatgatagccttcactttaattattcctgcttcctatagattgccttttctgggttagaattaaatggcttattggtctctaatctatatacttccacacagactttttaaagaaagcagagtgaaaatcaactatgtgtacaagcttataatatgtatataaaatattttatttttcagaattaaggcagagtcactgtaattatttctaataccaattccaaaatagtgactcttggacaatagtgcaattatatggaattatggctggttataagcctgtagctattcagacatatcctatacttggtgaaaaaatcacccaagatacactgtactggaacaactataaggtgagtgtgggacgtaatgagggagaagggatttgtgtttatgccaatttctctagcatatgttatactctggatgctctaacagagaattattaactgaaaaccatctatcagcagcttatagtttgggcagataatttgatatctattttttcttggaattttatgtaaaagtccatactgcttaatcagattaaccatacaaatgcctagcacagaacagatgatcaatcaatgccaaatgaattaaatt

SEQ ID NO: 317671 - DNA, 4001 bp, Homo sapiens
gagtacagtgtgaaatatggattcaactaaactattttctacatacatccttcatcatcccaatatcattttttgaaaaatcccatcatttcctcgctggtttgagatgccacctctgtaatacactaaattcccatatgtatgtgattctattttgggggtttttatgctgtttattgatctgtcactttatgtgccagtatcatatttaaaatattttatatcagaaaatattttaatatcctataggtcattacctccttattgttcttatttttcagacttttcctaattgctcttatttattttacgatataaactttggaatcagttgtctagttcaacagaaagtcttgctggtacttttttttttttttttttttttgagatagagtctcactctgtcgcccaggctggagtgcagtggagtcattttggctcatagcaacctctgcctgtttctcattacaaccaaaaactccgaatgaatattttttaaaaactactcgagaaccttgaaaagtaaacaatagcaggtagattggggactgaagttgaaatcttaataacaacccatttattgacgagtttcagtttgttttcggttttttggttcttttttgtctttcagctttgaaccatccagtgggcacagacagtaaacctatttttatccagaagaccaaggaaaatgacccctgcatgccagaaggtataggacaaagcccagggctttatgttgctttctctctcacctcccagccctgccccaaggctggccctagcctcagagcagacaccaaccatggcaactggggaacataaaactcaagagaaagtgtctaccagaggaactgggaaaagggatcggtattgcctgaaaagtgtggacagaatcccccttttttctctcttttcttaactctgtgctaaaggctgtcccccttgtaaggaactgctgtatagtgaaaaggctaacactcaaagaaacctgtctttctgatcatatgaactggcaagtgggtatgatgaggaaagggggcaggagaatcctggagaagagagagagggaaaggagaatgacctaattctgtgtacgatccaacttaagtcccagacacagccctgagcacatatgaagcagacctagtggcctcatccctgccctcttttccctgtgtctagcacagagaatatgttagagaaaggtttcgataacctgaaataccgacttttttggattcgtataaaactattcgtttccagtttggcagggaccagtttccccatcacacattcttttcttgagagaaactgttacccattttcctagaactgagctacgagtctcttgaagcaaaatgaagtctcctgaaacaaaatgcagttaagttcagacccaagatcttttttgcttgtgcaaaaagacttaaagcccccaaaaggaaagccttttgaaaaatgctataaagccacctagtacaaacctcattttatccctagctggttgggggtaggtgggaacagactgtgtttgcttatttacaagctctcagctcaggcacggctgccccacaaggctctgatcctgcccacaagcacatgttctggtcacgatctccactcaaaactctgaccccctcagagggcacctgggccgccctggcgcgagggttcaggcactgtggccctaatgatggtcaccttctccagggcagctccttttcttccaggtcgctctccgtcactgaaccctctatcacagtttcatcactgtcccagtctggggcctggacgccttcctccatctttgcctcacattcaaagtcttttttaccctcctctaactccctcttgcccgcaaacaaaaaaacgctttgagggccaggggaaattgtgaattaaaaataaaaataatataatcgcagcaggagccgggacttgtcgcagggctgctgaggaggacgcaggcggccgcgagcgcggcggggtagcagtctgcgaggcggcccgcgggtcccgccgctcgtcgcagacagggggcagccgctcgccacacgacggagccctgcgcagcgctcggccccgcccccagctcccgtggccggaagtgggaggccgcgcgcgcgcgcgcaggcctactctgggcgtggcctgccgctgcgtgtttttttcacggtttctcattctcggtcgctaggctttgagggtgctggggttgctgctgcagagaccagaaaggcaggcgtggcgcacccagaactcagaccgagcctgcttaacacccttggccgggagggtgacctgccatgcacctgatgcttgtgagccccagatacgggaagagctgtcagctcctgcccgccccagcagccctggcattctggagccagaatgcgaccttagacctaaagagagtttttgcagcccaccaagtgcttcctttccctttaatcccttgacagcctctcctcaagtgtcctctgaggtagacaaaacagatacgtttatcagaagttttagctcatcaactaatctcagtgatgtattttgcattttttttttctctcaacaacgctttggttacctgaaatacagattatgcaggaaaggcaggataaatgctttattttttcctcttttatcaatttttataataatagtaatgcctagcaacctccaaaagtagtcaattgcgttttaatgaagtactagaattttatatatttgatgtgtttcagtctagttgaacatttttaattcaaactaattcaaaacaaagccaagtgagcttccacttgccaagtgagaagaagattcaagaaaagaccaagttgttttcccatagcaagtgtttagtattcaccttggagtctccagcatctagcacatataaagtctaagttttgtcataaatggatggagctagagatttctgacttcccaattcattgcccttttcactatatggagtagctttgccattattatcattattattattttgtgtttttactatgtatattcaagccactgctatttaaaatgcttgattggtgattatcttctaaacttaacttgaggctgggggtggtggctctacctgtaacctcaatgcattggaggccgaggcaggaggattgcttgagaccagaagttcaagaccagcctgggcaacatggtgagacccctatctctgcaaaaaatttgtttttaattagcagggcatggtagcatgggcctgtagtcccagctactcaggttgaggcgggaggatcgcttgagcccaggagtttgaggttataatgagctatgattgagcaaacgcactccagcctgagcaacagagtcataccatgtctcaaaaaataaaaaaataaacttacttgaataagtaacttacttaaataaaattcctcgcctcaactctgtaaattaggcagagcaataataaatatgcaaagaactagacctcttttttattttttttaacagtagtccatttataccctccgtgtctaaatcagacctaaattcctatcacctttcctgctcacccactgtttaattaattcattagcgcattcttctgtgttgcccaagctaatctccaactcctgggctcaagctgtcctcccacctcaccctcccaaatagccggaactacaatctcatgccactatgcccacttcacccattcttttaattatccaactctgctttcacaggaattgggggatgcatacccagtaaatggtggtgagtggctccatttgccccagagggaaagatgactccactagtaacagtacttgctccaaacagctggtaacaagctaagtgcaataagtcctcacttaatgtctgtcggtagggtcttggaaactgcaacctaaaacaaaatgacttacaaggaaaccaattttaccattgtctaattgatatatatgagagttaagttcttacaacatatttctggtcacaaaaacattaccaaactt

SEQ ID NO: 317672 - DNA, 4001 bp, Homo sapiens
tagttacattcttgagagaattcgttttgtttagggtttattattcaaagccaacacagaattttttattttactttctaaaaaagttttatttaaatggtgaaaaccctactttagggtaatataatcaagatacatataataaggaaagtactaataaataaaagctatactattggtttcccaaaacgcaatgtttttgaacatcagtggaaaatgtggatgcttattacgaaatcttcagttctgaattttgattatgaaaagtaaccacatttgatcatcttttcaatgactttcacgtgatccacgctttatgctttagggaagcaagaaaatgttaggttatataattcaattttacttaataacgcataataaaatctggatttagaaaacagaataggggtttatttgcagtactgaaggttcgctgtctttacaataaaattgacttaaacattcaagtatttgaacatcctagttcctttaaattaagaatactcaagagttacccggtggctcacgcctgtaatcccagcactttgggaggccgaggcgagcggaacacttgagatcaggagttcgagaccagcctggacagcatggtgaaaccctgtctctattaaaaatacaaaacattagtcgggcgtggtgtcgcgcacctgtaatcccagctactcgggaggctgagataggagaattgcttgaacctgggagccggaggttgcagtgagccgataggcactgcactccagcctgggcaacagagcaaggctctgtcaaagaaagaaagaaagcaaaggaaggaaggaaaggtaagaaaagaaaataaagaaatatactctttaatataaattcacctcatactagcaacttaggtattgaacacctgcaatatacgtaatcaaactttccaataatgagaacatcttgcacatccacaggtatttccaagaattgaggcacaacggaataacataaaccaaaaagtccacaaggtgcattgtctgtcacacatacattgtaaattcagttcaaatgttcattcccaatatttcaacaacaacaacaaaattttttaataaagtcattcgtcaaaaaagaggctggcgcctccaaaatcaagctccatctaactcctgagtcaaataatgatatgaagtacccgagacggaccaattttttttttgtcaatatttaatctgaggctttggaagtggaagaaatcttaaaatagccactcagtcttgtttccagccttcaggcagctgaaatataaaccccaggaacacagaccctcccttcagcgaaaagtgtatgtgtgtatgtttgtgtttaaaggcctatagcagtcagagataggatcactgccgttttagcagtttaaaaaaaaaaaattctactagagaggaaagaatgacacaattttcttcgtcacaggaaagtgggcctggggtatcccagccaccttcgcagacgctaagttatggaaagcagccaaaattctggtatcaggatgaggcgtccccatgggttctatggaaacgagagacgcggggggcctagcgccttccaggcggcgggccgagcggcagagctgcgcaagcagaagcgggggaagtggctcagcccagtactgcagaggggcgctcggtggcagtccccgcagcggcacgggcgaagcgtcgcggggtctgcagctgcagcccaccaactccggcgccgagcgcgaagtcgggagagctggaacgaactgcagctggagaaagcgcgagagccagacaccgctgccgctcaccccagccgcttccttcctagcctcacagccgggaggcagaaacttcggaggtaccgcccggcgaagaaacatccccacagagacagaatacactgtgtcttcctagctgagcccctttaccttcccggtgtctgggatgcttccttcggtggcagcggcggcaggggcgacgactgccgctgcagcactcaactgcttcacgaatccgggctctgggaaacaatttcccgccgcgcgctaggcagccccggaagcgatagtaccatttccgggtggttgtcagtgacgctccggagccgtcgccagggtggtaatacctggtgcagagcttgagtctggccagcgggtcaggctcttgctagatcagcaccggaggtggaagactggtaagtgattttactgggttttctcctgcgcctgatattaatggctggccggggctctgtgcagcattatggccagcccgagaagtgagtgggcgagggtggaaccagaaggagtccccatcaaaccccgtggcgcttgacacccagtgcagctggagaaggccctgggatcccggcttaccgtcttatccactcgcaaaatctgtctccgacttggaactcgacctcgggtcaccaagtgtccctgggcgaggccgaagacaccgtgtaccgtgactcggcgttgtgccgagtttctctaccaatgatcaacgagtttcctatctcccattggcagcgtttggccactcttgattcctgagtactgtttccgtagttctggggtgccgtgcctggaaggcaggaggttggctgaagaagacatcttttacaaacatttaggaagtgagatggggaggttccttcctgatttagaattaattgaaggttcctcccgccatttgaattggatgagaagaacggtctttgttttcatggctgagacataagagaacaagcttgtaatttcatgcttgggcattagatgcatttttggaaagcagtgatcagtaagtatgtgtgctttcagaaaggaatgcttgcgttctgctccaggctttgtcgataatgaaggattcaggagaattttggatggaggtctgaggtagccagaatagttgtaaagagaaattgcttccgacaaagggataatgtgaggaaaggtgctcatttaagatttgaaagatgtgatgtagtgaaccttggcgacttctcttaagtaatgcaatttcttaggtaactagttttcacttgccaccttatatttagataattacctccccaccaacccccgtaaaaggcagctgactgttattttttcaaaacagtcagttcccgaaagagttgtaggtactattgcattttttttatgggtatgctcctcatacccataaaaacattttctttatcggagcataccgataaagaaaaatgcaatatgttcaattcaaggcccctgttaacaccaggccagtgtcttcttaaccttttgagagtaatgcaacaaaccatatttaggacagcacattgattttctggccttgttggttaataattcaacaaacttataatcgccccattaatcccaatcttgacattttgttgaatcttgtattttttctttatttctccagttgaaagtattataaattacttcagggatattatgtattatatctgtacagcaactagtttttagaggcagtgatttctctctttgaattgctcttgaatgtagccaatcattaatacttaccccaagtagatactgtctgccaggcactttacatttattattttatttaatgtttaataaaaaaagaaaatcacaaaaattgtattatttctattttgcaaaacattttatactgagacccaaagaggttgtgattttccataaattatacaattaaatggcacaattaaaatttgaatccagtctacctgactctaaattttggctctttttactgtgctctatacctttataagtaaacataacagtatcattattttcactccaggtaaaaatggatagatagtatgtcacatttagaaatcaagtggatagcaaaacttgaggataaaagggacttaagggatgtgttcatcaccataaggtaattttgacatctaaataatgcagtttctttagtgcctttatccttggccagttttattatcctaattcaaacaaatgcctatactgtacatta

SEQ ID NO: 317673 - DNA, 4001 bp, Homo sapiens
caagccctaatcacatgccagccagggcatctgtcgccagggctgggggaggaggcattgcaagaggaatggcagcaggaactacagggctccaggtgatgctacctacggggacgccacctcaggtctcactgcctaacatatgacaagcacagacccttcctccaagttcaaatgttgtgtgatatggtttggctgtgtccccacccaaatctcatcttgaattcccacgtgttgtgggagggacacggtgggaggtaattgaatcacgggggcaatgtagtacaaggggagagtgacattggagggcttcccatccacctaagcccagcccaaaccacagtcagggcaaaccacttgccccacccactgcaggataaaccaaaggcacaaggtcacccgggtccccaagtcaaagcacatgttttctgtcagctgcaggctcctgagcaaaaagcatgtgcatttgtgctaggctgcatctgcagataccacggtccttggacaatacaaaaatcaggtgagaacgctgccatttgcccactgagcacagactacggggaacttggccaccgtggtcactctgcagttttcccttgaagtgctttgcttggtggaaggtgttccaccagccagtccttctcaggtcttcttaagccaactttttttcttttcctttcttttcttttcttttctaaacatctcgttttctctgaatctggtcataacgaaaggatagcctgtgcctgcctccacgcctcctgccctacccgggtggatgcccgcggctctggggctctccctatgccctgactctggggagccccggctggcattggctcgcgaaggtgacctgcggacagaccagtcagagatcacgttggctggtcgcggcgcgggccacaaagctcagcggaggtggggtaggggaccaagctgtcccggcgagggaagaaactgttgcttccaaatcattgcggctggaggagccgatctgcgccccagcgtgttaggacaagggcggcgcgaggggcccaggggccaaatggggcgctgggcaggaggggctgtctcctgcaggggaggaggaatggtcccctgccagggacctggggaaaggtaatagtcaggaggggaccgggccgcaagaagcccatcctggattgcagcacgggcagccagcgcgaattcagtcaggaggtccacggggaccggtaaacgagaaggggatgcggtgaggacgccggactggcgtttctgccgcgctgacacctcgactgctccctccccgcaccgcgtcccccagcctgagacggggaagccacccagggcaccgcgctcccaaacagcggggaaaaggcgctctgggcggcggctgagtgaccgagggaccggtccggagccaggagctgggaggcgcggggatgtggtggggaggaggggagtgggggcagtgagggggctcaaatcctgcggggacgcccgcttaccctgccgttgcggtcagtctcctgcgcctcctcgacgctcaccccgcgccgcaccagcgtccgcagcagccccacgttgttggcgcaggcggcgcgcaggagggtcgccgtctccgggacgctttccgggacgccctccgggacgctctccgcgctctcgacgccgtgctcctcctcgtcctcgaaagggtagaaagagtcgtccgaggcgatgctgcgggtgtctggcagactcgagaagtcctcaaactcttcgtagtcagcggggtcctcctcgacctgcgcgccccggggtggggacggcggtggtggggtcatgcagcgcgccccgccgccctccggcccggtcccggccagcagcaccatgccggcggccggggcgcgggccgggggccggggcgcgggcaggaagagcgggacgcggggcgcgcgccgaggtccccgcttctcgcttctgcgtccccagagaagccgtggcccgcgcgctccagctcggcggaaaccggcaccaggcggctgcgctcaaagaaaaaagtctccggaggctgagcgagcccctggggtgggcgggaccgcgggggctttccgaggcggggcggggcggggcgcggggacacgccttcccccggggccttcccctcgcgccccttcctggccagagttcagagccaggcaggcgctctctcgagcgcggggactgggcacctggcagcgttgccccagagctggggacagctggcgcgggagaagcagaagcaatcactaaagaagccgaacccgagtcgcgggcggcaagcggccccgcccctccctccgccggcccgcgggatgggggcggaggtggcggcggggggacgccggggcggagccggcctccagcttcgggaacctcggacccctggagccggcctccgccgagggcgtcgggcccccggacctgggtggggccggtttctcccgccgcttcagaggagcagagcgggttttctcccttcgggggatcccgggcttcggggctgactccacccggccgcggccgcttggaggccggggaatccccggggcgcttggcgggcagaggagccgggcgcgggagcggagccgtccacctgggacctgtgcccggggagcgctgcgggccgggccactctgaactgggggcggtcggctgctgtgggggagtcccagcccggaagggaggacaatcctcagagtcccccgtctcgcggaaccggggccggccgtggcttgagggttggtcagatcctgggatggggggcggggtgttccggaacctcagggagcatctgagtgggaacggacgacgaggaactccccgtccccatgcctggcctgtgtcacgtgcggggatctgcggactcacccccggaggctgcgactgggcgctgaccccacgtctggctgcccaaaagagcagggccgcgggcgacagccgcagtccaggcccacagcccctctggcccggccttgccctctccccgtcagtcctggcgccggggatgggcggggaggaggagggcgtgtgaggatttgccacagggagcccttgacttcggggtaggaggcgtcgtgagccaatcttgggggaaggtctctgcgcaaaggcgcggaggtgcgctcgcgcccgtcgcaggtcaaagactgcggaggccaccagccctgtgtccccctagcctccttccttcctttttttcccccgatcttgacagcgtgtccaccagctgccagccggtgggaggccctcgcggccccaaggtgaacacagctaggctggcgcagccgctggggaccaggcttgaggcccacgtgccgctgggcaagctgaggggcacgagggcaccgaatccgaaacagccgtgggaggtgtaggatgaggacacgtttaaactgcgaagccgctcgagccctcgtgtcacaccgcactggcccgacccgctgtcctggtcgcctggtcttccagtgtctccagcaggagccaaagggcctgctggcggcccccgacccggcatctgcagggccccggagggtggggcgcgcgggagcaccgatttctggtgaagacgccctcgcacctgggcggctctgagcgagcagcgaactgagactcgctggcctccttctctactccggggattctttctgcaaccaaaaatagcccccagattacagtaaactctacctttttgtgtaactgaccacagtttgcatcaattcccactgggaatttcccctttcaaggttgagggttgtttccaaaggcctggggtagttacaatttcaagtgccccctgagggctgagttgggtttgctggacccactgtcctcccagggagagcactgcgtcactttacagcaagagtcccggctgcgggtcaccaaggcccaggtggacagggccaggccctgagaggggagcaccacgcagccttttctggcctcccgtaggcgattggtgctcattgaccgcgtcactcagcaagggaattgag

SEQ ID NO: 317674 - DNA, 4001 bp, Homo sapiens
tttgctgccctgcctttcctagacgggtttgaaaaaacccagagccctagtgggcagccgaaggccaggagggaggccagctacactggaataaggcaagcctgcttgccacaagcaaatgtgtacctcctcccacccaaggaaaggggcagagacagaataaaagatgcatctgaggtcgtcctggaaaatggaatgactggccagaaaaagattcttccctggtattgacttgcaagaaatatttagaaactgtccaaggagacgcgtagctggtaaggtttgctgtgtttcccacacatacccgcaaagggctgccgtgttctcctagttacttcggctgtcccccaggcctttggggcatctatgccccaacctctgttactgattcacctccccccaaaacacacacacacacacacacacacacacacacacacagagagagagagagagagagagagagaggccaacctagtcctccaagtctcagggaaccaaggtgatgggatttccaagctgttgaggatgctggcagcgtctccacggtccccgccgacccctggaaccaggcgcgtttcctcagtttttcctgagagcaggaggaagcgagctcaaggcgctgtcggagaagggcaaaggaaggtgactggggcgacagctccagggcaccgatgggggcggggtgcgcgtttcgtcgcctcatctctgagccagggcaggcagctggcgggctaaggcgatcaccatccatgaaaacgggttctgcccacagccgctgcggagcggtccctgcgccgctcgcccgccggccggacgcggccctcccttgggaaatggtgcgtctgaggggcgcagccactgcccccatcccggagcaggcgcacctctgcacccggctctctgctaagggggtccggtatcctggtgccaaggctgtgcgcacctgagaagggcgggaaccggctgcccgcccctgtgtggctcctggaagcaggagctcctggaagctgcaaagggctccgcagtccccagcccgcccccagcgcccagccggcacctcctgctgcccagctgccgaggcacctgcggagacgcgcccaagtcagcccctccggagacgcgcccaagtcagcccctccgacccgcgcgctcttgcggcccagcgcgcgccgctcccgctgctgcgccgaccttcgcccatcaggccccccgccccgcatcctcctcgacaccccgcggccgggcagccctcgccggttcccgccgctcggcgaggctgagaaggaggcggaacccgcatccccgcggagtccaagccccagcggccgcaaaactggaaccgagaaccagtgggaaaggcaggaggcgcgagggtgagctcgcgtggagcgcgccccggggtggcggggcagagtctctcgggaggcccctgcagcccggcggccctcggctggccctgggtctctcatcctgctcggggcactgcaatgtcagggtgagcgggaggtgcgggcttcaggggcttgcgcgcaccgggcagggagcactgaggccgtgcgggccgctgggttccacgctgcgccctcgatgtcctcctcccggcagccgccactgcaagccaaagtttcccaagtgcagccggcagggacggcgcctcacactgacctgggacgcgctgtcgagttggcggcggcgctttcaaacctctctccggcactgcccgaccctctgtgcggccctagggcgccgtctgagctgagctgtggtcttcggctcctcggcgcctcgaatcgcagatctcggtagatgccgcccagtccccgccctgcttgcggaaagaggcgggcgactgccgcgaagcgctggagctgggacccggagcgcacacctcgccagacgcccgggcagcgaggcgcttccgctgggggtgacgcgtcggctccaggctctgcgcaggtgagggcggcaaggctcctctggacccaggggggccagcagctgctggaagctccgccttctgtccccgtaagtcccacccccgtcccccgcttcggccaccgcgcttcggccacggcgacttggccaacaacagcggcagcagggtctccccattgagggaagcacgcacccctacgtcacgggctttggctcctccagtccgtatccctcccctcagctcacatccacccgctggttcatgggtccatctgtccccaccggtccttccacccctccgcatccctgtacccacttcaggtaaagccagagccacacttcaggttggggtgttagtgggaacaaccgttcttatttacgtctttaggaatttataaggttattatgctattattaaaacatgaataaacatattaacaaaatttcgaaaaatacatttcatatgttaaactctactgagagatgaaaaggaaatgaagcagaagcaactttttctgtcgtttttagtttttggtttttttgagacggagtctcattctgtcacccaggctggagtgcagtggtgtgatctcggctcactgcaacctctgcctcctgggttcaaccgattctcatgagccagcctctggagtagcagggatgacaggtgtgcaccatcacgcctggccaatttttgtatttttagtagagatggggtttcaccatgttgcccaggctggtctcgaactcctgacctcaagtgatccacccacctcggcctcccaaagtgccgggattacaggtgtgagccacaacgcccggccagaagcaaagtttttaactcttcatttatcttggagggtctggtggagaaaggccatcactatttttgttattcagataatgtcaatcaaaacttgtttatagttttgagttctcgggaaaagtagatttatctctggtcaggcttcctttattaaagaaaagatctctccgaaatgaggacctaaagggtcctcatttagtaaacatatgcaaagcaattgcacagggtgctttaccccaaagttaggctctagggagtttgaatcctatatctgggctgccctttgcctacagctgtttgtttggaggttaccaggaagactgagccaatttgcatgaaggcacggggctcctcccccttaccacctccgactgttctcttaaaaaaatttcatcaatgtgcagtgtacctattaaaaggcaaatattttggctgagtgctgtggctcatgcctgtaatcccagcactttgggaggccaaggagggtgaatcacttccaggtcaggagttcaagaccagcctggccaacgtgatgaaaccccatctctacaaaaatacaaaaattagccaggtgttgtggtttatgcctgtaatcccagctactggggaggcttgggcaggagaatcacttgaacccaggaggcagcaactgcagtgagccgagatagtgccactgcactccagcctgggccacagggccagacttcatctcaaaaaaaaagacacacatttcacaagtccgatgattttgcacaaaatgagcatcatccagatcaagaagcagaacattaccagtaccctcacaacactccctcttcagatttctcattggagggagtggtggcttcaaacagcatagagtagttttgtttctttttgtactttatagtgattgaatcactctgttgactggcctctttcactaatagtatgattaagagatgcatactgtgtgtggctgtagtctgtttattctttttgctgtatagtattccgttttgtgattgtgcctcaattgcttattcattttactactgatagacatttgggtaattctcaggtttgggacattacaaataatgctgctatgaacattaaaatagatgtcttttggtgaccatatatacttatttctgttgggtacatacctaggagtggaattgtgagtcatgatgtaggcatatgttcagcttctggagatgccaccaaacagcttttcaaagcagatgatccaatt

SEQ ID NO: 317675 - DNA, 4001 bp, Homo sapiens
cagcactggaacatgtaaattcattatgaagagctagttcttcttcagtcagtcccagctccctccaattagtcttcaaaaataaacccattgtatgtttcgtggcttagcaacatcatttttcagccagtgtgagctctttggttcttagcagattttcacttttactgactgccatcagtgatataaaatgtaccaggaggagaggatggtggtgggcacagctgtgacaacgcctttctctatgctgttcagatccaaacacggtatgagccggcacgttctgaaggcgcgcacacacacacacacacacacacacacacacacacacacacacatacacatacacaaacactattccaaatgagctaagacctggagaacacactatacacatatatacattagctaactcaggaatctaaatataaatttatttttggagaaaccccctgggctaaaataattcacccacaaagccagatgtagcttgaggggtaataaacatgctatggcctagagcaggaaaagggaaaaaagaatgaagcagtacattttcttaatgaggctttttcaaaccaccatttcatgttgtagccaaaacagataaaatcaccaaaggaacttaggatcttgaagaatattcagagactgtagaaagtggtttaaataatagatatttaagaaaagattctaaaaaatatttattatgtttataaaatggaaatttcatgtttatactaaaaaaagatttactattacacataagtattacacgaagatgtatataaacacattgcatatgcaaaatgtatacacatagaccacatggccaaatatgtgatattataaggataagttgatctcacagcaacattttgatgtggaaaattacctccactccagaaattataagtaaggaagatataccctggcattgcaaataatagcatagggatatgtcattacacaaccttggatgagataacatatcaacccgacataaatacaggcaacatctattcctgaaaggaataaaaaaatgcttacgaagatacagcaatgagatactgggctaatcgaatgacaaaaaaaatgtgatgtgttcttacattgcttaccctaatttttaaaaaagatttggaaaaaacagaataaagatgacactatctgaaatagttggtgtgcttgaaatccagtttttaaaatttgaaggtaggaatacttcaacaagatcataagcttatacaacagatcataagcttatttttctgtttcagatgcttatcaaactagaagtgaacattttgaacaggtttgttttctaggtgaaatcctctttccacatcctacatagcaaatactcatgcacacccacgcacatgaacacacacacacacacacacacacttctctttctctccttacaactgtaaatccataccatgagactaaggatgctaacaaccaaagaatgtgttaaagcagcattttacctctttgctgatcaaacacagaaggggtgctgaaatccatggtagcctgtctcatcatttaccatcagaatggcaaaaagcatccaggtctctagagaggagaaaacaccatctcaaaccttactgtcaacatgacagtcagaggcagcatcgtttgccaagacctctgtttcaggattaaatgtgcatcagagctgcaggttgttgtcaaggcaaggtgatgaaaataggtaaatgctattcctgtaaatacctgctaggaaaagagttactctatggcctcattcatcagctgtacatgggcataatacaccctccacccccaaatcaataaacacaattactcaaactccaaaaagatagtaaaattgtatgggccacctgccttggatctgggctggaaaaacacagcagatcacggagcttcagcagctggaatgtcgctttacaccaacagaaatctgaatgggtgagtgaggattcacagggccagacagagcatgtgcaaagctgccaatgcagttcgcattcggctgtgcttttggcggagtgagaactgcatttgggtcatgtgagcagagagtgccatctcaatggaataggatgtaaatattgtagcaggaggctgctggccatgtgctgtgtggagtaattatccatgttggcagtcttcttcactcccctttcagctccgttctccaattgacagggaggatggggaaaggcgtcatttgaaaggtgacatttcaaggctcgagtgtctgtggtgataaaattaaaacagtctgctgtcacaagggtgtttattgtagcattacatgtagtaaaacctgaaaaatcacccgaatgtacctcattcagggagcagctaagtaaatggtagtaaattcgtactctagatttaaaaatctgacataaataaatctgtgtatttatctggtgacatgtcactaatctattgttaaatgaaataaacaagttatatatttcatttgttcgtgttttaataaaaccggaaaccactcactgtatacattatttttatatattcagacgaacactgaaaaagatgtagaaagatacgtactaaactgctaatattggttccctcaggccactgtgattagagtaggagatttctaacttgttctgtatcaatctctgtatttttggcttgttaataaccagtatctattatcttgtatttgtaataaaaatatgatatactaaattcaaacaaagttctatattctaggcacaaccagatttttggataagtcaaatagccatatagtagatgcttgttgaatctaataataaacaccagcttcctttgcccttggataggatgattctgaggcatggtgttttactccgtttgccatttccctttcaggattaaactccttcagggttaaactccactgccacctgtgagaataggtctaataacgttctttttatgggctgctgttccctccctgtattactttcccacgttcctactgatatttcctgcacttctcaataagttacttgcattggaatcattgtctcagggtctgcttttacggaaacccaaattaaaatatttctccacaagagggtacatttcataagggcagggtctttgtctactctttctttgtctgctttgtccactccatgtccttacagcctagcacagagaggggcacaaaggaggtgctcagtacatttcagtgcatgagtgaaacttcactgaagaactttccttgctcaagctgacaacctgctcactgacattgtaacattggaacccaattaaccatccttcatggggtaagaactttctgacaagaacttctgtagtccttgaaattttctagtctaaacaagaaaccatgtacttgaggattggttctagggtttctggaattggctctcaaatctgattaaatttaaggattctaatagctttatttctaggagtaaagagagcattgatagtccatggtgtgaagtggtaatagagatatgcaaaaagctgcactgaatattcctaattaatcactggacacaacaggcaaggagttgggtgactgtgtagatgataccctcaaacatttttggaaacttaatgaatatggctggttgctcctaatgtcactggacaaagtgatgaaagaaaaggattagctcacggattctaattcccagctcaggtgccatatagatgacctggaggtgtgtatgtgtaccctgaaggagagtcttacctcctgtagccatgaggctgaggatgctgcaatcaaatgcaggctctcatgctgcagctgcctgaattacaatgcaaattgaactcctgaattacagcgcaagtcaaactcccagcttcacaggatgtctgctgttaaagtgaggacattgattgggaaagtagaggatactgtaaattggatagagacatgtgagaagaccctgatgaagctgggggacactgagcatctaaactctgaggagtct

SEQ ID NO: 317676 - DNA, 4001 bp, Homo sapiens
cattccgagtgtaggaggtttaaaactcccgaaaaggcagtcaaagcaggcagggccaagccggacctgctgtgcctacccgaattgctaaacccagttgtggtaccattaagtaactggtagttctcttataagccaagctaaactgttccaaagaaaaagacgctggaaacactgctagccctgagacccatgaataagtagtcttttcaattatttatttattttgagacaggctctcgctctgctggagggcgttggtgctatccggctcaccgcagcctcgacctcctgagctcaagcaacccgcccaccccagcctccggagcagctgggactacaggtgcacaccatctcacagggctaacttttgcattttttgtagacacaggcctcaccctgtcgcccaggcttttctcaaactcctgagctcaagcaatccgcatgcctccgctgctgaaagtgctgggattactgccgtgagccacgctgccccgccagaataagtaatcttaagaactggtcatctgtgaagttgtattaatataagtaattgcgtggtccttccacgagaaatagcaaagattgataaacctctcagtcttatgatcgtgaataaaattcctgagtgtaaaacaatgaatcgatatactgaaaaaaagaaagaccgctgttaaaaataaaattaacaattaaaattaaaaagacgttataataacgtaaaagacatgatataaaattaaatgtaaacaaacaatacatttaaaaagcaataattagaaaaatagtaggaataagattttaaaatacaatggaaaaaaacaaattttaaatttgccaaaaactctaagaattctacaatcgtaaaatagatttctcaaagtgaaaacagatacgaatgaaatatttaatgaaataaatacaaatatttaaaatacaaggaaactgaaagtaataagcgacgcgaaacaagaaagaaacataagggaaaaagagaatttaaaaactgacaaccagcaatgaaagcacatcttaatgtatttttattttctaggtggagacgtttggtaactgagaatcttttcaaggaggagaatccaaaaagccttctgctgctatctaaggctgcttagctccacagatccgtgaacagcacgcccagagtacagagaacgcggcaaaaccaacgcgaagaatccactccaggcagtctgagaaacccgggaggtggcgccacggctggagggcaggaggatggcggcgttccaaaaggcacccgctgtcacagacctcggtgtcctgctgtctgtcccagggatggagaggactgctccagggaagctgctggagcctgagtctgtcgggttcctctgcctgccccacctcttctacgggtgcctcttgctgcttctgtgtccccggccaactgaactcagtgggcttcgctgtacttggttccaaggtgctctggactccaggagagagtccgttttgccagtagactccgggcagccgccagcaagggctggaaagcagtcccaaatcacagctgtccagtgagtactctcctagtactggatacaaaggaagaggccacggcccacgatcttctgaactcacaataggtggaggctggggctctggcgccacctctgcggaatcccaagcccgcttcacacagccaagaaaatgttgctccatccctcaagcctcagaccaacgtttgcgctgatcaaggagggagagtctctgcactaccatcagcctgagtatttatgctctgcagagcccgtgggcggaggccagtcagatattaagaaactcagtagtaacaaatgcacgaaaattagtagacaaatgaaaaacgataacattttagagagtacatagaaccaaaacgaaccgtaattccgacagaaaaacatggcgagaaaagaaaccgaaatgaaatgacactaagcaaatcttgaagagaactagcgctacagaacgcaggtattcaagagcgcgcaagggccaagaaccacccgtttccgggaaatgagcgttgctgccaccggaaaactgtctgctagggctctgccctaaccaccttgcaaacgagaaactggcgcgttgaacttagcaagcgccggcacctagcggatagcgctggtattgccaaacaaatatccgttttggcgccgtaaagggtgctgctaaagagaaacagcatgctcttagaactaagagcggtgcttccacacctaaacaacctgtttggaggaatgaaccaactctgtttcaatgtgttgtaccagaaaaatgtgttgcggcatttaatgtgttttaatccgttcaatgtgtttgataggtttaatatgttttaacccgttttaatgggttgtgacagaaaaagcgccggctaatggtaccacacaattactagtgcgaacagcggctcggtgcaatcaccgttctgcacggcaaaacggggttcaggaagttcctaggagatactagcggttgtaggagcgaaaaagtgacagcactgagaacctaaggaccccgcgaacgggaaatgtcacgttgggtgcagcaactgagaaaacgcccagtgggcgccactggcaaacgtgctgatacaaaaccgccagctctgcataggaagcggagcctccagacagaacccggaacctgataccagcgaggctaagaccgagctcggctccccggctcctgagagaatgaaagtcaagaagcacgaatctgagacgctcaaaattagaagaaaaaaaaaatacataatttaaaataatgaaagtctgaaatgcaagtaaaaatgaaaaacacatcggtaacattgtcctcagagcaagacacaaaaataattttaaggtaagcaaaagttacagagaaccaaccctacaaagaagaaattacaaatatggctaagcgatgcaatgcctaccattagaatatttctgtcagatctaaacccctgcaggttgctcctgtcataatttcctacgagaaaaaaaacaaaaatatccacggttaaacgtgtttagctacgtctaaaaaatcgtagtagctggtacatcccgatttggtctacaagaggaaaaagtctcgatgggcaggacttgctattgtcaaagggagcttggtaaaactgagacatcgcgatcgccggcatttcctgacttccacgggagttttaaaaacacacaagcatagctaagacaggactcgatattgcgaaaccaaacttggtataagagctcccaacactgctaaactggtcatcgctaaacctttaaaaaaaaaaaaaaagcattcgctggtacccagatttccacaggagttaaacatttcctgcgcagctaaagcaagtcttaccagtaggaaaccggaacttgctaggactaagaaacttgaggctaggctgaccccatggttgttatgattagaaatccgaggccactggaaacccggagctgctgaccaacgagtcacagggtaacttcgccttcgcatggggaaacgggtgagttcctacggcctagatatcgcagccagggctagaccggtgtttgtcttaagtcaggacttgcttgggctgagaaaatacattttggctattcccctacttggacagagggtggaaatcccaggcaccgcgaaatcgaaacttgctaggactaagaagccaacgacgcgcgaaaccgtggggtcctgcgacagagacgccggcggcgccgccacaggactgcgttctggaggccgagccggaacccgtgcggcggcgctgggaagagactgtgcccctgcagctcccctgtcaccggctccaaggagcgtcgggctccccccgcccagccctgcagcacccatccggcaacgccagactcggcgcaacgggggcagctgcgactttaaatctctcagatccgcggcctgagggctgccgccaccgagaaatggaggcacagagctgtgaacaagagaccacggctcgc

SEQ ID NO: 317677 - DNA, 4001 bp, Homo sapiens
tggtggcccagggctccctctggatgctgcagtgcggatgtgccagtcactggcagctatccagcactgcagtctcccccacttcatcccaggagtcagtctcaagaggccaggccttgggcttccctggcccctcctctgcacactcacatctacattttgccccagcaacagctgtggcccttatccagaaactgcaagtattttctgtatctcagcagatgctgccttaggaacaaagggtagataaggcaaagaaagatggatgagtgattgtcacagctgcagagggggatgaaagcctctgcctcctgccctccccagtcccatccaactcccagaatcctaaatcttagaacagttgaatcctagaatgtctgcactggcagtggcagccagttcagcagactttgctccagatggggcacaaagccttagagaaagggcttgctcaagaagtcccagcacatccggactgtaaccgggctttcctctgaccccaggccagtgccctcggcgtggctcagggcctgcctgctaggaggtcagggtccacaggggctgaaactggggcggtcattcacttcaccatgaagggctacgcaggtcaggatatgccatctgggtcagtggaagcaatcccaagcatgttttgggcaagggggaaggaataatggagggaaaagggcggactcttggggggaaaccagagtcctttcacaaacccgggagccatatgtccaaatttggaattgtcagagaagacccactagaatctagggaaaggaaggaggaggcaggaagccgtggccagattagttgtcccaaaggacctcctgccctttccccttgtagggcctacaagggttgtgccaggcttcccaaatctataatcaagactcccaaacctgcaatcattccatacagctgacaaataaatcagttttcaaagccattgtttcctttgaaagagactgggtttctcaactatggacttggagaaggaaatccaggctcagagagggaaagccaccgcccaaagtcacactgcaacaggggctgggattccgattcagggtattttgctcccatgctggtatatggggaattatttgaagcccccaaactttgggaaggcctagaccgcttaggggatgcagaaagaagggtagtgcccctgcctcaccataggaggcctcggagccccgttgggagactgcattcatagacaagcagtggcccaaaggggatggggtccaatgaggccctgaggtatgtacgaccggacgttcagctctctgcacgcaggcagccctcccccgacaccacacacaagccattttataagcagctggagggtccaacgctcttgctctcagtcttgggcctcagccacacccttctctgcgggtcctttgactggcgtccagctgaccccaaccccggaccttcaaagtctcttgagcccccccaaattaaggccggcaggaccagcccctggctcagctccggcgcccaggaccctcaaccagaccctctgcagcaacgggactccctcccctccccctagccagggcgccctccgcccgcgcctctccgccccgaccccagatttgctccgctgcgctccccagacacacccagtctgcgacactctcgggttaccgcgccctcccgtccctgctcctggcggggggtacccatcagccgatgactgggcgcttatttcttgtgtccctgcagcccccgggaaggggttcccagagcgactcccctctccagcctcagcccactcaccgcgcagcggaggcctcgggtcgcagacggacgcacgggcgcagggactcgaggacgcagcgctcgctggatcggagcccgttagcccagcagcaaccgcagcgcggggcggaccgggaggacagccgtgggctccgagccggacacgtggcgcgcagaggccaatccggcgcgcccgcctccctcctccaccccacccctctagctccttagctcttggaatcttagaatgtcactagcccgaggggcttgccgggagaacctcctcagtttccagcccccggatctgagactgagaaggattaggggctttggccaaggtcacgcggcccttcagggctagaagtcagggctcctgactccgggttctggacactttcccgcaaattcttataagtcgccaaagctttgttgagaaacagaaaattgaggtttgccaggggcactttatctgcctgatcagattccatgcctcaacagcctcattaggtcggtgacattatttacccactttcaggaggagagcccagtccagttcctggaccaaggtcacacaaatagtgggttgcggaggcaagcttcttcgtgctctgggaagcagggaaggcaggcagggagaccagcagttgtaatccagcgctagaacaggaaaaattgataaactgagaatacagaggaaactgagaattattgtccccaggggattggtaaggagaagatgaggaagttagaagaattggacagatacctgcggaaagtgttccaggcagaggaaactgctggagcaaatgctcctagcaggaggccacctggcgcctccgaggatcagcaggggggccagtgtggctggaatggagtgagtgggagggagaggagagataagagggacccaatcaggtgggacctccggggcccttgaaggcacgctgtcttttactctgagtcaactggggatccattgcaggatattgagcaaagaaagggtattatttttgggtagatgaaatccacacaacataaaattaaccattttaaagtcaacaattcagtggcattttgtacagacacaatgttgtgtatccaccacctctatctagttccaaaatattctcttcacggaaaaataaaacagtatacccactgagcagtcactcctaactttcccttacccctcgtctctggcaaccaccaatttgctttctgcttctgcggatgtgcctattctggatatttcatatacatggaatcacatgagatgcaacccttcttgtctgacttctttcatgtggcattttgtttgtttgtttttgttgttgttttttcactcttgtcgcccaggctggagtgcagtggcgtgatctctgctcaccacaacttctgcctcctgggttcaagcaattctcctgcctcagcctcccgagtagttgggattacaggcatgcgccaccacacccagctaattctgtatttttagtagagacggggtttttccatgttggtcaggttggtcttgaactcccgacctcaggtgatccacctgcctcggcctcccaaagtgctgggattacaggcgtgagccaccgtgcctggcctcatgtggcatgtttttgaagttcatccacactgtagcatgtatcagcactccattcctttttttttttagtttcagttggagttttgctcttgttgccaaggctggagtgcaatggcgtgatctcggctcactgcaacctccacctctcagattcaaggaattctcctgcctcagccttccgagcagctgggattacaggcatgcaccaccacgtgtggctaatttatttttgtatttagtagagatggggttttaccatgttagttaggctggtctcgaactcctgacctcaggtgatccacccgcctttgcctcccaaagtgctgggattacaggcatgcgccaccgtgtccggtccagcactccattccttttaatggctgaataattttccgttgtataagtacactataatttgtttatccatccatctgttgatggatagtgcattgtttcccccttttgctgattgtgaatagtgctgctaatgaacatttgcatacaaatacttatttgagtacctgttttcaattgtcgttgtgtatttacctaggaatgaaactgctgggtcatatagtaattctacatttaagtttttgaggaactgcca

SEQ ID NO: 317678 - DNA, 4001 bp, Homo sapiens
ctcagaaggcccctgatccagctcctcactgcacaaatcaggaaattaaggcccagagaggggcaagaacttgtccaaggtctcacaatgaacctggcttagaaaacccaggtatcctaacacccagtacagggttctttccaccacaagacaaagaagaacataagcaccaccttcggattgtggctgcctctgggcaaaggcagcgggcggcattatcaggagggggatctaccaaggaaacttcaactatgctaatgaagcactagttcttaaatttggtggtaaatctatgggtgaaatttctattattctttatactttttttctgaaacattttattataacatcatgaaaattaataaaaagaggagaccaaaaaaatgaataagtgcacttcaccatttcacagaccctaccaccaccaccagaagggctctgggctgtgtctacttttgggggatacccctcaagctcccatgaagcctggcacccaccaaagcccttcatggcagtgtacagagcctcggcatcctggttggggtcaaagcctgggaagtcatggatggagccccggtacttggcaccctgtggagaaaaaagtagagggtgagctgccaaccccggactgagaccaagctcccagccccaacctcaggtcagatgcctaccctggtccaggctgagctgctttccctgcaaaatccagtgctggccacatacaccctggggagcggtgtggatgactttcccataccacctgctgcaacccgcccaaaggacagtgccatttccccaagggaggggggcttggccaaggcctgcagccctgcaccaccttccaaagcatccaggagagggtaaaaaagcctggctgagtataggagatgaaaatgatccctgcaagaatagcaagagtcaaatatatatatatatatatatatatatattttaagagatggggtctcactctattgccctggctagttttgaatgcctggcctcaagcagtcctcccacattggcctcccaaagtgctgggattacaggcatgaaccagtgcacccagccagcccctcatatttttatggcattttatgtttacactttcacctctgtgaatgtcattagtgtagccatttgtagacgctcttaagattatttctatcacagaagccaagcccaaagaagagccacttgtgggaggtcacacagaactcagaccttttccctctgctctccagccccgctctgctctccagctccaggaaccttgcaggtgccagctactgagggtggggtcctgggcacagggggcccagagacactctcatttcaatgccaagacaaggcactgcccctctgggcccagtaaactgcgctgtgaactggcatctgaggacaagctggcttggtctttgaggggaaggagagaagcggcagagagccaggggatcttagacatcgaacctgaacctgaatgcacaatgggactggttcacagagaagtcagatgtgggtcagttacatggcactgaaaagtggggggtctgggagagcagctgagagctggcagagtggaggatgccagagcctgtcaccgagcacacagcacagtgacaaggcacttcatttgtgctaggccctacactaatggctgaggaattggggagaaaggggacccaattcctgtctttcacgagctcctggcccagtggcagagacagacaagcacatcaattactataaagcttgtagtaaatacattaagacaaaaataaggtaatgtgggaaaacagcagaggctgatccagctgcgggaaatcaggaaagaatccaaaaaagagggaatggagggtgggccacacagatcttgccttcaaggagtcagaggtggagcagagtgagtcctggaccgcctccccctctccccgtctccgtgcctcccaacgtctgcactgcaggaccccggccaggcctctggatgctctctggtctctgtctgcagaggctggctcctctgaggtatgcatgcgtcggcgtggagttactatttaaagttctgaccagaaaggaacacagctctcttcctgccacctgggaatcccctgcaacctgatcacgcccctgggcagagacttaaagagtaacacatgccgaatacccagagcagggcgccttgcaaggagctcagtgagcgcaggatgggggctttactgccagcgctccccttggccttacttcagacctcacggccggagcttgagaaattcctgctgccttctccaccccggtgggcagtttgatccagaaacctctgagagcagataccagatccatctgcccactgcacagagattgaccaaatactcaagtatttgccacatgaataaaatgaacaagaacacgaaacaactggggtcctccaggaatttcacttctaaatccttttctctttctttctggacacctccagtccagcgatatcaaaaaagcacagcaggcaatattagctactaggatggatggagaaacaagaggtgcctgggcacagtggctcatgcctgtaatcccagcactttgggaggctagacgggagaccacttgaggtagggagtcagagaccagcctggccaatgtaatgaaaccctgtttcagctaaaaatacaaaaattagccaggcatggtggcaggcacctgtaatctcagctactcaggaggctgggtcaggagaatcacttgaacctgggaggcagaggttgtagtgagctcagatcgcatcactgcattccagcctgggcgacagaatgagactgactctgtctcaaaaaaaaaaaaaggaaacaagaaggttcagaggctcaaaattatttctttgcaacgatccttaaagaccttttagttcagcttcccactcagttattgagtccatggagaatggagactgtcgtgaataagacaaatcattctgcctaagaagaaccgtggagccccagctctagcacaggcttggcatacaggctggaagtaactgtgactgggctaaatgaatggatggagacacccatgacggcccaagctctgagatggaggacgccgaaggggaagacagtgaagggagacctccctggcactggatccctagcaatgctgtctccaatgtcaggacctcctgggaccagtgtggaaatattaagctttgaaagatgccaccaggggcaggtcctccagggtctgtccgggccctctgcaggctagcctgttgccatgattcatggctgtttttccttccacctgtctgaccaacctgtcctaatccacagcagcaccagtctccaatccacttcagtcataggatgtccctcccacggctcacttggaataagagagggaaaggactttgagaaccacaagctgagaactaaatgaggaaggtaggtctattaccacttgtgtcccagaagacccagaacagagagggcaggtgacatgtcaagaccacacagcaagtcagaggcccagctgggaagggaatccaaggctctttctaacagaccatctctcccttcccctcagattccatctgggtgggagctggagataagaagggacaaccaccacatagcccactgcttcctcctggtcaaccatgccagcctgcccctctccttgaatactgaagcatttgagttattgccctgtgctgtttgcctctatgccatttcgaccctatattcaaggctataaaaaggcagcaatgctgtccaatccacagcatcctaagtgcttctcacattcagatactcacaattccagggcagctagggctaccctaccattcattcattcaatcaagcaagcaagcaacatttactgagagtctactaagtagatgcttaggaccagggaccactaagaactcagaatctggtagagatacatgacagcttcaactacaagacagtgtggcagatacgatgctaagggcagcatgggaccca

SEQ ID NO: 317679 - DNA, 4001 bp, Homo sapiens
agctacttttattttaaatccaacctgttaggtcacctcaagagcactggtcacagagtcaaagccgtaagttttttttgttttttttttccaaatcaggtccaaatttgacaaaaatctttttcttttttttctttttttgagacggagtctcactctgtcgcccacgtttgagtgctgtggcgcgatctcggctcactgcagcttccgcctcccgggttcaagcgattctcctgcctcagcctcccgagtagctgggattacaggcacgagccaccacgcccggctaatttttgtatttttagtagagacggggtttcaccatgttggccaggctggtctcgaactcctggcctcaagcgatccgcccacctcaccctcccaaagtgctgggattacaggcgtgagccgcagtgcctggccccaaatctgacaaaaatctaagagaaaacatcgtagatgttcacaaaccataaaagtaaattaatttgcgaaacagattgatgccgatatacaggttaattcagtctaaacattttgctaatagtagaggcaacaagctccgtacttgttctagaacaatggatcatcaaatgcatataatgaaaaatgaaatcagttaccttacttttaaacttttctaaccttgggaaaaaggaaaagattgtatcttacatgctatatatatgattttgatcctcaatacagccaaaatgtaatcccaatttgaagtagtagcactttctagactacccaatattgttagtaacgtttaatttaaattttaattataccctctaacagatctgcaaagctactagcacagctattctaccttaatttagcatgaatttagtgacagactattatgtgaccctattgcttagtaatgaaagatttaaaataagagaaatgtaaaaatgataattctggtaaatgtaaccactaccaccaacccaccccccaaaacaaacaacttgggatttctttccatttctcggtgatactttttacaaaactaagtgtaccttgtttaacattcgtttttaaaattcacattattaatctgtaaaagttttggatttgttcacagtaacactcttttaaaatattttctattcatatgcttattttggattggtgtttttgtctgtagtgcaaaggacataatccaagaacattaatactggtgtaaaccagtttgtccattcaaacagcctaaatccacctctctgctcctacactccggggtcacaaaataacttcccacaagcaacactcgcactctcaccttcaccaaaacactcctttcaccctaatcagggaatgtattaaagtctgatccggcgaacggtaaataaactagaagacgatgctcaaaattcagactcctgagcccagcccaagtccaattcaatcagtgtcttcaggggtgggatctaagctcaccaagtggtttccttttcactaaagtttgaaaactactagagacccctacacacattcgccccaaactcccacaactcccaccaccgccaaccaaccccacctacccacccgcgggacacgttaccgccctgccctgctcagacctcagggcgaccccgctcctctccaggaagcccaccctggcgcccactcctccgagtccgcagctcctccctcccatccccgcaacccaaacctttctcctcacttcttcaaatcgctgctaaagaggccgaaggcccccgagggggaaatggttgaggtcgcctcctgacccagctccgtcgcctcccctcctccggactgctcattgtaaggaaaactattgctggacattgccgcggtgctggcgggtgcggggttggtcctgccgggggttctctccaaaaggttccagtccagagggcacggaacaaaactagttctcgtacggaggagcgcgcgcaggcgcttccggactcgtcacggctccctgagccgacctggcagtccaccccctgcgcatgcgcagtgtgcaggcctgctagattaccacccgggccatccaggcctgcgcggactttcctgctccgggctttagaggtagctgagcggctgcgagccggactgcggaaggggaggcagcgggtggctaactgcccggctcccggcccgtttgaggtgtgtctttggagaaggatacccattgcatccgttttgatccgttaaggagtttccagagcccggacagctctttgctatacttcagtaaagcaatagttttcagatttctccggaaatgccatttagcacgccagatcacctttcctaaacccatcacgatcgcttttccttttcttgcttgtttcggctactctcttccatccggctttgccttactttcatatcggtcccaaacaacttttctcctagactttaaggaggcctctcccaacgatggtttggaggatccgcacagaagcgaccattccatcttttcaatgaaagtcttgggggcagaccgggcgcggtggctcacgccagtaattccagcactttgggaggccgaggcgggtggatcacttgaggccaggagttcgagaccagcctaggcaacatagcgagaccctttctctgcaaaaaatataaaaattagccggcgtggtggcgcgtgtctgtggtcccagctactgaggctgaggtgggaggatcactcgaacccagaaggagggggtagcgatgagttgagatctctccactgcattccagcctgggcgacagagcgagaccctgtctcaaaaaaatgaaaaagaaaagaaaacatcttggggccaccagttcccgtttggagctgaagtggtgcgtcctattggcgtctagctaccaaaaataaaatggaccacctcgcgcgccagtcgtgttactcactaatatgcactagggagcctaggcgggatgcttgcctggccccagagtagctctctccgggtgctggcacccgagaaaacctctttcccggggtgccttcccccagcccgccttctcaggtgggtttcagcgccttccctctcttctccccagtgcctcccgtccaaggaaggcattaacacccaaagccctggcggccaggtactgaaactgtcaagggattctaccaggtagaacgcgaacctggaggccggccgccccagggaaggcggtggggcgttttcaaggatgagagtatgatctccaaatttcaaaaggtcacactgtcactgtggaagcacgcaagagcgtggctctgggtgggagaggaagggacgtcctccaaacttgatcgtctggtcaaatattggcaggtttttaattcagctgttagaatactcctccggagagccaatgatgagcacctaaaatgtgttatttgtcagtattaattaatagaatttcacctacaactgactattgatgatgaggatgaggatgatcatagataactatatattattatataatccttaatatataccaggatataagtagttttatatatattaaaacttctaagtagttttatatatataaatagttaaagtagttaacttttaatataaaaaaatttattttaagttaaaataaatacttttaagttaaaatagttaacttttaatatatattaaaagttctaagtagttttatatatattaatagtaaaaagagctaggctttgattactttatttgtaaaatgagaacattgatatacacatagcctggaaaatctcggacacatacctgattacagaatttcttggttttagagcatgtacacttttaccagatatcctaaatttttttccagcatacttttagcagtggataatcttctttcttcacattctcacaaacgtttagctttctaaaaatgtttaattgtcatcaatatgatacaaatgaatattatttgtattgtaattaattttcattctcatggccataatgaacttgagaatattttatgtgattgttactccatttgcattttatttcctg

SEQ ID NO: 317680 - DNA, 4001 bp, Homo sapiens
tcctgccaaaactgccacttcccacattaaccgtcactgctacctagtaagtgatggtaaacaatacttctgttcccacttttggacaagggaaagacagatttctgagtttctaaattaaatgcatttttcaatagatagttaaattatacactatacgagtagtatacaccgattacatggattagccaggaaacccactatttttaatattgcttaagtttagatatggaaaaataattttttgaattgttttactattgcaacataccttttttacactgcaaatggatgacactggcaaaatggttatgacaaagactccttcaataaaggctggtactatattttaacaaacaggtaaagttaatggcattttttcccattcgggaggatcaactagaatttaatctggattaaagaatgatgtagaatttttaaacagaccattagtattgaagttatactaaattaaaaccacacacgagtagcagaaaatattctttatagctagcaaaagcaaaacaactgaaaaaaatgaagaataagctcaagatttctcacttcaactaacacctccagactgcattatcattttaggcaaactgacattttcacatttactttgtaatggcaagattgatttccatctgggacttatctgcataaaagtgttagccttggcacaatttcaaaattgaattgaaagctcatttcttgctataagcaaagtgccacaataccacacaacagttatacctcacattaatcctaccactgggagtccaattttatgtgtttcagctagcgaattctgccctcaggtaagcacataactctataaaacccttcctcgatcatcaacaaatcacttatctctactaccttaatgcctcctgcacttgtccatactaaacagtatttacacgttaaaagagaagttctacaaatgctactattcttcataaatagaaaaaaactataaatgagggcaaattcccatacgtggaaaaatgccaaaccagaagctgaaatcataacttttaggtatagaaccacagctccaatcagtcaactacaaacgtcgccggttacttcgagggtaaataatttgcagccagctggtaaaaagcctgataaaaatattaggtcctcacatatcttccttttcaataaggagacacctgaaagtcacactgggcagtctgtcacgtatcgaaacatgcagaagagagactgtacagaacgtgcagttatcaaacgcaggaagccaaagttcctgtgctatgagaggaccacagtgaaaaacggtagcccatctgtccaaagaacagaaagaagtccacctggaaaggatgggagtcggcggaggggggcgagaagaacgagttccacgccgtcttcctcctcccgggctaactgcagccgcgggcggcaggaaggcagccgcgcggggtgggctcttggggactgggcgcagggctccgcggcgcggctgggctgcggctgcccgatcggcgagggccgggccccgggaagtctccagggcctcgcccgcgcagccaggaaagcatgcagcccaccgacgggcggaggaaccgcccgggcaaagccacgtcggtggctgaccgcgcggcagggaggtgggcaccctgtccacacccaccaggaggctgacagctggcgagcgccaggcggccgggacgggacaagggccgcagcgcgccggagggggtcgctctgagaaagccgcgctgggcgctgcccgtcgccaacgactccccctcgcccggatcagcggcggctggatactcacgtagggctggtagaacttggagagccgcggcttcccgtggttgttgaagattaggatcgccttgatcatggctgtgccgggccgaccgggtgggcactgggggccagggcgggggcgggcgcgcgagcctcgcctcgtaatctcgcctgcgatccttccccacccgccccctcccgcacgcgaccgcgcgcgctcccgagccgtcgggcggggcccaaggggcggggcctgggcggggcaggcactaaggaaagcggaaacatttctaggtccgagccagcggcctaactggagtgtgcgcattcgaccgagcacagacacgttgcccaccgctcctctcccgaggtctgtagtcgcggagaaacacatgttgcgttactaacgttcagaggtctgcgacagcttcgatttgaatgactagccgggaacaccaagtttcactgtgtaattgcgtccccctactccggcgcctcctttgcgacgctccctggagaaaagcacgcccactgcacgcgctcagtcgctacttccgctctcgagtgtctccaagcaagatggcggaggagccgcagtctgtgttgcagcttcctacttcaattgctgctggaggggaaggacttacggatgtctccccagaaacaaccaccccggagcccccgtcttccgctgcagtttccccgggaacagaggaacctgctggcgacaccaagaaaaaaagtaactgaatttatttccgggcagagaggcgggaggttcagattgcatccgagtaggggtggcggccagtaaagaagcaaaatttagaggagcgcctgtcctagacctgcattttgaccagtcatcagaagaaaagaagtgtactttttgatttttaaggcctttaagttgagtgttaaaataccatctctgtctatcggtgtagggcctgatacttggctgccacacttatttttatactgtatttttttgagttggccagactgcgagctctttgaaggagggagggagctgagtggggcggggggaggggggtctcggtaattccaggtacttaacacaggagctaattatttgagtaatgttttatggtggtaggggtggtcattggcaaagcctggattagaattcatgccttccaacttaactcgcttttgcttttttccccctcccagttggttgtgaattcactccttaaaccaaaaaccaaattcttatgcagaatgaagactgctaagggaaagctaaaggcatagatgttacctttttaagaaacacattttggaacctttgtgagttatttcattgcttgagtcagctatcctcaaccctttattgcttgagaatgtttccctttgtaaaagagattgctaaaattacgtgttctaaagcactctgtttagagttagagttgcctatgggaaaagcagcatataagcatcctcgattcagagaggctgatttcgtccttagacgttttccccgttctgtcttaagatgacagtggtctctggccgggcgcggtggctcactcctgtaatcccagcactttggtaggctgaggcgggtggatcacctgaggtcaagagttcgagaccagcctggccaacatggtaagactccatctctactaaaaatataaaagttagatgggtgtggtggcgcgcgcctgtaatcccagctactcgggaggctgaggcaggagaatcgcttgaacccgcgaggcggaggtggcagtgggcggaggtctcgccattgcactccagcctggacaacaagagcgaaactccgcctcaaaaaaaaaaaaaaaaaagacattggtctcattgctttttcttcaacttctgctactgtggaggataattctctcccaagactgccccccttcccactttaaatcagactcccatttccacctgatgcactataagtatttccatggatagccactggaatctttcttcaaaagaattccgcaggttttacagtgttttgttgcattttttcttccaatttactataggcaagagcggacgttcggagattcgttttaaggtctaacagtcttagtcaaaacttgttacttgactctgatgatagctgtgcaaaacaaaagctaaaaaaaatggcttacaatctaaatattgcccgagggcatattttcttggtctggacagtatttttttgc

SEQ ID NO: 317681 - DNA, 4001 bp, Homo sapiens
aatcccacccttgtctttcccttgggacctcccaatgccctcaggcccaagtcactaccttagcccctggctccatgctctggatgtaggattccccaccataccaggacagagagttactgaaacagagcagagctgttaagaggaccacatttcctacagtagggacactggtgaggcctagacaacttgataagcacaggatgaggggcaagacccagaatatagcaccagaaatataaaaccagagcagggtagagcccaggacatattaacgtaacataaagtgtgactcagaatttgagggaaaattcaggacataggacccagacacaggacatagaataaaagtcacaaggctaggtgcagtggtggctcacgcctgtaatcccaacactttgggaggctgagacgggtggatcatgaggtcaggatatcgagaccatcctggccaacatggtgaaaccccatatctactaaaaatacaaacattagctgggcatggtggcatgtgcctgtagtttcagctactcaggaggctgaggcaggagaatgacttgaacctgggaggcggaggttgcagtgagccaagatcgtgccactgcactccagcctggatgacagagtgagactccatctcaaaaaataaaaaataaaagtcacaaaatagaacagggtccaatatgtggaccagaaccccaaagtgggacaagagaccctagaacagaggacttaatggccaaggtctagaacatgataggttaggaccaagaatatgaaaaacatgtagctacaaacaagagcttagaacaagggataaaactcaaaatactgacagttaagaacctgggacagagccaagaacgtaacagaacccaaaacatgtgacagaatccagaacctgggctggaaagcagaccatgggtccagctgcatttttgaacaccatggaaccccaagcctttcattttgcctgggccacccgttacctccggtccagtgaactctccaggctggagaaggatctccctttggggggccgcagtccccagatcccctccgttccctgtagagtgggagttagtcagtttaacagcagacctaggtccacacatgggctcagacctcctcctcacactctacctaccgtgcctgggtcctctgcatctcctagttcccaggttgggcgctgccactgggtgctaccgctgggtacatgccagtagtaagtacctgcagcatcgtggatcttcctccagccaggaggcaggccagcctccacctccagactgtggtccccccacaagtcatctacaggaacaccggattagagaggagggagcatatgatttgtgagttcagaataacatgctgtcataatcccctctccatccccaaaatgggtcagttcttaggctgaagatccaggctcctcaatcttgaagacatcacatgtaaagaccgggttcattcgccccctggtccctacacagagaggtatcccccaccgtctttgagccccagagtagcctttcggattccctcgtcctccctcagctcctggtcttcccaccgggcccctccgtgcacaccatcgcagttgaccagaatgatggccagcatgtaatccttgcccagcataaccccggctgctccccgccagcctctgccggcccgcactctcagcccagcgcgacctctggagctactgcgcctgcaagcccagcctctctgcgccgcaggctgcggggccagctggcgccgcacaaatacggggcgggacacggggcgggacacgggccggtcccgggggagggcctgagccgcacagcccgcccaggggtggtgcgtgtaaacgggcgtctggatccccgaatggttgcgtgtttccgtgtgtgggtccgggggaggcccacgaacgccagcgaaaccgctgacaccaccgcccaactatgaactcatcaggcgcctgaagaccgacacgccgaacatgcgccgcgcgcactcgcgcacgagtgagatcatcgcgccccggtcgtgagtgcgctcacacgcagcctgagactcgacgggagggggtcacgtggaagtatctgagagaggcgtacttggccactaggaaagcacctccccctttccaaaaatgctccggaagtgccttcgccctccgtaaagatggccggggcagtcggcacgagggaggcggggatgcgcctgcgcaacaagttcggcggggaagatggcggatgacaaggtgagtggccgtgggggtgatctgcagccgggcgtggtcttcactctccttgacctttttagttccggggagaagcgactctggagcggctcaggagtgaggatgtcccttgtttcttctgcggctcctgtcaactgcctcaacagtgtggagtggtgtggggagagcattcggcgaggcgggaggagccgtggatcccccagatgtcccctcctgggaaccatcacgaacccgttactagcacagactcaaaaacattcacccttaaacactcctcactttaccccattccctagctcccgaaattttcttcccagtgacacgatgtttccaatcacacggacactcacaccaccctcattcaaacactcctttgcatacattctgaatttcatacttatatgcgatcaaaatcactcagtccatttacttacacacttgccgacagtcttttttgtcattctcagtcacatccagtcactcacattcagtttgggatgtccttgggaagaaagaggtaaagcccatccaggaaccaagacaataaaattgtccaggaaactgcctcggtccattactcaccattggtctagaagctcagcattacccacacatttactaaatgtcaggcactagaacatagtagccaagacagactggtcacgactttcaaggagctcataatggagtcagtagtggtttcctgatggacctaattaaaggtccctagctgtccctcctgcctttcctacatactgcttgctatataaaattcttgtcaaggttgatgtaagttactggttcagatcccatctgtcagtcccttcctggccctcatttgaattctgtgcttttcaatgcttgtctttctttgccactgccatctcaggaagcttttataggaaaaggtctttctggctcaccccatcccctcccaattcccagcttctgatggaattgagcaaggggtggggcttagtcagactgctggagccagcctctcgcttgtcctaggattctctgcctaagcttaaggacctggcatttctcaagaaccagctggaaagcctgcagcggcgtgtagaagacgaagtcaacagtggagtgggccaggtaaggactgtcccaccccacccctgccttaggctttattgcccaacatgctcttgagagtgttaaatggatggtagagatttcttcagcaagtgattattgagggcctattctcagtcaccctaaggacaatttttctgaatggcacatgaactaatatcttaagtagtggttaagtaggtgaagaggggaggaaagaacattccaggcagaacagcatatgtaaaggccttgtggtaggaagtagcattataaacatgaggggtgaaaggaggtccatttggctacagtagttggggagcatgctaggaaatgaggctggagaaaccggcagggctaggggcatctctgaccttgtgtggcggtggagttctatggttggagctttctgaccccagggttctgagattgtgtgatcagaactgcttggttctttttctggccccagaaccttgggaaaaatctggagaaaataccacggttgtccagggtgaggaggagctggtggtggaatgctctaatcccagcttgagtagcccctggacagtcaggaaggagcctagctaagtttccttctgcatttttctctgcaggatggctcgctgttgtcctccccgttcctcaagggattcct

SEQ ID NO: 317682 - DNA, 4001 bp, Homo sapiens
taatagttttatagactctcaaacactatgctaatggaattcaaagaactgagtaatattagctgttaaatgtcatttggaattttaatgtgacatctttagttctagccatagtttccatcagattttaaaaaagagactctaagtacttttttttgagatagggtcttgcttggttgcccaggctggtcttgaacgccaaggctcaagtgatcctcctgcctcagcttccctcagcctcctgtttagcttgtattacaggcatgggccaccacgcccggctcctaagtactattaaccctgatatccatgatcaagtaattcttaaagcagaaataattttttaaagaactatttaaatttatcagtgaaaaacttatgtagtcttatttatctaagccagcccaattccgcattatcttgaaaatattactgaaacaatataataggtcatcttaagactttctattacataaacattatttaagagacactgtcactgaccctggagggctttacaaagccactgccatccttgttcagggagtggggaggtgtggcaggctggctactataagtatgcataaagataggcttttacatttaggtaaaggaaaaaaaagctcaatgaaaaacactttatatcaagagtatatctcatgagtactcactaaacagaaatacatctagaagaaaagccatgttgctttaatttaaaatatttgcacactgaattaatatcttaaatatttattcagtgttatctaaaagcaaccaaagagaaatataaaattacttaactataggtcttaaatattaggcctacaaaaatttgttcaccataatttttgacaaagtaatttacgttgtaaagtggtttgctcttgaatgacctaattaatggcataaaagcttcactaacaaaagaaaagatccactgtttcatacataatttattaagatttcgtataggatttatgttaaatcaaagaatttgagcatcactttcgtgatgtagaatcaaagtgtccaatacattccaatgacaaaacattcatagcctgacattattcctactttaaaaaacagtaattttttttctgctgttcaggctgcatttataaactatggcttcttgtaaatgggcttctaccccagcatttgctgcaaggtttcttattcctctgcagttgtcttttcggcctaacagagggagaaaaagcactgctgcagtcgtccgcaaaaagccactaccactgcattttgtaactaacaaagacactggtatctgtttgccaccctgttcacagggagtttacttagatgttttacaaaagcaggcacactactggtgaccagtatttcaccaaccaacaccaccactcacgctctgcagtacctgcctcctcctctttctctcatccccagtagctctttccactagattcacatcagccatctgcagcggttttgtctcctctctcttttggccaccaatgcatgtgtccttgtcgccagggaggaaaagaagcctttcaatggggtagagcttttgctcctcgccatgaatatgctccattctttgttgtcctctacccgtttccttagatactgttattccactctgtcaaatggcattataaaaacaaaaaccccttctggcttcaaaaacagcttttctcagcagactccccttaacacttctacccctcccccttcttcctcttctgtcaaaaaccctggatccgaagtacaggaaatccatctccagtgctgcagtggggggcggggggacgacgcccctgcctcctcgtttggcatgctgcagtggaccctgtgccaaggaaaggccatcggtttaagacagtgcgagggaaaaccaccttcccccctccccccgcagcaagcctggccatggtggctccagcacctaccccatttccgagtccggcagcacctccattctgtctccagtgacaccctggcgggctgcaccaatacagccacatgtcggtcacgtgcgcccacacccagccaatcggcgggctcccgacgggaatggggagcgccctggtccgcatccagcggattacacagctgcttctctctccgcttcccgacccgcactccgcagtggggcacagggccccgcccaaccgcacagcctgcctagccctagccccgtacccctcgggggtatgccctcgcggccccagtccccagcaagcaaggaagttgatggcagttgacacgcatagtaaagagtcgggggaggtccgcagggcagaaggattagcacaagatgccggaggtgggagggagagtaataaattacatctcgattgctatgatttttgcagcacagagaaacaataatattaaatgaattacaatgaataattttacattacaagtcactgagttgtcagagtgatgacttgttagatagatcactcgaattatatttgaattaaaaatagttaccagaaaagctatgctagcagcttagtagtggagatcagaactctggaagtctgggttgcctgagttgaagctttactcctgtcactctagctctgtaactttagttacttaacctctcagtgtttcaatttcctgctgtataaaacgggaacagaagtacagaatagaggagttaatatatatgaagtatttagagcagtccctgacacatacatagaagtgctgttagctactacaaatctgaggctttaatgtagtattttaatgcaaattctacattgcatttaaatcgaaccaggtgatgcttaaattcccaattttatgaggttgaaggacaaaatccaaactgtcaagaatatataaagttaaacttaaattctggtttaaatggggggaaaccagtttctattatctatttaaaatttaaaaggatactatacttcaagttttctttgtttgttttttgagatagagtcttgctctgtcaccaggcgagtgcagtggtgcaatctccgctcactgcaacctccacctcccgggttcaagcgattctcctgcctcagcctcccaagtagctgggactacaggcacgtgccatcatgcccagctaagttttgtatttttagtagagacggggtttcaccatgctggccaggatggtctcaatctcctgaccttgtgatccgcccacctcggtccctccaagtactgggattacatgcgtgagccactgtgcccggcctaaacttaaagtttttaaatgaagcatattataatcgtttcttaattttcaaatagtatgaaaagaagcaagctattaaatagcatatttgaggcaattccatttgattaaaaaatgtatatattagaaaagcaatagacacacaacaaaatgtccatagaggttattcctggaaagtgagattatggagctatttctgctgtcctttcgtgctttgttttttttctctttcattagtccctgtgttacaatgcctgatatacagcaaatacaccccaaatatttatttaacaagtgagttatttccacactgatggcatactactgttctattaaaagtttaaatatatttagaaacaatttcccttcatatttgaaataaataaaagcatgtaaatcaatttgattatattctaaataactctcttttgagaatgacttcattttacaaaaggctttcaaaatcctcttactgaaagcacatgattcactgcacaggacttatttacaagtcattttttgtgacaaattcagaataggtaatttctcataaggcctagaacttccagaaggaaaacagtctttcaaaacaaagaataccttttaaaaggtcctcaaaagaacttcttagtaccctaagacacaattgtaagcctattactcttgactcagactatgatacaagctattatttagtaaaccagtttgtagccaaaatgtttgtctaaatttttactgcatgtatcatagatattcatcagtgacttaaatgaca

SEQ ID NO: 317683 - DNA, 4001 bp, Homo sapiens
tactgccccttcaaactgtatgcagagaattcagagacaaccagctctaaaaacacacaggctctggttccagaaaagtgaaggctagcaacgaatgaactagcccatacaagaagcaaacataaaaatattcctccttcttttaagctgaacaattctatctctaaattttaaaaatgcattaaaaggtcaaaagtccacagtaaagggaaaaatagattatgtgttatgagacagaatgaaaagtaaacaaatctgccaggctatttataacccacacgttaaaaatttttaacatacaattctaatacagcaggcatagtttgtgcttaacaactttggagaacatctagcataacttcaagaaaacgatattgctcaatttaatgttaataaaaaaggtccacccatttgcaatttcaaagggcaagctatcatttatatttttaatctcacttctacaattttggggctcttgacacgttatccaacccttccatccagggaaagatggaaaaattagccatggcaacttcctccactaccgctttgatcccacattttgcacttagactctggcaaggtactacgttatttaggacagttttttacaccagtaattctgactacccttgctccactaataaaggagggagtactgagactggcacaagactaaatcatatagaaaatatcaagtactcctaaggagggttgaacagtaacaacaatcgagaatacaagcaatttaagaagttttgaacttaaaaagcttttctccattttagtcctttctaaatagaaacaaagggcttgtacaacatggaattctaagacgtcagtaggcaatttaagctaacactgaataaaagaataaatcacttatccttgcttgtaccattaagtgatgtcttacatgtactgcataaggtcttcttttttaaaacgaatataacagtttccaattctttcactagatctagaaagctcacgcccccacctcaacagttcagagaccaaagatttcctacagccgaaaaaaatgaatgatttagatgaacaatcatttgccaacagaggcaccattcctctacttggtgggtcaaggagtcagactctgacctaaccatccaaggctcctggggacttgattctcccatcaaagtgaacaaaattcaccggcctttggataacagccctttctttgtaactccacatgccgggctatcaggtattttcccaggcagagagtttaaaacttttagaggaagcaagagggtccaaacgaggaagatggggaagcgactaaaatgggaagggcggacgacccacccacctaacgcgaatggggcaccacttgcaggggcgaagctccagcagcagccaggaaaggtggaggacggcgggcgtcgcgacccccatccactgcgtgagaatggaggacctgcaaagccaggggccaactggaggcctgaatggggagtgcggggaggggagagggtgagacatggagagaagagagccacagagtcgggccgagcaccgtagggtcccgagcagcggcggggcaaagccgaggaagctttgccgggaggagacgtcaatgcctgcagcctcactcacctgccagacgctcgcccagtggccagaagtacgagcgccgcccgggctcttcgtctcctgccggacgcagctcctgctgccgccggtgctccaggacccgagaactgagggtggtacagaagcgggcaaaggggcgaccggacccgagcccagggaggcgtacatagggggcgccgaggcccgagaaggcaactgagtgcttcaccttcctcaccaacagccaacaacagtacctgggaacagcatcgagccaacctcggtccgcagctcccgggcctgagcccgcaggtcccccccgagcagcggctaggcttccggcggccacaccccgcccccttgctacttgccctccgccatcttgtgggaggtgggaagactacaatgcgcatgcgtgagaggtgttgctggcttcccacagcccggagactagagcctgttatgcgcaggcgcaatgggtgctgcgctccgcttgccgggcactgcttcgctgttctgtcccgtgagccattgctgcctaggcagccgagtctcagttgcagcacttactggccttctctgaattgtgctgcagcccagttaatagatccttctgcacacactagtccattattccgcaaacatctatcgagtgctcactatttgctactccccgtactagacgctgatgatagaaagatgaataaaattctgtcccagccccacaagggctcataagatagcggagaaacggagatgagcaagttattattttgtagctgcgacctctgcttccctaccacctctcactaccaccctgtagttttaatttaaaaacacctcttccgggaaatccttgtttgtctcacacagtttgataagttctttaccttggattacctcttcagtttcatttcattcaacattaattgaacaatatcatttgggtttccgatatatactagatactgtttcaggctctagatttacagcaataggaaatacaataaactcacggaacttacattctagtgtgaaagaatagacaataaaagacagtcaacaaaagaatgtttgatggtgataagggataggaagagagcaaaccacacagaaagatgatggacagtgagaggtggtgattagtgatctttctccagagttgacatttaatctgaagcctgactgaccatgggggcccaggagccactggaagatctggggcaaaagctttcagacagagggaacaacagaacagatcctgaggtggtagcaagtctgacatgaaagagggacagaaagaataggtgacatggacagtgggaaggagatgtggtcggggtaggcagaggccaaatcaggtagggcctccaggtcatggtaagaagttggattttattcaaaatggcccttgtatgttgttgacgctgtctcccctagcccccactactcctcttcaaacacttctagctcccgactgcctttctggtttgtatatgcccccttgactacctagaagacacttcttcttgttctttaaatgtctaacttcttatctttcaagtttcagtttaaatatcacctcagaaagaccgtccttcctaagaataataaattttcccctgtcttccttattattctcaatcattgcaccttatcatttcttccatggtactcaatatgtttttaaatgatctatgttttgtttcttcactgcctccacactaaacagtcgactccataagacagggaatacgttttgtttaccaatgaatacacagtgcatagcaccatacctggcatgagtgctctgtcactcagtgtttgttgatttaataagtgtggaagtttgtcagcatctaagtagttggtggtgtactatattggtttcacttggtttttaaaatgaaatgcaagtcacttcttatttatatgtctcctcagctagaatataagtaggaaggttggagagagagcagatgggatggagaagggtgggtgattgtgggacagtgggcagggtttatattacatatgttgtagtatggagagaaggaaggcttcaagttaatgcaatccctattatatgtgctgtgaactatgttagatatgaaatcctcaccacagccctgctagataattatcctcacttttatacatgggcaaattcagagagattaagtcccttgcccaaggtctcacattaagggatagtgctgaccataaagcccatgcccttcccatctagagaaattggatttggagacaggcttactcagagatttgattctgtgtcattagcaggctttcattagagatttcattcagttacccccacttaagggtcccagtcgtattactatccctgtgtaggacctcaaagggcctgcctggaaactact

SEQ ID NO: 317684 - DNA, 4001 bp, Homo sapiens
gatgtattttttaaagaaaaaccaagcacgctgcccttaaaaacaaaagttacagattatacatccactagagcaactctttaaacttatttagaaacctttgaaattttgaaagtagtgcaggagatggtgcagggtgtaatttagtgggattctttccctcagagaacatctgagaacattttctctaataataaagggcaaagtacatgcagttgtgtacggcgcaaatgctccaccagtgtgtgagtggacaaagagatcgccggttggaaaaaaaataaattttgatatctcccacttaagctatttccctggagttcgccggaggacagtattgtggtctcagagcgtggaaagagacaattcttgtgcaggggcaggaaacattccgtgtaggagatattatctcaaatgagtgtaaaaagaacacatgtctgcatttctaacaagcgcccaggttacagctgctgctggcccaaggaccaacctttgaggggcaagcggtttgttgaatggggtgaagaaatttccggctagagaggaaaggtgctttctgaagagaacgataagcttcaggggtaccagcgacctaaaaaggggcagcaatagaaacaaacgggatgagcagatacagggttgaaaactggccagaggaaggaccgcggtctccgccgtctctttattcggagcaaggttataggaaaagggagaaaggaggcgctcgcactctgtctggctttgaaagaaaacgtcgcggtgtgtgatgttccccttcctgtgtccaagtgttctcattgttcaattcctacctatgggtgagaacatgcgctgtttggttttttgtccttgcgatagtttgcattgggagatatacctaatgggtatatttcttaatgggtgcagcacaccaatatggcacacgtatacatatgtaacaaacctgcacgttgtgcacatgtaccctagaacttaaagtataataaaataaataaataaaaagaaaaaagaaaacgtcgcaaggggattctttggaaagggcagcagacgcgcacctggacacggtagtcagctggacccgcagcctgcaccgggacgcaggggcgggggccgagaggggccccgggctgtacagcccttacctgcgctcgccctggtcggtgtagacgttgaggaagagtccctccctgaggtcttccttcaccaggcccgagaagctaagctgcagctcgtagctgctaccaggtttcaggggctcactgagctccagcaccatgtattccgtgtccagcgcgaaccacacgtcgtccacgggcacgcggcccactgtggcgttcccagtgcccggggaaaggggtccccgcacctcggcgcgctcgcagtcctggaagaggctatgcagcagcagtcgagaggtggccaccgtgcagcgcaccgtgatgttcacgcggccagtgaagggcaaagacccggccggaagctcgtcgggcctcagctgcggccacagctccagatcgtagtgcagcggcacgagccagggcggcaggcgtagctggtcccagggccccgggggtcgccagttgctcggggtggtcgtcaccgctagctcgcgtgcactgctgggtttcggggttggcgtcggcttctgcctgaggggaggggaagactcggcttccaagtccctgagtccaggcagctccgacggtgggacgcgctcgcagtggccgtacaaggcggcgagtacggccagcgccagcaggagggcggctaccagcccagccagcagcagggccactgcgcggctcacatagaagcctgagctggaagggggccccatggcagggaccgggttcaggcgcgaggctggagctcagagactgtggcagctgtcaaaaccccggccagggtgttcagtgctgcgacccctgcccctcctctcttgtatcgtgcctcttcctcctggaagagcctggacggactggagctcagcagacagcggttgggaccatggcttccccctcccagctaatcagacacaggtcccagcctacccacccccgcccccggccagcgccagggaagaggcggacctggctcacccagacgcgtacccctttgggttcgaagagacagaccccacggaagatgcctccagggttggcgcggggagggggtggtcaagccaaacgaatccggacaccttaaacgtggatatttggatgaggggtgtgccccgatacggtttcaggtgttgtcggaaaggggacaggtaccaagcacctctatctccaagccagcgatgagctaccagcaacacacctgctccaccgccagctggggcttcgtgtgctagggggtggtaagggcttgaggaccaggatatttgggaatgcgttcagaaatgaccctgcagggcgtcggccgcgccgtcagaacaaatttctggagccaaatgtgtggcgctaacttcgcttcctaaataagcccaggaggcatgcggcccaggcagcgaaggcgaagatggaaacaacgtccggaggcccggaacttttccagagctcaggaagccaggctggaggaagaggcgacaaagtgctagggagcctggcgtctgcgtctcccgggtgaaatggggttgtggggcagagcagggttaggaccgcgttaccacaagaaggggcctggcgggatggtttttcttagctctgcaactgcctggggccggggtttcccttcctgaagccgggggagaggggacacctgctttcagaaccgactcgaatcaagcaaagagaataaaacaattcggcggccagtgtttccacccagaaattcctgggctggaactggttttcccggcggtaccctagtcgctgaggctttcacatgtttgacatggcatctgtttgctatttagctggtgcccctgagcgaattcttggcgtctgcgctggatctggagtctgcattcacgcacgctggtgaattgggaatgagattgcaagcatcaggaggcactggggacggaagggaaggtagttagatcccactgcaggctgaagattttaaactatcccgtcttgagactcgcgcgcgtgtgtgtgtgtgtgtgtgtgtgtgtgtgtgtgtgttacagcgaaaatataataatttttccatagcagctataaaacggtgttcgctttactactgctttggctgtatctcacttgcaatgaggaaaccctttcgcctgggttcagagatggggtagaccacggtgattctcctgggaaatgagtgctttcttgttccttgaactgaagtgaatcaaatgaacaccaccaccatcaccctctggaataagacaggaaagtggaaggagatatattaagctcacgcagatagttgtgctataatctgtgaaccagtccacattaagaccatatgacttatttttctggatttgctttgttcagaaacttaaggattatatttaaaaataattatgaccacatgcatcactctcagaagatcatagatagagctgagggagaagctctgtctatttccatatacctaccacaagttgtgctgtcagaatttgagctactgcgctagcaggggcatctcagtttaggtcatattcagcttgggattgggacagctgtggcactaattaactaattactggccttaacaacccgtgggcaatttcttgaaggatttcgaaggatttccagacactcaaggaaaggtaaaaatgaaaggaagtcagtaacatgattatttcaaacatattaaaggtattcctcccctcagttaagtacatatatggacactagcatttaattccatttttctaatatgattaaagaaacagagattggcttccacacaaaaagtttcaaagtaataaagtcacaccaaatgattcagcaatttaagtatcttattaaagggaaaatatttctgataaatcattaatgtcactccaaagacgttgcaaaataacatactgg

SEQ ID NO: 317685 - DNA, 4001 bp, Homo sapiens
ggctgggggatggttccatggcactatctgatttgggatccagggagccctcttcggtgcctgtctgtagcaggcgtagaatgcgtttccggtgccctgtggcgctgatgcccaactgcttcaactcctcgtggcccaggccccgggctgcacctgctgtagccaggccatgccgtcggaacgtgtctgcatactgctccaggtgcaccgtggccagccacacagcgatgtccaggtcctgaggggcagccatgggggctcaggccattgctggggggaggggcagggtgaagggagggctcaggctgagaatccccctctctgccccagagtctgaggcctggacagtgagcaccagcctccaatcttcctccaaagaaagatgctgaaaggcctgcgatctggaagcagagccatcccagaacaacagcaatggctctctacttagggaagggacttcatttgaagttaaggaaactgaggcccagagaggggaaggggcttgccccaggttcacagtaagtcagtgctagagttggcccctcagttcctgcccaccctgggtctgggtcaaagctctgctcctgcctgactgcacatccaactgagtaagcatgggacaagatgctagaatgctgtgggtcagagtgggatagggagatgcagaggaggggccaatgatgtggccaatcagctctggagtaaggtagggagaggggcagcctagataggaggaaggaggtgcagacgccccctccctcttgtttccagagccgatgtatgcaggcctgccgtcctaatcctggttgttcccagtccctcctccccttccacctattgtctctgctcagacttccttcctgtccctccagccctggccgcctccacatcctgcctgctttggtcaggctgccgggagagccctaaccagtcctaatgtgtggggtcccggccctgggtggaggctaattgaagaataaggatggggatgccagagagatgaggcctgacctctggtcaggggtactccagaggcttctggactctctgcccaccggcagcatgttcacatgctgttcacctgtgtgtgcacatgccctgtagcgatttggcagtgtgaaatgccatccccccacctctgctttctccaagccttccttttctgagcttgccttttccctgctcattcccttgggctcaggtctctgtgctctgtcccccttccaccagcctgaccccgaccctgaccctggtctatttcatagacctgtctctaattctgtggcccctgagttttatctctgccttgtcactgtccctgccccattccatctcaacctctcaattcttctttgtccctctccttgtcccaccctgttttgctctctgttattaagcttgtccttgactcagtctacaattctaaccagatcttgagttgtatctgtgtctctgtctgcctctgagcctgggtttctgtcttccgcctcggcctaggctctctccctgttactcttgtgctctgtcggtgaccaggacgccctctccgtcccagcatcactgctggcctccctctgcctctctccagctgggcctcattcccaagccagggcccgcgtgctgagcctcgggccctgactcagggcccggtttcccggtgactcaggccgggctcgacagcacggggctgggagctgaggtgctcgcgggacaggagtggcgggggcggggcgggcagtggcgggcagcgcaggctgcgacgagggagggggcgaggagggatggggcagaggccgggcagcaggagggaggggcgggtcgtggcagggatggggagggccgccggcgccgagggggcctgggagcccacgaaggccctcgagaaggtgatggggaggagtctgggaagcagggacccggggggcgcgggggtcctcacctcactacgcggccgccgtccgctcgcgggtgcccgccgctcgtccgaggttctgggtcccgccgcgccggccccgcctcccctctgccctccctcgacgggcccagccccgccccgcccggccggttccctccgcggggccccggccactccttgtgcaagcgcaggcctccaaagggtttgggcttcttgcccaaccgccgcgcttatctccgagtctgcccccagtctgccctctcgcaggccgagaaaggaccagaacacgttgggacgaagacaacctcagggagagggacaaagaggcagagaccgggacggagactgggacggaggtagaaactgagaaagggagagtgccagggacggctttgcatcctctccgctgctcccatgccctccagtcctgccaaaagggaggaggaaaggtcgagccctaatcccccagggcacctctcccacgcccggaagggtggctggaccctggcaaccagtttagtgtggggacggaagctggacatccagaattgagacttggcctgggcaacaagcgcagaggcccagcagaggggtacccgtctgtttctccccacttccatccccaagggcccggcctaggttccttcgagggatgaaggtccgcaaggcacatccctacttccaaaccaaggtttggggctgcctttttgggacaggcggacgccctgcaagctcagtgaccaagcaagcagctgtttcattcatgggagaagccgccccttctccccaactcccaccctaaaatttcaggggggatgccggggaggcctgaagaggaatggcccttctctccttcgctaatcttgccggaaccccggtcctggagcctgtctcccaggggcggaggcacttccctctctgagcaggaccagtgtttgggtgtggggggggggtgtttgtgtgtgtgtgtgtgtgtgtgtgtgtgtgtgtgtgtgtgtgtgtgtgtgtgtatgtgttgggggtggcgggggcgctggccggctgtgttttcctgtttgtatgagaggaagttggctgtgagtcagcagacacaggaactgtcagtagctaggggaagacccctgcctcaggggaagaagaggggagtgggaggaagtggttcccacctcttccagctgcctcagctaggggagggactgtcatcttcaacctactggagccccactttcccggccttccctttgagaaagagaattatagtaataaaataataattgcaatagccataataagggctaccaattattgagagctgaccgtgctccaggatctatgtaaacattgctttgcaaactttaatcctcacaaatatccctacaaataggaaattttatcacctctattttacatataaggagacagggagcattaaataacttgctcaagactctgcagctagaaaatagccaaccctccaagtctatatctataactaccatgctcacctaccaccctggacaggacccctgcaccatgtcctttttttcagatgggcaactgtggtggcagtgagaatgctcctcacagatcttacactgtgaggagtgaaattaaccaatggccccagctgcttctctctgaaatctaaggccagcttcccactgggctgctcccagccagtgacagagctcagcagagatctaaggcagacccattcctgggagataggggactcctttgacagctgactttggatcaagatttcccaatggctttgctgaactttcctttgactggtgttttaggatgctcctctcaacctttattccttccctctctccttcacagctctcctagctccaggctcccttcctctctcacaggcatctcccctagtcaaatccttgcattctgccttggcagcttcttctttaaggactcagactaacccagcaaaataagggagcaggaaaagacagtaaagggcacagggagttttgaggaatggatgccggggagtttgggtcaggggctagatgcaagagttctgaacctttttgtgccatgttctcctttggcaatacgg

SEQ ID NO: 317686 - DNA, 4001 bp, Homo sapiens
catctctggctcaaaccaggtggattcaaaagctctggtcctgctgctagagctgtgtgactcagaggtaatgcttcccccagtctctgttttctcatttgcagaatgaatctaagcacatgagataattatatgtgaagcagtgcctggaatgaagtacacctctgtaagcacaggagcagcaaaatattcactcctacacccttagtgcccagtgcagtacccagtacaccacaatcacaccaaaagtttgctgagtgaagcagagaactcactaaagccagcctgaggttcaatcaaaattcctgggcccaacctgtaagtgggcccctaacttactccaaaccagggacccccatcccctaaaccaagaatggccttgattattgacaaaggaagggtctgttcatatgtttcaggtaaggcacagcctaagaatctgcctctaagaagcctcatcacatcacagtcctgtgttcatttcatcccaaaagattggcactttgggctgccctggcattccattgtctctctcttcatttttagaagcaacaagctgacaaaatgacatctcaggcacctgacttttgtaagtgccctttaaagaggcctgggaacaattcccacagctacgactctactctgctaaggcaagatttcttagctgaaaggtatcacctactaagaaatccatcacagaaacagatacagtaacagagtcagagacaattccactatctgccttcatgtggttcctgattcttaaaactaaaagatggactgagctatttttaaatggggagactgaaaaggcaccaaaaacgttctcacaatccaaagcactcatccctagagcacgcttatttggccagaaaaagaaactctctggctctgcaaaagtgaagcagaatgcaaaattgcatctctccccttgtaccaaaaggaaaaaacgcaaaaatggttttacaaaaggtccaagaatctttgaaatacgtttgaacttctttctgagaattatggatattccttctcagacctttacaaggataacggaagaggtaaaaaggagagcttgggagcaggagagggagagagttgggatatgtacattctatttttaaaccctcgcccacagtttagagtaaaggaacactctgattctctactcccacccctatcaccttctgctaaacacaagaatcagaacctgcgcacgtactgattccagatttagagattactggctgccaatactccaaggaatcgcaagctaaccaagcattccacccagggaacccggcggcctgactaggctggagctgcgtacagggagcgaagcagtcacaacccaccttttcccaaggggaggcagcgccccctcggcagggcacgctccattctcacggttgggcactcaaggctgagcaactctgcccctaagggagctggagctgtggacacgatgggatctgcccgctggctgcggcgcgctcggcactctggccccactgctgggacacctgcgtgccgcgcacgcccacgcccacccgcgctgccccagagcaccacccgcgctgggtcacctcccgaccatccctgaacgcaaaaggcggagcgacgggtctctctcttcatctgatggttgctggttcgcccgctttacgtatccttcctgcctcggaggcgtcgacacccgtcccccagtgtaccgggagcagaaacccggcagacgcgcgggcaacccgggctaagcgccacctcccagttcctcccgccccggagccgcgtccccgaggggctcgggacactcactcttgagcgcgcttatgagtgacttcccgtccttgatgagctccttgatgaatttgttggtcttgtccagctctgcttcgtgcgacttgagcgtctctcggaagtgcggactatcgaggcagcagtcgctgaactcgagcgctgggagccccatggtgcgcgcggcgcccagccggggggcgcgcctccgccggggcccgggccgcccgccgcccagagcactcacgcggcgggaccccggccggctcccccgacggccgccggctccacaggtgtggcgctggctcactccgcgcgcggtgtccgccggcgcgcaagactcccgaaccgagctcggacccggccgaggtgctgctgttccgggcgcgggcaacggagcggatcgcgagcaggaaacgcagcgcggacccgcagcggcgccgggaagcgagcgagcgggcgagcgagtgcagacgccgcctccccgcctccttcgctagctagctctcggcagcctcgagcgccctctcacagcagcctcggccgccccgccggtgtctgggccgctcgaacctgctagcgatgacttaatccccgccgggccaatcagcgcaccctcccctgcccgaccctcaggccgcccgaggacgcccggcccttccgcggtcttgatccaatcaaaggggcctggaggcagggtctgcggctgggggcgtggccctcgccaacgcctaggtccgcagcgcaaactccgcctcctcttgccctcccagcgttgcagaccccgaaacctaggggtgagcgttgctgtgcacccgcccccgctaccttgcccgcctgctccagcccgaatccgagccacgcatggcgagtctgctggtcctgggggccgaagagcctcgatgtgccaagcatgaaaaacctggggactagggctgcagttcaccaccgcctgccctgcactgcggggcaaccgattttacactcaaaatacagccccctgctccgggagaatcccgagcgaccaaacgctcctcttccagtcaggcagaaaaatgttatttgcatcttaaaattaccagctcttgcctgcagtcttcccgccccctacggtccgtccccctcacggccactcctgctcagaacccgcccacggttcccctcagccgaaggagctcacatcattactagaatttcagccgcctgttattttcctgctctgcatctagcacaattttacataataagatgacagtctactgcctgtcatccttcgctacacggtaagccccacgagggcaagtgcccctgcaattttcttgtccgctgttgcatcctggcacctagcacagtggctggcatttaataacagatattgagcacttactatgtgctgtgtgtgctacggtgattgataaatgtagaataaatgaatggatcctttcccagagccatctccacctcccacgcccagtgcgttgccctgtagtccctctgttcgaccgcaggactcaattctggcatctcactcgttgcacttgtcaggctgggtcccacagggtgtctagtgctgaattgttaactcctggaggatagggactgtccttgaataaattatctctatgtctaggaaccagcagccctccttcagctacgtgggggcttcatgtttgtttgggttggtttgttttttaaataggtctgctatgtgcaggcactagcctagatggtaagaatacaaagatgaataacagaatgaatttagctgctggtggtattaggtgagatggaagcaaacaagcgataaccatgccttgtgataggatagaaggcctgggtgcttgggaacatggatttttcactcaggaggggtcagaggtgtcccatctatattaagaaagcaattaatgtattaaattcataaatggagcatggtggctcacacctgtaatccataacttttggaggccaggtgagaggattgcttggggtcaagagttcaagaccatcttgggcaacacagcgagaccccccccatctctacaaaaaattgtaaaataaataagtaaatgtataaataagtgaatgtgatctctttgataggtgtatctacaaatttagacttgatagcaggtccagacagctatctgatagataattacaacccaaaaacaattgttcttcacttgccaaagatgagaaagatctag

SEQ ID NO: 317687 - DNA, 4001 bp, Homo sapiens
cttataagaacacaataagaaaacattccaaactcttctgcagtactcacataattaaaaaaaaaaagtatgaaacccacccaagtgaggcttctgagacatttcatagaaacttagttattaactactatttttcttctttacctttaagtgtttataaactgcttaaaggacagttgggtacttcagaggaaagtctaatgacacgcctgctatacaacctgttcttagttggccagattgtgtggttttgataaggaaaaaaaaaaagtcaaaagcaggacaaacactgattctctgttctccattctcccattacccaagacattcatctgagtcacacactctatagctagctctgagcctcagtttccctaaccattagctataagatctgatgctagccaaattcctatttgatcaaagttaatcagcccaataatcacatatagagtccacatcagaacattacattgaaatactatgttgtattaaaaattccaaagggttttgccatattcatctcttttctgcaaatactccaaaggggttactttggctattaatcaagattaggcaaatacccatgtgctttaggaatgtgtaactaaaaacccaggacagatctagagaaaccttcccaggtttcccagaagtcatcactacgcttggattgtcatgtacaaagtagatgccacagaacctaacaagggtaggtccttgatttgtttttgcagtgaaaacaggatttcacttacacctgacagcttcagggcctaggaacacaagataacaacgcttcagaaagccaggggccccatggaaccccaaatgatcagttctttataaacgaaaattaaagatcttactttctttggattttgcccaattggtgtggtccgtggtgaacctctataactcctggtgtgaggagatgtgtggatacccaggcaggggtcaaggcgggagaagccgcacaaacacagatgttgccactgttcctcggcccacccagccaaccaatgcggggacgctgtgggcctatagagatggattctttcttagaaatctaactggtctctgggaaaccaaagctgggtatccagggccgcctgagcacccagtttccatacagccctcgacccaaatggtgctttcttggccaaacaccggcctgtcattcggaaaacctaagcacgggaaggctggggcaccaccacatacaccccgggtatttaaggggaaacaaatccataaaataagcgtaaggagtcccacataattctgaccacctttcccaaccaaggtaaccataaatgccttttgaaacacagcagatgcttccacacgagtaagtggtagtgcgtgtgtcctgagcttgcgttccgtctgcattctgcggtcctggccctgccaagcaccctcagtcccggagctgaagcatggatgggaagggcggacaccaactctcgacgttctcccttctccaccgcaggagtgctgtttatttccctgtctcccgaaggacactggcggggctttcacccgcccagcccccggctctcagtgcgcccgagcgaccccgcgctccgcagctgccgccgccgcacgaggctgcgccgccctctccacttgttgccgctcccgagggagcgggaggcggcgcccagccctcgcgccgcagcgcctgcagcggttccccggtcacctctgctgaccctcgcatccctggggaccctggagaaagtggccctgcggatgcgaactcaggtggacaaacttttccgcccagagctgcagggaaacgcagacgatggagtcccaaagagcatttacctggagcgatggccccgcagcctccagaacccaggcgaggctctgcccccgcgccctgcctgagggcgcctcggaacgcgcccccagccagccgccgcccggagtccggaaggctctccccggcgatgccaacgcctggcggcggccgggctgaagccaaggtttagggggtggagccgcggccgcgcgcccgggcccggctggctgcgccagcagcgggtgccgcccccgctccccccgctccccccgcgcctccccgctgccactggatccccgcctgcccacctcccggcccggctcgcggcggccgcatcacatggcgaggcccgcccgccggccgcgcccgacaccggctccaggaggaaacctgaagctgcccctaccgcgctgtctccgccagccccctcccgctgcggggctgcggccgttggcctccggagatcggaggcgcggaggctggcgcggacctggcgggccacaggagtgccagttgcgccccgggcgcccccacgccttggcgcctcccgagggaggcgctgggctgcccgctcgcgaaaggagttgtgccaggcccgagggaggctcaggctgttcccagccaaaagccaccacacccgtgacataatacggcccgggtctattacaataggaaatattatttttaaaaacagcatttgccctcttatttgaagctcatgttccctggccgagagctttgcaagctgcgattcccttcacgtttatgcacgcaagtggctgcaagtcttaattcaaaaacgtatgaaaaccataaccacttttacaatgaacagcaatgtgaagggacttccttatcctccaaagcagttttcctcttagatgtgatgacagccccaagagcagaagccaagcctcttcatcagccaggctctcatatacagacttaagaccattattgcagctttaaaggtaaaattgcccatctgagactgctgtggcagtaagtgttatagttaagactatttgtaaggaaattagtattgaaatataaagtttctaataaaatttataaaatcaccttgagtctctgctttgtttttcctttgaagactggctacgcacagaaccataacaaaggtgtggcccgaggaagctggccaccaagatcccaagccagaatggagcccagctcccaggctgccaccaccacttctcctgggcctgggccttttctgtctcccttccagccgccaccttccccagcccaccttgctgatacgaatgctgagaaaggctgagattagcaagagaaagaccatcgtgtgtctgaatgccttagccctgttccaaggcaaaggctgcaattccgccttgggaaagggaccccaacactggcattgcactcctgacctgggctgtcatcccagctgattccaccctcagccccacagagctgtgaactcaaggcctggcctcaggcgctgccacaaaaaaaaaaaaagaaaaaaaaaatatatatatatatcctgcccagtgtcaaggtacacaagataaaaataaaagcaataatattcttttcaaaaatagaaaaaattttgagcagggcgtggtggctcacacctgtaatcccagcactttgggaggctgaggcgggtggatcacctgaggtcaggagctcgagaccagcctggacaacatggtgaaaccccgtctccacaaaaacacacaatttagctgggtgtgttggtgcgtgcctgtaatcccagctactcgagaggctgaggcaggagaatcacttgaactgaagattaactgaatcaacatgccagacaaaaatggtttccaaactctggtgaataaacatggtgatgtgttagaagcctttgttgttattgtcctttttcatatcactagtactgaagccctctttttcttttttttttttttttaattctggcaggtatgtatctttttttaaaaaacaaaaaaatgtggaaagaggaacaaatattataagaagttacccccaagccccttccccactaaaaagaaaccagcaaaactagtaattgtgaaactctcaccacccaaggacatacaatgctagctgcagttttcttgcctgctctcaagccctgagcttgatcaatatttaaatacgtacttggctttcaacttctctaggt

SEQ ID NO: 317688 - DNA, 4001 bp, Homo sapiens
ggtacctatcctcaagaagctctcaatataccagaactgataatattcactccaaagtaataatgactttgtgtatctcctccctcaaaaacaatttacatggttttttatttactattcaggaataatttcaaacttacagaaaagctcaaggatatccactattttttttaaaaaagctgaaagaataacagcagcacaaaaaaatagcaatatatactatttacccagatttacatattgttaacatttgactgcattttctatttgtgtacgagcttgtttttataagcgcatgcttgtgctcatatatatatatatatatataccccctgaatcatttaacagtaagttacatatatcatggccttttaatatacgactgtatccaccaaagatacacaggctttcgtgttgaaatttttttcagtctgttccttataacatctataaaatcaataaaatagaaaaatcaattttcttagataaaaagtaaaattaatctttaaaacattaattttaatgtcttaaaattgtatattgaatataagctattaaagtcttcaatgatagaatttaaaggatggcagctgagcaacatgaaaaatgtgttcaggctgagtctttctactagccctagacggtaaatgcatcttattcctggggttggccttgatctaagctaaagagcaaacaagccaaataaacacttctattgtatttcagaaggaagaaagaagatgcttgaagctaagctggtttgctgacaactgctagcgtccatcctcctctgggagaagcacagggtgacagggtaagccatcctgctccctagaacaggtatgctcccgaaggacagcactgcagaggcaacccgcttagaaacaccttttctgcttgtaagcttatgaaaatgttccttttctccttgaattgaaaacataagcacacgcgtccctgcacaagacaagaacggggaaggattacacactatcttatttttttaaacctcagaaggcaacaatcactgccagctaagcccagccgaggatgggataacagcttctcagggcacttcctctacaccctaacaccagcttgctccttgtttccatggcccacactacaacaagaatggattgcaagtaagagagaataagtaatgtaaacccattccattatcaatcacgctcagataaatggctcttcttccttcagcagtaaaggattttacttacttgatcattatttttagtaaactatttacaatgtgactgtattctctgaagatacacaggcttttgtgttgaaagtatttttttcaactcctttccttataacatctataaaatcaataaaatagtataaaatagaaaaattttcttaattacaaaaatttttttaaattactatacacttgaaaactaaaacaaaagatgcagaagctgggtatgaaacacatgcgtattctctgcaaatcccactaagactgaacatgtttaaatcaacaggactgtttattgccaaggtaactccaaggtaattctgaagaagtgaatccaaaacatttaccttatactaaactcccttctttttttttttttttttaaagagaattgcacatacataataacaccaaggtaggtagattcaaagtgaaaggaacataagaagaattagtaggtttgcctcagaaacctatatgtatctgtacagtgagtgttttataaaggcacgtataaacacgcgctacattggaaaaacagtctggcaaagaaacacggaaaagaaagaataggatgtctggttttgcccgtgaaggaaagaaaagatactgcaatctaccttgtttggacgtccttcttcgaatcttcattttgggaaaggaaggccacgagtagttaaaaggtgagtcggagtcagaatccatctttttgttttggtgaaatcaacagatgaaacagtagagactcaggaagaactcggggcgtccccagccaggaggcaagcctccccatgtgatgtaaagggaaggaatgagattggatgaaatagctcctgcacaccagggagggaaaggcaataaatgttttgcttccttcgggcattcaggcgtgtagaccgacaaggaggctgtaaatattaaagccaaactagggaagtaaaggagggagaagtgggggagctaagagtggctgaaacactgcagtccacttattcaaaaggtcattgggagcaaatgaatcattaactcccctcttctggttgctggaaatggaaatgaaggaggaaggtaactgggaattgaaagagagctgcctgtgattcaagaaaagcctcccagtgcaggcttgttttgctcggagtgagaatattgcttctcagaagagctacccggtgccgtgttagataaaggttgaggtttatgtgtgtggacagccagaaagcttgatccccaggcaaatgaaggccagcagactccaggaagagctctttccagagcagactattctttcataccattggcagcttgggcagcttttcggatctaagaaccaaaacagctctcataattcatttaacaatccagtctcaccgcccttttaatcctaatgtggttggaagttttaacttttatatagattgtactcatttcattagatttatacaaagttatctaccactgtttagcacaattggggtatttccatattggtactgtcaccaagtctggccgtcaatcatcaggattttggtgcctttatagctccgatctaaactttcagtccacctcaatagagctggtgactaatttaccacaaaccaacagttcttgccgtctccctgaacaattctccagtaattagcattcaggagaagctcattactgcctccccataaatcgtggcactgctcaggctcacttctccgcttcctataggcacatagatatccatgccccaaataagctcaagcacaacagccgagatctgcagtggaaaaaaaggatatcccaaatgttatcaggcagtctcttttaagcatttcttttagtagaaacaatagcaagaaatgtttgttttgttttgtgaggtcacctgatgtccaaataaactaaacgacattggaaacatacaatatgaggatccattaagtctgcagacttagaaggtgacagtatgtgtcttaattaacattcatttctttgcttcagttatttcctaaattgtcggtactactgtgccacgctgtgtaagaaaatagctgcatagcctgctccatggaagctaatcctgtctgattgggtaggggttgagtgaggcatacagggagaagaggagaaaggggagagaccacttaatttcaaatttaaatcaaaatcagaattacataaatcactactgtgtttttatatagtttgtcacataaacatacaactaaaacaaaatacaactagagtatagttacaaacattgcaactaagtggaaagaaatactgatacattttctattttgtggcttttttttttttttttttgagacaggctcactctgtcgcctaggctggagtacagtggcaggatctcggctcattgcaacctctgcctcctgggttcaagcaattctcctgcctcagcctcctgagtagttgcgtctacaggcatgcaccaccacacccggctaatttttgtatttttagtagagatgtgttatttctacgtcagccaggctggtctcgaactcctgacctcacgtgatccacccaccttggcctcccaaagtgctgattacaggcgtgagccaccatgccaagcctgtggcttttaattaggtgaataagtacgtattattctcaaccagctgggtataattataaggatatgtaactttcagcccttatatccagtaaaagagttttagtccatatggatctttaattagaaaatataccaaatcttgtggaagagcatttacattcactcttgattttagagcacaga

SEQ ID NO: 317689 - DNA, 4001 bp, Homo sapiens
gagggatgtgagccaactgccagcaactcctattccctggcagaaattcagctgaggctctattgctgaataagggtgggtgctgctcaggtcccagtttatgtcctctttcctctcatttaaaaacaaactctataggccaggcacagtggctcacgcctgtaatcccagcactttgggaggccgaggtaggcaattgcctgagctcaggagtttgcaatcagcctgggcaacacggtgaaaccccatctctactaaaatacaaaaaattaaccgggcatagtggcgtgtgcctgtagtcccagctacttgggaggctgaggcaggagaattgcttgaacccgggaggcggaggttgcagtgaaccaagattgtgccattgcactccagcctgggagacagcgagacttcgtctaaaacaaacaaacaaagaaaaaacaacaacaaaaaaacggggtgttgaccccatttgaaagaggcaagtgaagcccagtaaacactccttgttacagtatctggtagtttctactttcagcttttgacttggagtcaaatattgagggtagtaccttgctgcacccttatttaggataccatcacgaaggtatgtggtgtggtctgtaagtcataatagggctgactttattttttcatgtttataattttttaaattgtattttatttcagatacagcccaatttcttccaggtcatcaccctttcctaattcccacagctttgatgattttgtgtgtcatcacttttttttttaattaattaaattaaattttaaactgtgtacataatagatgtacatagtttcagggtacctgtgatactttaatatatttataaagatcaaatcagtgtacttgggatatccatcactttaaatatttgtctttatgctagaaccattcaaattattctcttctagctattttgaaatatacaatagattattgtaaactatagtcaccctataatcgtcagcacttttattgagcatatattatgtcaagcactagcctttatgttcattcttaagtctgacaataacctggaggatgaagcagacactctcatcccccgtctacacataaaactaggccttgaaaaggttaaactatgcttcctggatcacacagctggctgtctggacgcacagcaggtactcctccaccagctgcctcccttcaaaggagcaaagaaagtgctctgaaaccaccctgcctgagtagcagcctgcaggcattccttacagcaggaattcatgtcaaatctcaaactgtgcacaaggctttgtgtgaacccttctgctgggagtggacacagatctctaaggggtcagggacccccagaaggttaagaaccagtgcctgggcaggctgtctgcttccccactgtaagtttctggcgttcagaagccggacgttctgacttctagtcccagctttggcacgacttttctgagggaccttagccaagtcacctcacctatggatcacggatttctgttctcttttttcctggccttgactgtctattcataattatattttgcttggcaaggattctttaccattgtttgtatttttccgttgttataatgtatgcattctttctaaaagctgtctgaaatcctgcacggaagaaggcagagagaaacaggaacaaagaataataatgtttttccaggccggctaacctccctgggcctcagtttcccacctgtaaaacgactagggtaggccatatggaccaggtggcttacattctcataaggctcaagacacaaagctagctaccaagcaagttgggacccgggaggtcgtcgcatcctgcctttctgtcccacctcccttttctgatcctcccagcagctgtttcctgcacccctctccagccccatcctgcttgaccaggccccaaacgcccagcggactcacccgcgcgcgcaaggtgcctgccggcgctcacgcacggaggtcggccgcccgggcaacagcgcagccggggcaggaggggcgcgtcgcccagctcccggcacccgcgccgctccgggtggctgtgcccaccgagggcgctggcgggcgcggctatgcccacgcagctgcctgcgtgcgtgcgccgcgagggggtggctggtctccagcctttgttaattgtctttctggagccaggttgttttctgttcgctgctcccggagtcagccccggccggctcggaaccgtgccctggctggcagccaacccgaaggattgcaggcggagtttagcgacgtgccggcacccaccctcccgcggcctctcattaagccaccttctccgcgggctcgtcatccagaaaacaggagccggcatttaggccacccggtgggaatgctgaccccggtattactggatacctttgctcctgcccgaatcaccaaactgtagggctgggcctcaatttaattcttagtgttggctgccgaggagcccttggttcttgccccagctctcctgggagccctgcacaaccttagccaagtcggccagtcgcttccatgacatgacggtgttggtccattctttcactctactgggagcaagacactgttctgggcacagagaacacaacagttaacacgatagacaaggtcctggccttattgggctcctgtgcaagacactaaacccaccattgaaagtgatagttgctatgaaacgcatgtaaagtttcatatcggggcaaccaaaccttgtttgtagcgtcaggaatggactagattagcttttctcattctgccacttcttttattcttattttcatttttagggcttaatttagggcttattatttattattactgctggtagtagtcatattgcttactaagggccaggcgctatactaaatgttttacttgtactgtctcaattatctcattcacaatttctctaagagataggtatcattattattatcctcattttcaagagagagaaacttaagctacagaggtgaaaataacttgcccatgacacacaactactaagtgacagtgccagtattcgaattcagactatctgagggttcaggctgcttaaccaccactctacactcagaaaaacatgaaaaccagaaaagtgtctcctcttgaatgtgacagatgagggcaactgaaggggagaggggtggtatagcttgcagaagagaaaaaccaagggtgccgggcgcggtggctcacggctgtaatcccaggactttgggaagctgaggggggggcagatcacgaggtcaagagatcgagaccatcctggccaacatagtgaaatcccatctctaccaaaaatagaaaaattagctgggcgtggtggtgcacacctgtaatcccagctgcttgggaggctgaggcaggagaatcacttgaatcctggaggcggaggttgcagtgagctgagatcacgccactgaactccagcctggtgacagagcgagactccgtctcgaaaaagaaaagaaagaaaaaagaaaagcaagggaagctgaggacttttcaaaaaagtagccctatggattagacctaacctgtatgatcttagaggccaccaggatgcagaaagctgtaaggagatgcattgcaatttaaaatgtaaggaagaacttttctaacaatttgagtatttcaaaaataacatcagttggcggggcacggtggttcacgcctgtaatccctttggcactttgggaggccaaggagggtagatcacttgaggtcaggagttcgaggccagcctggccaacatgttgaaaccccgtctctactaaaaatacaaaaattagctgggcatggtggtgggcacctgtaatcccagctactcaggagactgagacagaagaattgcttgagcactggaggcagaggttgcagtgagccaagattacaccactgcactccagcctgggcgacagagtgagactctgtcccaaaaataataataataataataataaca

SEQ ID NO: 317690 - DNA, 4001 bp, Homo sapiens
atgggttttctctagctgacactagggacagaaggggaagcaggaagaccaaagaggaggctgtggtgctgagaggaaagatgacactagtttgggccagacaggcaatagtggaggagggtgtgccactgcccactgccattccagcctgggcgacagagaccctgtctccaaaaaaaaaaaactagaatggtggggtgcgatggcttacgcctgtaatcccagcactttgggaggtcgaagcgggcagatcacttgaggtcaggagttcaagactagcctgaccaatgtggtgaaacccccgtctctactaaaaatacaaaaattagccgggcgtggtggcgggcgcctgtaatcccagctgctcaggaggctgaagctggagaatcgcttgaacccgggaggaggaggttgcagtgagccgagacagcgccattgcactccagcctgggtgtcacagtgagactccatctcaaaaaaaaaaaaaaaaaaaaaaagactagaaaggtgggtgaccttggattcatgatactactgctggaactcattttcctctggagataacgagggtagtgaccgattctagttttatgtaattgtttaggggagttttcttaagcaatgcccgtcaagtgcttggcatatgaacccttagctgttagtatctctgtgttaggcctatcgactttggtaggggtgatggggcaggcggtgcagctggagaggcccgatcacgaagggccctaaatgtcagagcacagagcgtgggctgaatcctgtgccccggagagcggtgggaaggattcgtagaggggaatgtgctgcttagacatgcattttggaagcccccttccctgcagagaatccaggactggtccagtagaggagacggggagatggggtagggtgtccgctcactttctagcaggtccacctcaaagtccttggtgggcagacgcacggagttgaagccccaggtggggatgtggccttccagcggtggcttccccgacaacacgcgcaggaacgtgctcttgcctgcgccatccagccccagcaccagcacctcgcgctgttccagctcctccagcgccggctcctcgtcctcctcgtcctcgggctgcggggaagcggaggtaaggttgcggctggcggcctcccgaaggacctttcccgagggaagaccgaaggcaccagagggcccaggcccgccttccacccgtcctgggacaggcaggcatggtctggatgagtgggacgaacgccgcctttgcagtcctgaattccaaacccttggcgaattccttaaacgctcgcgcgccccgcttcctccaccggtctcggagtcccgaccgcaggcgggaggggatggggtttctcccgacatccccacccccgggcggggtgcactgcgcaggcgccggaggggcgcgagccgacccggctgggccccgggatgctcccgagccgcgccctccaaactccggcccccgctggaacacccgagcctcatggcgtggagcgacggcgtggcgccaaggcgccgcacgcacccaagcacacccacccgttcctcggttcccgggctctgaccgcccacccgcgcggggcctgtgcgctgcggctgccaagccctcgaccccccaagctcccggcaccagcagggccgttccgtggtcacaccccttggccacatgcgcggagtcgcagcccagcctgcccgcccttccgcaggcctcggcccggcactcacgtcccactcgtcccactcggggaggcgggcagcctccgcgccccaccaggcctctccccggtcccagcgccgctctcggccgcggccgaagtaggtcttccagaggatgaagagcaccgagcccagcaccgccgcggcgccgcccagcgccagcaccaaggggcccagcggccgcggcgccatcgggccgggcgagggacgcaggtgcgggttgcacaggccgagcccactcgcccgccgaagatggccccgctgcgactgctgcggccgcgcccacccacccagacccagtcccgcactacaagccccacaatgcactgccgctgtcacggcaggccgcccgggacccggcggcgtgggtggtggggcgctggccggcgcgcggggacctccggtccccctgccaggtgcagggtggaggaaggagaggctgtgcctggggaggacgggagacggcggtgcttgctagcatccaccaggggttagctcacggcttttctccgttaccccttacaatgataccacgcagaagggaaaaccgaggcccaggagttaagtaacccgcccaacgccgcatcgtagtgctttggtgtagcctgcgttcaaacccaagcgatctgtctcccggtcatccctcaagacctcgggaggaaattgaagcaagacgcccgatatcacacggcagtggggtggcagaggcaggaatagaacccaggtccgtggctccccgccacctctagccttctttcgctgcctcccggaccacaggggttttgctggggtcctggtcaggctgaattaagcagtgtcaggacttcagaatgtttagggctgactgccttgtcctaggtacccccagtgactgccaaggcttccacgtgtgtagcacgaggaggaagaacaggagaaacgacctgagtacagcagtcgggttcttttggctctccagaggggtgacgccatgtacggctggctgtagggtacatgggtcgagagaccgcctgtggctctcagggcccagcagggctacctcttcccctttatattgtctcaactcttcacctccttttagtttgcgattcctctgtacccctggctctgggtcccagcccctattccttctgatttgtccccctttccctttgactacatatatatgctcctctcctcccagatagtgatgttttagctacatcttatttcttccggcattgattcttttgaaaaatttatttctggccgggtgtggtggctcatgcctgtaatcccagcactttgggaggccgaggcaggcggatcacctgaggtcaggagttcgagaatagcctgcctaacatggtgaaaccccatctctacaaaaattagccgggcgtggtggcacgtgcctgtaatcccacctactcaggaggctaaggcaggagaatcgcttgaacccaggaggaggaggttgcagtgtgctgagattgcgccactgccctccagcctgggtgacagagcaagaatccgtctcaaaaaaaaaaaaaaagaaaaaaaaattagctcctcctcaaaaatacacccacttagaggggaaaacccacaaaattgctaagattaaaagtttggctggtgcggtggctcacgcctgtgatcccagcactttgggaggccgaggcagccggccggatcacgaggtcaggagatcgagaccatcctggctaacacggtgaaaccccatctctactgaaaatccaaaaaattagccgggcgtggagccgggcgtggtggcaggcgcctgtagtcccagctacttggtagactgaggcaggagaatcgcttgaaactgggaggcagaggttactgtgagccgagattgcgccactgcattccagcctgggcaacagagcgagaccttgtctcaaaaaaaaaaaaaaaaaaaatgtttacagtctattatttgtggaaaagaaataggtgctctcacataggtgctatgcaccaagaccatgacagcttcagacattggtaccacaaatatcagggataaagttttttttttttttgagatggagtctcactctgtagcccaggctggagtgcagtagtgtgatctcaggcctcccaaagtgctgggattacaggcatgagccaccacacccagccagaaataaatttttcaaaagaatcaatgccggaagaaataagatgtagctaaaacatcactatctgggaggagaggagcatatatatgtagtcaaagggaaagggg

SEQ ID NO: 317691 - DNA, 4001 bp, Homo sapiens
caaagccagattggaacaagagaaatattgctaggatgactttctagggcatacggggacattttcaaaagtctctggaggttttttttttttcctttcttttctttttttttttgagatagggtctcgctctgtcacccaggctgcagtgctatggcatgatcatggcttactgcagcctcaatccccggggctcaagtgatcctcccacctcagcctcccatgtaggtgggactgcaggcacgcaccaccatgcttggctaatttttgtgtacatatgcagtagagatggggtttcaccatgttgcccaggctggccttgaattcctgggctccaaggatccaccatctgccttgggctcccaaagttctgggattacaggtgtgagccactgtaattagaaattagatggggcctgagctgaaagacaattagaaattaaatggggcctgagctggaagacaaacaacaaaatgcttcaatcgaatattgtactgataacttattgtgaacatgtagcacatgtcatgagggaagaaaatgctcttttgaaggattgtagaagaaaataatctcagaagcacaaaaacatataggctgacatatacatgaaataccccacctggaaacaaaagggaagctttcaatgtaggaatttcaatgtaacaaattagtaacagaatgtcatggacttttctgcagtttatttagtttaataagagtctagtaagtctaaaataatataatgtttcttttaaatttcatcttggtgtatatggttgtttcataaacttaaccttaaactgttctgcattagatatggttatgacatatacatacaacttagtacgaagcgattactattctaagtagcacagcaagaggttaagaacagagacccagggtcacctgcctgtgctcaagccttggctctgccacgtactagtggtgggccttgagcaaattgctacatctctaggccccagtttctctctttgtaaaatggagttaacaatagtatggtgtgataaggattagatgagttaatacatacagttttagagccataacgtgacataataataacaaaataaaggttcattaaataaaaacatttgtagcttttttgtccgacatctttgcaaggctgcggtgtctgctgctactctccgagcttcgcaatgccgcccaaggacgacgagaagaaggacgctggaaagtcagccaagaaaaacaaagacccagtgaacaaatccgggggcaaggccaaaaagaagaagtggtccaaaggcaaagttcgggacaagctcaataacttagtcttgtttgacaaagctacctatgacaaactctgtaaggaagttcccaactataaacttataaccccagctgtggtctctgagagactgaagattcgaggctccctggccagggcagcccttcaggagctccttagtaaaggacttatcaaactggtttcaaagcacagagctcaagtaatttacaccagaaataccaagggtggagatgctccagctgctggtgaagatgcatgaataggtccaaccagctgtacatttggaaaaataaaactttattaaatcaaaaaataaaaataaaaataaaaacgtttgtatatattctccacaaaaagcagaattttattgtacagaacactgggctaaaaatcagggtacacaggaggtggagaggagatgtgtgaggcgagagcagcccgcagtgagcagtggggaggagggaaagctctatcagcctgggcggcagagctcctccctgtgaggtcctgcctgggcccaccttcccacccacatccatgggcatctcagagatcctcgagggggcactccccagtagcatggaatcatagaatctgtgtgccataccagttgtttctgtccaatttgacagttcttctcaggaaaactatgatctgtgtgtctctcttgaatggaattgtttttctctgattgttcattcatctctgatcacttaaaaagtaattggaaaaagtaaaacatattaatatcatctatctccagtaactatatctggtgattcttttctactctccctacacgtctcactttattcaaaaccagactgtatctgtactcccagaaccttttctcccactcactgttaaaccttgcctctgactcccccagaccaccctactgaggctctcctctgccgggggttccaggagaaaatcaatagtacctttgacagtccttagcatcataaacctctcttaagcaggattaagaagactctgagtttttagaactccattcttccttctttacacacactcttgaaagaaaaagtatgatacgttaatgccatatgtacacagtaatgttgtgaaaagctcatccactctcatggtttcagctgacacctcttcatgtatcattcccacagtgactccccaaagccttgatctcctcactcaacttttctgataaatttctaatgcagcttgtgctaaatggtaatcaggttttcataaaaccccactgctaaaatgcctgtaacttacttcttctaaattacttcagtagtatatatacagggtgcgtgcgtctgtgtgtgtgtgtgtgtgtgtgtgtgtgcatgtgtgtgtgtaagagagagagagagagagagagagagagagagagatggagcccatacaatatggtaatcatgagtgacagtccagggctggtctgcaatgttctatcagaaaacaccactctccagaggaggcttccacaggccctgctgttttccctgattctcatcaactaccattgctgactacagggtgccatttctactgaagtaacttaagagttaggcgttatcatgttggcttgactcatttagcatcacctctctgctgaccaattggaaattccaattctatcagtgggaaatctccaaactgctctcgacagtggctggactaatttacattctcaccaatagtgtgtaagtatgcaccaaggaataccacgcagccataaaaagaactagatcatctcttttgcagcaacatggatgcagctggaagccattatctgaagtgaacaaatacagaaaacgaaaaccaaatactgcatgttcttacttaggtgggagctaaacgctggctacacatggacagaaagatggcaacaatagacactgggagctactgggtgagggtaaatgggttgaaaaactacctattgggtatgatgctcattacctaagtgcattatccccctgtaacaaacctgcatatgtgtctaaaataaaacttgaaagaaataaaatattcacattcttttaaaaatcaccttgttatttctccttataaaattcaaacaatggttctcaggaaaagtaaataacagctattttaaaatgcatatattcataaatagaattcataagcagatacatatgtatacaaaataaacacattaaaggctcagtggtgaatttaattttgtttatcttaacttttcagtctttgcatttgctgccataatttctactgccattattttggagaattttaatttatttttttgggtgcgttaagtaaatacttggggctgtgaaaaaatgtaatttataataactgttatttctaattggaaaatacagtgacactgccataaagacttatatgtggtgttttatagcactgctggagtttcttactgccctctcatagccaacttatctctcttttatggtccttcaaactatttgttggcttagcatattatgaatgaaagaaaggacacatttaaaagatcacaagggcaaggagggcaagggctgaaaaactgcccattgggtacttagctctttaccaagctaatgagttccatcataatccaaacctcagtatcatgcaatatgcttctgtaacaaacctgcacaggtacttcctgattctaaaataaaagttggaaagaaaaaataattaatttaatttaat

SEQ ID NO: 317692 - DNA, 4001 bp, Homo sapiens
atttgtgacctgttgattttgacacaaagctgttagtaaattggcaaataaattaatctgcttttaaggtaaccttgggcccacaaacattcatccactcacctttagactatgcctatctagaggttagcctgagtaattaaccagagttatcaattttgttttcactaagcattttgataggtttggcacctcaaagacagctttgtgatgcaatttataaatttaaaacacatccggtaaataaagaaaataataaaatgtcagaaccacctgattttcttttttaagaactatttaagtattcaaaattagcttttagtagtacaggcaatgtcaccctttcctacttggtaattatcccaacaaactttcgctttaatttaggcagactgcaagacaaaaaccatgtattgtattttataagataaattacaaattaaatcagttatttaacttagaaaataatcttctggcagctctcttaacttacagggcaccttgtattgtgaagaatgttcataatcagataatccccgtaaccagctacagtactgggtgaataatatccctttatcacaaagataaaggaagttactgccatcaacaaatgaacaacaaaacagaacttgaattcagaattttagatccagctccattcacaaggctatgcattaactgcagtcaccatcctttcccacaagaccatcaagctctgaagcattaggagaaacattttctttatgtacactaaaataagcccaaatacacagataacagcacaaagccggtccggcgtttcttggccatcaaagcatgcacagactttctcagtacagccttaagtgtaattcctagaaggcactggcaaatctctgccaggccaatctgcagtcgaaaaccgagtgcatgtgtccaacaagatgacaggagggtcaatgtttctaaccgtctacttcaactctgcatggcaatagcggttctgcccaacatggtaaacacaataatcgtataggatcgaacacaagtctctgtaaatgaggatccccttaaacgcaaacaagcaactctggggaaatataatttctggaacaaaacatggtgctcgcataattccacaaagacacatagaagtccatttttaaaatgatgttcggtcccagcactgtgctgacacttttcccacctaaacttctcagcacaagcctggcctaaacagccgggttccaatccgtgcacagtggaaccgcggcacgcacccaagaccggaatggtggggctatacctgtccctactcagtcctgttcgtgccagcctgcgaggtagtttagacccgtctgctttatggtaatgtgcttttaaaaccccgccacgaccgaggtcatagctttagagatttaataacaatcaaatgaccagggctgctgggcacttagtgagccattctggttatggctctttaatagcacctggagttctgctccagggagagaggaaaactcctgctcccccggaaagaaagtcctctgcggagagcgcagagggaagccaggaagccgatcgcgggcaggggacgcgccgccgcggccgccccatctctcaagcagccccagcgcgaccctcgccctgcagccgtgctggcccaggccgcacctttacctgtcagctccaccacccacccgccctggaggctgcccctccgagtccagggaaaggcttaccagccggctgcgggagaaagaaccccagaggcatcctatcccaaagaaagaaagcaaaaaggctgctcctcaaggcagggggccatcgggcacgccgagatccgagaggcgacatgccacccctgccctgcacctaccagataatccatgtacagaaacgcctcagttattcggagatcagacatccggcagcctaaagcatccggaacggctccgaacccggaaaaaaaaagcagcgtctctggctgcgagcgagcagctcctgaaaaagccagcaacagcgaaaatagccgaaagcagccgactagccggagattacacaaggggcgcggcgattggccaggcgggcgggcagaaggaaagaagcgtgctcattggctgcggcgcctataaaaggcaggccccagctggtggcaggagagaaacgcgggagtggtgggggatgtgggttcctgtgtgctgagcggaggagccggggtgggggcggtgcaagcggaagaaagagccaagagagcggaaaatcggctggtgctgtcgccgcccgagttttgtgtttccacagctttccagttgggtacaacggagccgaactccgtgttcccgggctggagagccttggtgtccccgccaacccccagtaggaagcgagcgctgtaacatgggaggcgtggtcgccactgatcttgtctccccccagagccttcctaaaggctctgccgccacgagactgcaccaccgggaaagaagtgtgtgaaagtgtactccgtaaacaggcaatcctgtacgcgacttaggggcagaaagaccctccgcacttttatcatttgaaagtaaggtggacgattccagcctggtgtccctgagggtacacacaggccccccgcgcagccagaggtgactcaggaaccccccttccaacccctgcgtagaacgccgaacagtcttcggagaattcgctttcctccacgtgaaaaggaaaagaaaaacatttgaggagtcgcagtagtcacttgtactccccaaacacacgggaagaagttgatcagtttgcatgcttggagtcaaattacgctcagcacaaatccaacgcccctgaattaaatgagcagtagaagctctctgcaaaaaacacaacagtatttgtgacccggtattatttcaggaggtaaaaacatctataagcagatgcatttgggacgtatgcatttcctggtaatgtcaatatcgcattaagctagtgggtttgggcagggaaagcctgaatcggacaagaagctggctttttttttttttaggctataaataaccagaccatgccagacacatgttcttaggctatgttcttaggctcaggtgattggagtgcccccccccccatccccaccctcagggcttagggagaatggaagataaggtggatgctgtcacctgtattaatagttagggcttgcatacatacagtaaagtttcaagagtgaaacttcatcgactgaactctttatgaagtgactgcctgactctacacgcgatgttttaggagttgaatttttactttccccctgacacctttcttttttgtatcctcaagaaacaaatttccgtaccgtaagtttacctgggactaccaaaacagttctgttagatgaccgtggaattcaccccaaatgtgcacataaccaataagggcgaggcagccccctagagggagctgtaggttgatgagccaagtgattttaggtatgcagtctaatttccaaacctgtttcctcagctgcaaaacgagaattcctacagccagaaagttgtgagggtttgggcggggggcggggttggggaagttgtttttgtttttttgagacagggattctctctgtcgcccaggctggagtgcagtggcgcgatctcggctcgctgcaacctccgcctcgccggctcaagcatcctcccacctcagcctgcagagtcgctgggaccacaggtgtgcacgactacgctcgtctaattttttgtattttaagggtaaagacaaggtctcactatgttgcccaggcctgtttctaactcctggactcaagcaatccgcccacctcggcctcccaaagtgctattagatccaattttgattttccttggcattctgttaattcaaacacatgtaggtttagaagagattttcacctagattttggaggagatggacgtccataaacgtacactctttagcacaatttgtttgaaactaatttggaaaacaaaatctctcaatgagcagaaatagtc

SEQ ID NO: 317693 - DNA, 4001 bp, Homo sapiens
tgaggaaaaatctgttttctttcatccgtttcataaaaggctgcaatattcagaaaggtacaaacacaaagtcatctatctgcttttcaacaaataccaaggctgtcattaggcatttgcatctcctatcagtgttaacacttggagagattaattagttatttcaggatgcaaagtacctgtatctaactacgaaaatcctgctaaagaactgagttcaccttaatagtttcaaaaataatgcattaatactgtccctcaaagcatccttcatttctcacttgccttagtcatcagcacttctccaggatgtacgtttttaatataaaaaataaggtaaaatatgtctctaattttttttctgaaaaatcgccaacatctgaactaaatactgcattaaaaaggagaggcacaaaaattacataaccagttttaacattatattcttcttgggctaggaattaagtcatcgccaccacctgacgcgtgtaaccaatctgctgagagcagaacaagcgcccctcctcaccaccccccagaactggtccgaaacaggattgaaccgcttctaacaaagggtggaaacttagaaaaacaagcctagagtctcctatatttccacaatgtaaccatttaaacaatagattggaaatctcaggactccttctccttttgacaaccctttatctctctcttctaaccaaaaatcaaatccagtgtgccctatacttttcaattccatttgactggcatgggtttcattgaatgcacgttccaaagttagacatgatgctcggaaaagaaaattactgatcctaaatggcttctaaacctgactcgatacctatcataatgacagatagtcattcctttaaaataaggaatgctgggtgtaaatttttaaaggaatggtaaagaatagagaaaaaacacgtggggtgttgataccatatgtcaaaataagccacagaaatcttttatgaaagaacagtcatcaattatttaaagtcttttgcattccaatattaaaaatgaaacacacccattaagtctcttaaaaatgttattacatttcttgatcgaagttcagtttttacatcttaggttgcaagtaaaagggcaaaaatctaagactgcagcttttaccaattcatttgaaaatatattagtaaaacgactgaattggattcaaacagaatttataagtaaggtgcaaatggactacaagtgcgtgtggcacagaccgagccgggtacagaggtagctgaataagtgtagtttgcagtcactttgcagatgcctgcatgcattacggcttaacacacgatgaacgtcaaggagaatccaaaccttccaactttgctaacctttctcaaactgcttagttatgctaggagtagaatcacgttaattcagaaaactgaaaaggtacgtttccaaagaaaatgagtccaatgacttatgaataacaaaaacttacctctttcgtgcccaattaagatgtctttatggttgaaatactctacttcttcagtgtaattctgtgtataggcagtattggagccggcgtttctagattcagtccagcgtactttcgcatgtcctcttgcatgaattttaagagattttactctgatttccccagtaacttctaaatttacccttcctgagacggtatccccactagaatacacagggacattgctgtcattaagacagtcaaagcttattgtcaaactcttcacctttcccagcaccatgtttataacaaaatctataaaaatataatgtaagacaaaaaagtcaagatcgcatataaaatgtgatcttcacttaacactgatcgatatttttgccgtgcaaaatgcttgcaggccggatcagtgattctctacaaatagttcattgagatttcttaaaaagtcagggcagcagaggctgctgctccgcgctcccgctcgtctcagtggtctccttacaaagacgggcggctaaaagctgccagctcactttaagagcagctttgtgaaaaacaaccccagtgcgcaggcgcaggccgcggctgctgtccgccctccctgcgcgccccctcccgcgccgcgccgcgccgcgctcgctcccttgcccgctcgctcccgggtacagtaggtgtagagctaggggaaggagatactggagctgctggccggctgaacctgacttctcttcattgtgggctcctattggtaggcaggctaccgtataccctcgacgtgctatctggagcccgttaccgagcgcactctactagaaagataatggcagagtggggtgcgagggtacaagggctgggtggggagtttgcaaagccaagttaggataaactgcagcgaccagcccgaagcgtgcgttaccggcactgcagcgttttaccaactgcctggatgggaggaggaaaaagtgatgtgtgaagagagatgggggaagggagaaaccggttgggcaagcggccgattgttgagcataatctaacgaatttccaaagaaaacgtaataaaaccggacaagaaatattgttcatagacaagagcatactttgcttggattttttttttttaaaccagtactttgtaggcaggttggaaatgaactcagtcgaggtcaaaggaaccttaatcctttgaagagcgaggtagagaagcaagtacaatgtaatcaataggctttgctgtctcctcaacttctttctcctacattgcttaattagcaccgaaaaacaaccaagttgtttccaggatgacacgggtgggggctgggggaagcttgatcacttcctcgaaggaagaaaaagtccttttaagacaccacctacggctagatttgcagagtaagacatgattacaactcctgtgtccagaggaataagaatagagttcggcctaaaaaagtactaccttataaaaggcatatgacatagtggtttagctgacatattgtttgcaacagaatcggaaaatctttgttagaaattagtgaagcgcataaaattgtttttaaaaagcatgatttggtatataaatagggatttaactgtgtgaagctttaattttcggccgagagccttggaccatttaacgtagtaattctcatgatacatcttaaatataggtacatttctctttttattgtgaatgtttggtaaaaaatagcagtgctttcgtcacatcacactgggattcagagcataacagcataaactcatctagattactggcaatcaacagaactgccttacaagagaaatgtagaaagaaaaaatatgaatctggtgctctctctatatatatatgtatgaccaaaaataccttggaagatttttggctgtccgtgtctaaacgttttagattcttttgcgtagtgtatatggataggttgagcctatgagtcacaataaactaaacttattggtcttgctgttttatttcaaaagaaactaagcttttgggggttggattttagttgacaaggcaatatcttggactcaacagcaatatataaagagtataaatatgcaaactagacaattaatgagcaggccatttatttcagagtttagatcgctatgcataaaattataaatttgcatatttaagtgggaaaaacagtcttatcttttccctacctcttggttgacacctggtggaaattctaggtaaagtacctggggccttgtactagctttgattacagatactacttgtgttttttctccacctagtggtagaagtggtgaatttcctagaatgacagcttttcctcagcataaggtcaatgatatttaataagcattcgaaaaccactgagcaaggaatggatttaaaagtgtagtccataatgaatacataaattcattgcacatttgtgtctacatttatgttaaaaattattaagggttagtgaacagctgaattcggatttttttagtaaaatttatttaattagaatataactcatttcagaaa

SEQ ID NO: 317694 - DNA, 4001 bp, Homo sapiens
accccttcattttacctctcccctcgtctttgctcccagcccacgccctccccagcctcccacctcaggaccgctccgcctgccggccgcggcgcccagcacccggcattcccataaaccccttcgcccggagcttcagaaaacgaaagacaaagccacccgcccaacccggcggccggggcgcgggtccgcggggcgccagagccgggcatgcgcagaggccgcggcgggctgccggcctggaagagcgaggttggggcgagaagccgccgggacccataactgggtcggcggtccgagccccgcctgccagcgcccgcggcctcaagggccgggtaggagcggcagggcgccggcgaaaggcggggcgggggcggcgcgggcggcgggggcgccgcgtacctggtagcggccagtgagcagctggctccgcgacggcgtgcacagcggctgcgtgtagtagttgtccaggagcaccccgccggccgccagcgcgtccaggtgcggcgtgcggatgcgggagccgtggaagccgacgtcgttccagcctaggtcgtctgccagcaagaagaccaggtggggcggccggctggccccggcgcccgagcccggcggcgccaacaacagcagcagcagcagcgggaggacgacggggaggagcagccgccgaggtccggggcctcggggcaagctcgccgcgccgcgcggacccatccttgtccgcccgcggtcccagcgcctgtggcgccaccagccccttgtaccgctgatagaatgaggaactgggctgccggggcctgctccgccccggcgcgggacggcacccccagcgggccgtgggcttgcgaggccgggcgctcggcccccgccgcctccgacccgggcccccggctgctgtggcggaggaggagccagagacgaacccgcgggcgcccgctgcccggcttcttggaaactcagctgacgcttggagggcaccaaggcccgttatcttccccggcaattaaatttgcactgtggtttcctaaaaaaaaaagatgtgttctttaataacgcttcacaatttacaaagcatcttcacagcccgcgtctcctgtaaagcctgcaacaactctgacagttagacattataattagtgccaatttttcataagaaaaaagcttataaatggttaaacctctgactcagatcctgaaccatgatgtctagctagcaagtcatttctagcacaagagcccagcctgtggcaggtgggaggacggtgaaaaggcagaggtctaaatagcctttcacattcatttatgcgtagtgtacacccatgaagccgcttcctccccactagcaaacaggaggccaaacacacagtctgattgcacggtgccctttggaaggtgcggttactttcaagttgccctgggaggatttggagtgttgcgtggtcattgaataaatagctcattcgcttgtccggatatgaccccactcagagctggctcccccactaagcagtgacactaagaagcacacagtatctagttagcctgaaatatctgagtggaaggaaaaaatcctttagtcacgtgcttattgaattaggaagttagccgtatgaccagtagattcccgttgccatccagactttctgtctactctgtctggagatattatagttgttaacaggtgtaggggaaaatttttgcattgcctagagaccatacccttccaggttgagtctgattccgtggaagttgtttacaactttataagttatagataaataacaatggaaaataattcttatttatatatacacaaatgaactttatccagcggagtagcaatccttcccctccaccactaccaaggaaaacagtttcacctccgcttgcatatttattttagtattcctgatctgttctttggattgtcctttgaattggttttaacaccttaccaatttccttattaatgagttaaataaaatcatgtattcacttttatatttgtatgagggtcatgattttacctttttttccccaagaatcctttaacacatgaaatgtttgcctcttacatacactttttttctttgcatgaagtagattagtttatgttgtatgcactttaatctctagtggaatcaatgaaatttagcagaaaaaagtgaaaattttagcattaaattcaaagaataacttttgagagaactgtttgactcattatgtcaagggttgaacttttcatttaaacaccctgtagaagaccttgaaggactgagaatttccgctgtggttttgtgtctttctcccccgtaatccttcctattctccttgataaaaattaagaagaaataattgatgggtgctaatctgcaggaacaattcctcctttaaccaacttcccctgaaactagctaaacttgcacagattcttacgtcctatgtttttaaaataaaagcatatgttaatagtgctctggaaatgtgcaaattgaagagttaattctattttccatctatgtattgaacacataatgtgcagtacaagctagttattttataaaatctctcaattggagtttgatgtttcttcacaattagatagaggttatggatttgtgcaggaataccacaaaaagtgatgtggtatgtttctcggtgcttcctattaagaggcacatgatgctgaattgctttcttatgggataactttgttaaggtaaacatttcctcattgtaaggttaatattttcttcttgtaattaataaatattttatggagagataatttgagaatatgtaaatatcctattatgcctcacacacattattttgcttaccagttttagtatcttgcttcttgcttcaattagttataattaggatggctaccaaatgctgattttctaattccttcatttcctctatatttatgagttgcctttctactgtaaggaagaactttcccttctcatttatttatttcactatgaattcatgaattcttgttttaatcaatatgctataatcctttgctatagttatttcaatgctcaaattttctctgttttggccagtgggagcccctacaatctggctcatatccttttggcatgtcctcttgaatctttgagcatgtccacacattttgatacaatgagattttctagcctcaacttgcacttttcctctcccaatcctggaatcagacatttctccaagcaacactgattcttttttttttagacggagtctcatcctgtcgcccaggctggagtggagtggcgcgatctcagctcactacaatctcggcctccagggttcaagagattcttttgcctcagcctcccgagtagctgggactacaggcacatgccaccttgcccggctaatttttgtatttttagtagagacagggtttcaccatgttggcaaggatgccctcgagctcctgacctcaggtgatccacccccatcggccttccatagtgctgggattacaggtgtaagccaccacgcctggccagaacgcttattctttttagggatgacattgagaaaccaatctctgtgttttagatgtgctcattgctactgggctgtcatcacttctgggatctctctcaagacaaagacaggaactatatatatatatatatatacacacacactcacacatacatatataagtgtttatacatacaccacacccacatactatatctaaacatatgtataaaaccatgagtttataatgagtacctctaattctatttcccctcgtttctatatgtgtatgggttgtaccagttttcatcactagcaactgagtagtatagtgaaaacagtttggcaatttcttacaaaactagacctattcttagcctacaatccagcagtcacactccttggtatctatctgaaggaggtgaaaacttatatccacacaagaacctgcacacatgtttatagtagctttattcatagtttcaaaaacttgg

SEQ ID NO: 317695 - DNA, 4001 bp, Homo sapiens
gtggtatccaacagttcccatttactgtatttaatatggtcataataacttcagggtcttagaaatatgacaatcgtattcagattgaggggaaaaaaggccaatttcataagcccgggacgaccagtggatgcaggaaaagcacaacggacactgccttgaccactttctagctgtgcgattcttatgccaacgagcctttacaggcttcctgcctcgtctgtaaaacggggtaaaaacaactacctcatgcactgtttcaataattcactttaaaaacaacaaagtgctatgcaaatgttcttgatattcttagccatctaacatctatgcacgctctacatttatatttccttcgttaactgtggagccgttcctaaagggaagcttttaaagcgataatgaagatgctcagaagagttcaatacaaggttacatgtgaaaggaatgtcagcagcctaagaaaaatcaacctagcatcaggtttcattccaggggtgttgagaacctggaaaaaaataatctttggtgggacactcctaacctatcaccgctgggttcccacgggccagggtcgcacccacggcgagcaccccttcattttacctctcccctcgtctttgctcccagcccacgccctccccagcctcccacctcaggaccgctccgcctgccggccgcggcgcccagcacccggcattcccataaaccccttcgcccggagcttcagaaaacgaaagacaaagccacccgcccaacccggcggccggggcgcgggtccgcggggcgccagagccgggcatgcgcagaggccgcggcgggctgccggcctggaagagcgaggttggggcgagaagccgccgggacccataactgggtcggcggtccgagccccgcctgccagcgcccgcggcctcaagggccgggtaggagcggcagggcgccggcgaaaggcggggcgggggcggcgcgggcggcgggggcgccgcgtacctggtagcggccagtgagcagctggctccgcgacggcgtgcacagcggctgcgtgtagtagttgtccaggagcaccccgccggccgccagcgcgtccaggtgcggcgtgcggatgcgggagccgtggaagccgacgtcgttccagcctaggtcgtctgccagcaagaagaccaggtggggcggccggctggccccggcgcccgagcccggcggcgccaacaacagcagcagcagcagcgggaggacgacggggaggagcagccgccgaggtccggggcctcggggcaagctcgccgcgccgcgcggacccatccttgtccgcccgcggtcccagcgcctgtggcgccaccagccccttgtaccgctgatagaatgaggaactgggctgccggggcctgctccgccccggcgcgggacggcacccccagcgggccgtgggcttgcgaggccgggcgctcggcccccgccgcctccgacccgggcccccggctgctgtggcggaggaggagccagagacgaacccgcgggcgcccgctgcccggcttcttggaaactcagctgacgcttggagggcaccaaggcccgttatcttccccggcaattaaatttgcactgtggtttcctaaaaaaaaaagatgtgttctttaataacgcttcacaatttacaaagcatcttcacagcccgcgtctcctgtaaagcctgcaacaactctgacagttagacattataattagtgccaatttttcataagaaaaaagcttataaatggttaaacctctgactcagatcctgaaccatgatgtctagctagcaagtcatttctagcacaagagcccagcctgtggcaggtgggaggacggtgaaaaggcagaggtctaaatagcctttcacattcatttatgcgtagtgtacacccatgaagccgcttcctccccactagcaaacaggaggccaaacacacagtctgattgcacggtgccctttggaaggtgcggttactttcaagttgccctgggaggatttggagtgttgcgtggtcattgaataaatagctcattcgcttgtccggatatgaccccactcagagctggctcccccactaagcagtgacactaagaagcacacagtatctagttagcctgaaatatctgagtggaaggaaaaaatcctttagtcacgtgcttattgaattaggaagttagccgtatgaccagtagattcccgttgccatccagactttctgtctactctgtctggagatattatagttgttaacaggtgtaggggaaaatttttgcattgcctagagaccatacccttccaggttgagtctgattccgtggaagttgtttacaactttataagttatagataaataacaatggaaaataattcttatttatatatacacaaatgaactttatccagcggagtagcaatccttcccctccaccactaccaaggaaaacagtttcacctccgcttgcatatttattttagtattcctgatctgttctttggattgtcctttgaattggttttaacaccttaccaatttccttattaatgagttaaataaaatcatgtattcacttttatatttgtatgagggtcatgattttacctttttttccccaagaatcctttaacacatgaaatgtttgcctcttacatacactttttttctttgcatgaagtagattagtttatgttgtatgcactttaatctctagtggaatcaatgaaatttagcagaaaaaagtgaaaattttagcattaaattcaaagaataacttttgagagaactgtttgactcattatgtcaagggttgaacttttcatttaaacaccctgtagaagaccttgaaggactgagaatttccgctgtggttttgtgtctttctcccccgtaatccttcctattctccttgataaaaattaagaagaaataattgatgggtgctaatctgcaggaacaattcctcctttaaccaacttcccctgaaactagctaaacttgcacagattcttacgtcctatgtttttaaaataaaagcatatgttaatagtgctctggaaatgtgcaaattgaagagttaattctattttccatctatgtattgaacacataatgtgcagtacaagctagttattttataaaatctctcaattggagtttgatgtttcttcacaattagatagaggttatggatttgtgcaggaataccacaaaaagtgatgtggtatgtttctcggtgcttcctattaagaggcacatgatgctgaattgctttcttatgggataactttgttaaggtaaacatttcctcattgtaaggttaatattttcttcttgtaattaataaatattttatggagagataatttgagaatatgtaaatatcctattatgcctcacacacattattttgcttaccagttttagtatcttgcttcttgcttcaattagttataattaggatggctaccaaatgctgattttctaattccttcatttcctctatatttatgagttgcctttctactgtaaggaagaactttcccttctcatttatttatttcactatgaattcatgaattcttgttttaatcaatatgctataatcctttgctatagttatttcaatgctcaaattttctctgttttggccagtgggagcccctacaatctggctcatatccttttggcatgtcctcttgaatctttgagcatgtccacacattttgatacaatgagattttctagcctcaacttgcacttttcctctcccaatcctggaatcagacatttctccaagcaacactgattcttttttttttagacggagtctcatcctgtcgcccaggctggagtggagtggcgcgatctcagctcactacaatctcggcctccagggttcaagagattcttttgcctcagcctcccgagtagctgggactacaggcacatgccaccttgcccggctaatttttgtatttttagtag

SEQ ID NO: 317696 - DNA, 4001 bp, Homo sapiens
attcctggatctaaacgctgggtgccagatcgaaggaacaaaggacgccatttgatgcccagctccgggacccccgccaaacacctggcctctcaatcctatctcccacagaccctgaagttgggcacgggcaccaaactaggccctccctgagtccttgcctcaatttctcccatccaagaaatagtgagactaagaaacagggagactaaggcttctggttcctgagatcacattagtggctcttgggtggaacttgggagaaagcatgccttggaccccatccaaggagaattagcttcagcactgccaaaggattttctcctaagtggccagagtttgccttccatacccccacctcctgtttccctgctcttttaatcctgtaatcctgctgcctcgcctgtggacatttccttgtggaggaagcagcatgtctacttggggctcccagccaacttgggaggattttgcagatgaaaaaacagaggctcagagaaatgaagtaaccaccctaaggctacacaggtcatggtatcctatgtgtctttctcttccacctatcaattccttggtcttctcccaatgtattcatcaagcagtatggggacctgaatccctcaggagacatagaggctgccatatattgacagccaagcaggttacacacaactcattccaactttgccactccttttcaagatgaaaactgttctttgctccattttatggacaagaaaactgaggcttagagaaattaaatgacttgctcagggtctcggggtccataaatagaagcagcagtaaatgtcagaggctgccatgttcctctaacaaagggatgaccagatgtctccacgttgtgtggaatgtgagtgtcctggaacatcaaagcaagaagacctcaaagatgatgaagcccattcagtgtaaaggaagggtaattgaggcctagagagggcgagggacttactaatgattacacagccaacaggagatttcccagatcccagcatggggtggtactggcaggagaaatctatcaactgggttgatttggggtttagatgcccagccccggggccttgagccacgcctacctgccagtgaggagctggctccgcgaaggcgtgcagatgggctggatgtaataattctccaacttgacccccttggccgccagcctgtccagcgtaggggtctcgatatctgaaccatggtagcccacgtcgtggtagccttggtcgtccgtgaggatgaagatgatgtggggaggctggggcggagcggccgagggctgctcgccagcctccccgggcccgtcggccacgaagctcggcttggcccagtcccaggacaggtagccgaagctgagcaggctgaccagggagaagccagtgagggtgtgcatcgccaagccggcccgcgcgtcccggcgcgccgggctcctggggcctcaccacctcgcgcgcccagggcgcaccaccggcccgccggctcggatgctgcgagggagttcagcgccccccggggacggtccagtgtctggtccgggactggctgccggacggctgggccggatctgctcggccgcagcggggcgctctggggaggtcaggcccgcgccgagctgcctcccgctgcctaagcgcaggccctgcgccgcctttgctccctcttccccagctcagcccggccagcctgagacgcggcgtggcagcttccaaaaagtgctctctaccatcctctgactcccctcttccttcttgccctggatttctcccgcctcctaatttctctctcctctgctttcccggcctctcgccccacccggagtccttaaaacagcccagctccctgcagggaggtgggcaggaccccagaggggaaggggagggaggcacaagttgggcgggtcgaggggacacggcgggagagaattcgaaaaagttgtaacatctgccgggccgggccgagccccaggtggaggggcgggacgcagagcagcggctccacctcccgggcgggaagccccggccctctcggcctgctggctccagcgcccgcccctgaccgggatggggaaaggagggagtggggctgcttggaattcgatggaacagctccagaatggctgggtcagacattcctcgatcatggagtcttagcctctctgagtgccagccctggaaggaaagcccatcatttcctagtccaaccgggtcattctacagatggagaaactgaggcccggagatgagcctcaacgcgtctaagtcacagaacaagtcagtggctatgtctctaaggctcaccgtggctgttggagtggcggctcccttcggtgagccggtagagaaagcgatggagaatggcaagcactttggcaagcccccgcggctgcaagtcaggaagcttggttgtagccttgccagctcccctctcctcaacccctccctcctcctcgttctgcagttcccaactagaatcttagaatgccagcgctggaatccagagggcaggggctgttttatccatctcgtatccacagggtgcagcacacagtataagctcaatcagtatatgttgcatgagtgaatggatgaatgggccccaatggtcacctaggccagcctacccaaggaaacctccacaccagagaaggcaagcttgggggactctggaacccgatgagcatcataaatgagtagagcaagagatagttgtcttgccctaaggagacacaggggctgcagcaagttaaaaaccacagcctggcttccagctgactacagtcaggcaagaatacggaccagtgtttccagatcttctgatttttcaagaggaataccctctttatctattaggagaactattccaattgtgaaatgttagtgactaattgaaagcaaaatttaagcactttgtaggccaaatcagacctctcccaggaatatatcagaccatcggtgccggtttgcaagctctgctctgcatcattgttttgcaaaattttactaggctacatttttaaatggaaaaactgggctaaacaaaaccagttaggcttctttacttctaggatttcaaatgtttaacatgcacactgctgatctgcaggaggggctggttaggctgtatttcccagtgttatgttaccatggaccctctttcctgctccccccaccccccaaccagcttcttgaagggccagtgtttggggactttgggaagcaaagactgcccaggtgcatcttctctcctagcatctttcccctgccaagattctgtcatgatcccttccctcttacttaaaaccactgcgtgtggggaaagaaaccagacctccaaaatagcagcccgtgtgaatctgcattttgaaatgagggctgcgtggggccagccgctcccatttgctcaaagccccatatttagggtgaccagatttatcagaagggaaaactgagcttgttgttctggcagaagacatgttgaggacagacaggaaaaatacagcctcctgaggggaaggctgctaaaatggtgcttccagaggcttccacaaggctgtctgtcctggggggtcgaagtggaacaagtcaccagaggtcaggtggactagggttttgcattctttctattgccccagggcaaaaggaactgggcagggctgcctcccttctactccaagcacaaagagaagcagcaaggggatggggtgggggttccacctggatcaaaaaaggcccagggaggaaaggtcacaggcggcagacctctgtggggctgtcactgagacaagtagtatttcagaattcaagacagtgggctctgctatcagactatttgagttcaaatcctgccactcatttggggtctggccttgcacaagttatttcacctcccttagcctcaatttcttcatctgtaaaatgggataatagtatatataagatctactacaatgctcagtaaagtgcccagcacacagtaagcacttg

SEQ ID NO: 317697 - DNA, 4001 bp, Homo sapiens
tccactggccaaagataggacagtttgaatattaacaagtatgtgaatgcaaaaattttttttattttttattttttaaaaatttttttatttttatttttatttttttttcgagacggactctcgctccgtcgcccaggctggagtgcagtggtgcgatatcaggtcactgcaagctccgcctcccaggttcacgccattctcctgcttcagcctcccgagtagctgggactacaggcgcccgaaaccacgcccggctaatttttttgtatttttagtagagacggggtttcactgtgttagccaggatggtcttgatctcttgacctcgtgatccgcccacctcggcctcccaaagtgctgggattacaggcgtgagccaccgcgcccggccgtgaatgcaaaaaatttaagcacaaatatagaaaaatctatgcattcatactacactaaaaaaaataacaaacctatatatctcagtcatctttggaagtttctgggatgttgtgatccacattcggattcccttttaggaatgaacaattgcctctgctgaagacagctgctttgcccaacaccatgccccattctaggagcagcccacaaccagtggccatccaacatgcaggtggaaaggtctgttctcctcactcctattggaaagcagctctgaagcaccatactagtttgagaactgtcattcataagatggcaacaaaattcagcttctcctctgcacaatcctgcttccttcatttgcctttgattacaagagcactctgtaataaaatgccatctagtcaatttccagtactgcccattctctaagtttaaatcacaaagataactttaagtaatattttcaaaaaatcccatgggcacatccagactatgtaattttaatcatcaggaatctacgagaaaggaaatacaacatatgattacaaacactctttagtgccagatatgcttaacaccaacatctgtgtgaccacagtaacaccgagtgataataaactaatattacaattaataaccaaacaattgtctaagcagcactttttaaaacatggatcatcctaaaagcatcgcgtaaggttgacagtagcacctttggcttgggaaagtttcaaaaactgtttaagtttgggattcagccacattaccaacacacacacatacacacaatttctctggaatacgggggagtgaatcaagttataccaacgattccatttgaatcagcactaacaggattatcacagacctgggtaataaaaataaactttcttcacttctcacccaaacatgaattcctgcaaacttgaggtgaactggaaaatgacttttggaaagctaacacgcttttatggagatgcagaatgttattttaccacacaattaaaccaaacgggggtatggactgaaagttcattagtcgtggtaaaataatttagcgaatcgaggtcagtattaaaaaaaaaagatctgcaaagatgttttcagtgtttcactattgttttacatgtttgcataggtatgtggtgtacgtgtgagtacacggggcctcacataaaatgtatttctttctttgcatcggggtaaaaggtgtttgaaaatgtctcaggttctgctccccaaagcctgcagcacaggcggcggcggtgaggtcgccgatccccagcggggcgcccctcccctgcctcgcggtacttacgaaggagtcgctcacgaccagcaccacattgggcgctttggctgctctccgcctctgctcccctgctccgggggccagtaccgccagcgccaaggctgcgaccaccgacacccacagcagtagcatcgccggtagcggttctgagagcctgccgccgggccagccgcctccctctggcgttctctccctagcagagcagggcagggacagcgaacaactcccaaagcttgcagtttggttgcttgatagtaacgccgagcttcacccgcagaactacaactcctatcaggcggagagcgcgcacatgcgcaacagagaaattcccgcttttacccacgttaagaccttttaatcaaataccgagcaaatcagaacccagccacttccagtcacgtgaatgagtcctgggaaaggcgcatgcgctctcattgcagcctcggcgtttgtagaagaggagcatctgctccaggtgggtttggatttctgtcggttttgcacaagggatcctaaaggcgattgaaatggtacttagagaaagaaaggatcggggccggggctgttcattttgggccgcgcaagcgtggctgagtgttcggcgagagcgtgaactgggcggcgatgaggtggcggcgcggctgtcacttaagttgaatagggcggtgccttgtggggcctctgggtggaccgcctcaggtgcgccgtgaatgccttagacccccccgaataccttcccagggaaatctctagcctgtctcatcttattgcttctcttaccccgtgcagtcaggatttactgtgctcccatggggcgaggagcggggcctagtaagaagtttcaggctgtaggcaggggaaagcatagctgttccttgccttcagagagcaaaggagataagcgaaactggagggggaaatgggctgtgtgacatgttcagttagttgacgtaggttcagaatatcattgttttgctgcagaataaaaaccggtctcttttgactgttgaattcctttggagagttctggaagaagcagatttctgtcccaaagccaaattccaatttctgtatctagtttcgggtatataatttgcacatcacactagtagttttaatattctgacagttaaaagaggagttatactacttacttaagtcaactgaatactaatatctggcaggtttttttttgcctaagataattgtagtaaggaacagatttgtttatttaatactcacatggcacttaggtgctgagcgttatactaagcatttactgagcatctgctgcgtgccacgtacttttatatggaatattttctataatcctcactttcaccatattgcagataggaaaacaggcttagagaggttaaatgactggcctgagtttacacagggagccagtcagagcacgactgaaaattgaagagtctgtgccgtaactcactaaatgctctgtctgcagttagtttatctgttagtgtagcagaattgttactcaagcagcatgataaagatctgcgggagcatgcaaaaacgtaaacagtgttgggcgcggtggctcacgcctgtaatcccagcactttgggaagccgagacgggcggatcaccgaaggttaggggttcgagaccagcctggccagcatggtgaaaccccgtctctacgaaaaatacgcaaaatactgggcgtggtggcgggcgcctgtaatcccagctactagggaggctgaggcaggagaatcacttgaacccaggaggtggaggttgcagtgagctgagatcgcacctttgcactccgcctgggcaacaagagcaaaactccatctcaaaaaaaaaacaaaaacaaaaaaacccctaaacaatagtctcagtttacatgagtttagatttcagggaagcaaaaccaagcatacatgaaataataatacagcacggaaggtaatacaagtgggctctctcataaaaacaaatttgttttgagttaatttggaatgtagaacgtattttctaccatagtgacaatattgactgacatttaaattcataaaagttatatttaattttgtgtctgattccataaactgtgcttactctctacagccttgtttccacaggacatgtactctgatgacaggcttacaagaatacatctttttcttctttctccccttggcagtgtcaataggagcaggtgctgcagtgatttggagcaagacagatattttagagccttagagacgttgtgctggaagaatctaagaggcttctagtcctacttcccatc

SEQ ID NO: 317698 - DNA, 4001 bp, Homo sapiens
tcgacatgtagtttgtcacaaaacattatacataacttgaatggcccaccatgtaccaaaatctcagttaaccttatcctaaataaaacaggagacaagggaaataatcttttaacactccacattcaaatgtatgcaatttagaactactatttccactaatttcttcaatttaaaatatcaataacaatttttaaactctgcaatttgcaagactttaattttaatttctcaatactcaggatttattttttggtcaaagttctgtaacatttcctctggtcactgtttaacctttctgaagcaatgagaaaggattctacttggagtcctaagatgtatttgagtaccacacagggcctatgtccttccatcctgagaagcataaacttgtttttgccactaaagaatagagaccattgtccaataacaaaagttataaatatgactcaaaatgaacctgtgacaaagatttattaaactcacaatggaacaagctgaatggcttagtgtgctcaaaagcatttcaggaactgagcataaacactgaagaaaggatggtaagtttgataggttagacagaaaaatggttaatattggccgggcgcggtggctgacgcctgtgatcccagtactttgggaggccgaggcaggcggatcacaaaatcaggagttccggaccagcctggccaatatggtgaaaccccgtctctactaaacttacaaaaattagctgagcgtggtggcgggcacctgtagtcccagcaactcgggaggctgaggcaggagaattgctttaacccgagaggcagaggttgcagtgagccgagatcgtgccactgcactccagcctgggcgacagagcaagactctgtctcaaaaaaaagaaaagaaaaatggctaatatcctacaaggcactaaaactacaacctttaggagtactgtatttttttctctcccactcagaaataatttgcatctccattaatgaaaaagatgttaactacaaagcctaggccctaatcaatatcatcatgccaaacaaaatatagtcccctagacatctaaatcatcttcaggtgggcctgttaggctccattttgactctgaaaaaaacatgctgtccttttgccttatttccaatacttttgtaatttttaccgccactaaaagtttctataaatcagtcaactattcctttatcattctccggtcctccccgccaattcttgattttataggttttttgggaggtttaaaaaaaaaagaaagacctgttggctctaaatatcaagttattcctcctgatacttaatctgaaacttcaaattaagttggactcagccactggaagccccagtaatttaatactgtttcaaccaaagatttgctatcagtatgtggattttaaacacaaagtagttactacccacttcgagggtgctttgggtactgggccaggtgtgctggtgacaccgtgtgcgcgacggggaccgggtccccgaggagggagtgtcctcgcccttccccgctcgcggcggccagcacaggcctgcagttaccggcggggacccgcttccccggccttttgttcaggactgggctgtttcccgcctacccgcgcgtgcccttcctccctgtcctaggagtggggcaaggaccgtgtgggaagcagagccgggaggagacaaccggcaagggctgtggggaatactcacccctctccgctcggcccctgaccccgcagcccagcccggcgagggcggggcgacggggccagggggaggagagctggggagagggacccagcgccctgcgaggccactgccgcgccggtgaccctacggaactgaatgatgggactgcgggggcctcgagggcggaggaagagccgagccagcgcgccccgaggccaaccagaagtggccgtggcctccttcagtcaggtccgcggcctccttcagtcaggtccgccacggccgagtcggagcgtgcgcactgcgccttcccgcgccgtgggggccgcctagcgcaggccggtgacgtgatcggccgcgcgctctgggcagggcggggctgagacccaggccgggactgggagcgggtggagaggagggaagcgagacctccccgccgcccgcgaccacccccgccaaggccccgcccctcgcctggcgggcagctctcccccgccaacccccacctccaacccaacgcaggcggtgccctccgcggagcacaaaggcggctcgttgacgggggagcgggttactagcatccccctaagaggttggggaaccatgccagcatgcttacgctacaaaaagtcctgtaaacaccacaattaagcacaagcacggctaccccttgaaaacttacggatggagggagaagttaggaattcgaatattgacaatagtaccatctgtggcacatatcccagaggagaaaaaaaaaaaactagcagcaaaattaaattggggcgaaacgatggggataaagactagaaaaaatgtaggagtaacaggggtaatcgaactgaaatagcagacatctgaaagaaaactagcatctgctccttctaacaacagagttaaatttgttggaaatgaaaggagaaaatgcaggcgaagaagtgaaaggaaaacctgccttcaaactacatgacatagttttttgatcttgtactacagttgtgtaagatgtcaccattggaggaaactaggtgataggtacacgggactctaggtgctgtagtatttttgcaatttcctgtgtctataattatttccaaataataagtgtttttaaaaggagagaatactgatcagtggcgaccagggcaaagggctggaggaagggggtgactgaaaaggagcttgagagcttctataccgtgattgtgttggtgactaaaccactgtttgacaaaacccataagaggtataaattttactgcatgtgaaatagtttaaaactcaaaatgatgcgactaataaaaatgaacttacactaacattttttagcaactatggatataaattaattggtagctgccaatttagattatccatttaatttttttaaaagcacaaggcagtgtgttctgaatgagagcttaagtagaccaggtgtctccatcaactttaagtatttaccttaaaaacgtatttcacagatgaaaacaagaatgcggctgggcgcagtggctcacgcctgtaatcccagcactttgggagcccgaggtaggaggatcgctttagcccaggagttcaagaccagctatgggcaaggcagtgagacctcatctctacaaaaatttttcaaaataacaataaatttttaaaaaaagaatgcattgctttacattgtactccatattttagaaacacagtgcaccaaccaccatgttaatttaaaaaaaattttttttgcactggaggtgttttaaagtttcataattcacatgccaaaaacaaagaaactaaaagaaataactcagttaacctccatgtacttcctctcatcatatccctcatggcaaagaatgatattggcctgtttatgtgtttaccctacaacactataaactgctttaaggctacggtctgtcatcatagcatttcaaggttcaagcagggctcctgtagctctcctctctgatcgctgaggttcaccgaaaaatctactcacaaaggacagagtaattggaggaaatgcatgcaagtttatttagcatatatacatgagaaccttcagaatgaagacccaaagatacaggggaaattgtaatgttcatttgtacatccaacaaagtatggacagccatgtagaaatatgattggacaaaagggtatgctctaatgctaatagcctgagtggggaaacccagcaaggcctgtctgtctagattcttcttggactctctgggcatgcattccttccttctgggtgtagggcgggaccctctctgcaatgagggtcttaggacctacagtca

SEQ ID NO: 317699 - DNA, 4001 bp, Homo sapiens
ggagaggcaaactcaaatgctaacaagagccagaaaataaaaatctcatccttaaatgacagttcaatttgcaaaaaaatactgtccagaccaagaaaatatgccctcgggcaatatttagattgtaagccattttttttagcttttgttttgcacagctatcatcagagtcaagtaacaagttttgactaagactgttagaccttaaaacgaatctccgaacgtccgctcttgcctatagtaaattggaagaaaaaatgcaacaaaacactgtaaaacctgcggaattcttttgaagaaagattccagtggctatccatggaaatacttatagtgcatcaggtggaaatgggagtctgatttaaagtgggaaggggggcagtcttgggagagaattatcctccacagtagcagaagttgaagaaaaagcaatgagaccaatgtcttttttttttttttttttgaggcggagtttcgctcttgttgtccaggctggagtgcaatggcgagacctccgcccactgccacctccgcctcgcgggttcaagcgattctcctgcctcagcctcccgagtagctgggattacaggcgcgcgccaccacacccatctaacttttatatttttagtagagatggagtcttaccatgttggccaggctggtctcgaactcttgacctcaggtgatccacccgcctcagcctaccaaagtgctgggattacaggagtgagccaccgcgcccggccagagaccactgtcatcttaagacagaacggggaaaacgtctaaggacgaaatcagcctctctgaatcgaggatgcttatatgctgcttttcccataggcaactctaactctaaacagagtgctttagaacacgtaattttagcaatctcttttacaaagggaaacattctcaagcaataaagggttgaggatagctgactcaagcaatgaaataactcacaaaggttccaaaatgtgtttcttaaaaaggtaacatctatgcctttagctttcccttagcagtcttcattctgcataagaatttggtttttggtttaaggagtgaattcacaaccaactgggagggggaaaaaagcaaaagcgagttaagttggaaggcatgaattctaatccaggctttgccaatgaccacccctaccaccataaaacattactcaaataattagctcctgtgttaagtacctggaattaccgagacccccctccccccgccccactcagctccctccctccttcaaagagctcgcagtctggccaactcaaaaaaatacagtataaaaataagtgtggcagccaagtatcaggccctacaccgatagacagagatggtattttaacactcaacttaaaggccttaaaaatcaaaaagtacacttcttttcttctgatgactggtcaaaatgcaggtctaggacaggcgctcctctaaattttgcttctttactggccgccacccctactcggatgcaatctgaacctcccgcctctctgcccggaaataaattcagttactttttttcttggtgtcgccagcaggttcctctgttcccggggaaactgcagcggaagacgggggctccggggtggttgtttctggggagacatccgtaagtccttcccctccagcagcaattgaagtaggaagctgcaacacagactgcggctcctccgccatcttgcttggagacactcgagagcggaagtagcgactgagcgcgtgcagtgggcgtgcttttctccagggagcgtcgcaaaggaggcgccggagtagggggacgcaattacacagtgaaacttggtgttcccggctagtcattcaaatcgaagctgtcgcagacctctgaacgttagtaacgcaacatgtgtttctccgcgactacagacctcgggagaggagcggtgggcaacgtgtctgtgctcggtcgaatgcgcacactccagttaggccgctggctcggacctagaaatgtttccgctttccttagtgcctgccccgcccaggccccgccccttgggccccgcccgacggctcgggagcgcgcgcggtcgcgtgcgggagggggcgggtggggaaggatcgcaggcgagattacgaggcgaggctcgcgcgcccgcccccgccctggcccccagtgcccacccggtcggcccggcacagccatgatcaaggcgatcctaatcttcaacaaccacgggaagccgcggctctccaagttctaccagccctacgtgagtatccagccgccgctgatccgggcgagggggagtcgttggcgacgggcagcgcccagcgcggctttctcagagcgaccccctccggcgcgctgcggcccttgtcccgtcccggccgcctggcgctcgccagctgtcagcctcctggtgggtgtggacagggtgcccacctccctgccgcgcggtcagccaccgacgtggctttgcccgggcggttcctccgcccgtcggtgggctgcatgctttcctggctgcgcgggcgaggccctggagacttcccggggcccggccctcgccgatcgggcagccgcagcccagccgcgccgcggagccctgcgcccagtccccaagagcccaccccgcgcggctgccttcctgccgcccgcggctgcagttagcccgggaggaggaagacggcgtggaactcgttcttctcgcccccctccgccgactcccatcctttccaggtggacttctttctgttctttggacagatgggctaccgtttttcactgtggtcctctcatagcacaggaactttggcttcctgcgtttgataactgcacgttctgtacagtctctcttctgcatgtttcgatacgtgacagactgcccagtgtgactttcaggtgtctccttattgaaaaggaagatatgtgaggacctaatatttttatcaggctttttaccagctggctgcaaattatttaccctcgaagtaaccggcgacgtttgtagttgactgattggagctgtggttctatacctaaaagttatgatttcagcttctggtttggcatttttccacgtatgggaatttgccctcatttatagtttttttctatttatgaagaatagtagcatttgtagaacttctcttttaacgtgtaaatactgtttagtatggacaagtgcaggaggcattaaggtagtagagataagtgatttgttgatgatcgaggaagggttttatagagttatgtgcttacctgagggcagaattcgctagctgaaacacataaaattggactcccagtggtaggattaatgtgaggtataactgttgtgtggtattgtggcactttgcttatagcaagaaatgagctttcaattcaattttgaaattgtgccaaggctaacacttttatgcagataagtcccagatggaaatcaatcttgccattacaaagtaaatgtgaaaatgtcagtttgcctaaaatgataatgcagtctggaggtgttagttgaagtgagaaatcttgagcttattcttcatttttttcagttgttttgcttttgctagctataaagaatattttctgctactcgtgtgtggttttaatttagtataacttcaatactaatggtctgtttaaaaattctacatcattctttaatccagattaaattctagttgatcctcccgaatgggaaaaaatgccattaactttacctgtttgttaaaatatagtaccagcctttattgaaggagtctttgtcataaccattttgccagtgtcatccatttgcagtgtaaaaaaggtatgttgcaatagtaaaacaattcaaaaaattatttttccatatctaaacttaagcaatattaaaaatagtgggtttcctggctaatccatgtaatcggtgtatactactcgtatagtgtataatttaactatctattgaaaaatgcatttaatttagaaactcagaaatctgtctttcccttgtccaaaagtgggaaca

SEQ ID NO: 317700 - DNA, 4001 bp, Homo sapiens
tttttgtagagccagggtttcatcatgttgccaaagttggtctcaagctcctgcattaaagtgatctgcccgcctgggcctcccaaagtgctgggattacaggcgtgagccaccatgcccggcctcacctgcctatagctctagcccacctgtcctacgtctacacaggagctaccatttcttggggactagatatatcagtggctgtgtgacatattttactggcatttttccagttaatactaacaacagtcctgtgaggtcaaagtttttgtccctatcttacagatgaggaaatcaaggcagtgagataaagcaacttgcctgaggtcacccagttggcaagctggggcacagattttcagaggtttctgggattccaaaccctgtgctctcgggcatttgtctgagaaaactctcaggtaacacactcttccccttccagtatgtgtatatagatatatttttttcttccctttccagttttgaggaaatcccttgactaacaccctctttccttcagctgttatcttgtggtacatggtgccaagtgccctcctcattcccatcatctgctccagagggttttttgtcaaaatccccagaagatacagaatacagtgatgatcaagctagccttttcctcattgccaccccccacaaaaaatcctggtggccttcactccccaagccccagggcaattaatactgtcttctaccattgccacaggctgacttgcccaactggtagggctgattctatcagattccttatccatactttgttgttggaggatttgtctcaaggcacctggcaagacccacaggaaatgacacctgagatgtcagtggctctgcccaggaggcctcaggctcacctgccagctccctaaagacaggatgcaaagacacatggcaactgtgggatacctctgggtatccacctggcccagagccatgaattaggcaccctgaagaaaatgctaaacaccacatgaccctaaccaagatgcaactgagatcagagcatcttcccaagccggtgtgactgcttttgcctggcacctcccatgtggtcaggcctggagagatggggagcctaaggataaggagctgaatcctggctctgccaacttcaacacgacctggaataagttactgggctttttatatttttatctgccaaaggcctcaattctttatataaaaaacgaggccacgagcaacaatatatgtgataagactgagtgatctgcaaaggcaggctaagactgacttcccagacacagccactgagcaactggtgactgtgcgggggggttcctgaacctctctggggctcatgggttcaggctgagaaagtgtctccattcagtgtcgcccagagttgatctgaaaagtaggccagagtgggcagggaaattaagaaaagcatgaacctctgaaaacctgcccggtccgtgaggaaataaccgggtccactcccttgtccagagcctccccaccgccctccttcaggccagctccgcgggcagggcagccaggaggaaggctcagggactaggcgtctcagttcccgctggccaccaactcccccatcccctgccccctctctggttctgtttctctgtgtacgcagggaaggtgtgggcttgtcgcccctggaggccttccagctccgacgttttgaagcctggctcccagattaaactcccttcggatcccattttctgaagggtcgcaaaagctgggggctgggtggggtaagctaggggacaacagcggctccggccgccgcctgagcccttcaagatcagcatccggtcaagcggctgtgcagccgagaagcaacccgggactgcaagtctgcgtggcggggacggcgcaaccactcaccggcatgactgaggcagcggcggtgtggcggcggtgtggcggcggtgtcagcagcgcctctctggattcggagggcgggttcggctgcgcttccgagagtgcgcactagaggcctggtcccggaggcccctcccactccgggcccggccgcgagggaggctccgccccctccagtcctgatccctgccggccgcgccgcctcctttctgcgggccgggcccgtggtcacccggcctggacggagagaggaggtgagaggggcgctgcgttggcctccatcgactgtcggcctttttcagaacgcctacttcgggtcaagcttgtgttagggaatgccagagaagggcaccgccttgaacaggacatcatccatccatccctaaaaggacagtttcactcatttattcaccgagtcaatttttattaagcgccagccaacgaggacgcagcggtggaagagcagcagcaggaggctgcgaaggacgcaggcagtgatagtgcagggttagcagagctgttgtgacagaggaggaagggccctgactgcagtggggtgggggcggttgtggaagagaggcggcctggggagaaggcaataatctggacctcggttagcctttatcgccctgttacaggctttgtctctaaatacagtcgcattgggggttagggtatcaacataggaatttgcggggacacaattcatgtccatgtcagagttcagtccctagcagagccatactgactagagttttaatctcagccctatcatttattagccatgtgaccctgggcagatgaacttacctctctaagcctcaatatcctcacgtataagatggggacagttaaggtcactatacaattttttatctgaaccttttgctagagaaaggagatgctattaataattttgccaggacaacaggcaaacaccatgactgtttcaggcaaacaacgacacatggttccctccaagaaacctactttgcagtattgttggaatacatgtaatgtgtgcaaacttcttaatacattgcttggcacatggtaggcaccaaaaatatatataagtattctctaattgctaggccctctgttggcctccctggcactgggtcttccgctgctcacaaaataccccttaaccattcatcccctacccaacctgccaggaattccctaaagatggaagggaagggggcgaggaggagagggaaagagggtactggcacattaggtcctgtacgggcaaggcttagcatcttggtagtcctgggtacaactgtgccctggggctagggatagctagattgccatgagggaaggcggagagtggacatgagggaaggaaatccttcccaaagcaacagtacacagggcgaaccacccacggcatgttttagagaattaggggtatgggttggggggatggctaagcctagagacagcaatttaaagagaagacagctttataaagatctgttaaagatcacaaataaagacctattaaagaggagaagaaaatatgccagactgtagttcctgcataaatatatacatacattccgtgtatttacattaaaataagcatgaaatgaaccacagccaatgttactagaagttatcttggataagtgtaggatttgcaggtggaatcccaatgtacctactgtttaattttcaaataacacaaagtagcgtacagtgaaaagtaggtcttcctcctaccctgacctctccttcttaaacaaaaggcatagtatacacagttttgcatcctgcttttctcactttataaaatatcttagagattattcctgggccagatgcagtggctcatacctgtaatcgcattgctttgagaggcctaagtgggaggatcacttgagcccaggagtttgagaccagactaagaaacatggtgaaaccctggctctacaaaaaatacaaaaattagccgggtgtggtggcatatgcctgtggtcccagctactcaggagactgaggtgggagcatcacttgagctcaggaggtcaaggctgcattgagccataagtacaccactgcactccagcctgggtgacagaatatgaccctgtatt

SEQ ID NO: 317701 - DNA, 4001 bp, Homo sapiens
ctggccaacatggtgaaactccgtctctactaaaaaacaaaaaacaaaaaacaaaacaaaaattagccaggcatggtggtgcatgcctgtaatcctagctacttgggaggctgagatgggagaattgcttgaatccaggaggcagaggttgcattgagctgagattgcgccactgcacgccagcctgggtgacagagcaagactccatctcaaaacaaaacaaaataaacaagaagaagcaacactggattgagagctctgagccttggactctggtgtccttttctctcagtaattcagacttcatttctctaggtcctagttttatcatctgtaaactaggcagctagactaagttccattccattcctcagagctccgttcctttgaaaggcagcctccttcactggacttatcagtatcacatgcttcaaaagataaggctcatcgtttagcacgagaggagtatgatttaactgtaaaaagtcagcatgtgggtttcaaccttcagtttctcaagagcctattaatccacccatatgtgatgttatactgctatactctttaaaaaatacatgatgaaaacctgaggagagatcctgaacccttaaatccatataattaggctgtaagaaatgaattttccaagaattttttaaaaagtcatcaatggatgaaatgacaaactcagtgggtgttattaagagtaattatagtaacatctagacagaaaacaacatctgtgatctgcctgattaatggcttaatgtaactgtatgtctgttaatggaataatactccaagcagtcttgactgtacatttgcaagatctggaaacagagaagaaactgtggaagaaggaagtagcagagtgccagattggctttgggaggtcaagctcctctctacagttttcaaattctcctctgcctacctggcaaattcagagaaaattgcctggcaaattcagagaaaaaccaagttccaccagacacaggcatgcactcctgtaggcaaaataactagcagctcagtataatttttatttttaacattacttttcaccttagggttagggatagtgtcactccagccttaatagcaggccacaggactgtcctaaatgtattcatcacagacctgcatgcatggggcttttttattttttttctggaaggagtaactcatacttagggaaaaaacacatttttctttaagcaacagttttctcctttgaactcaaaggaaagtcaagcttcccacctatagttgaaaactactgcaatatggcagcttcagagtttatcaagatgaaattgggaagccatgtaatgatctcattctcttcctcaaagctatagtttctttctgctttgagaagaaggctgtaactccatctgcttcctcaggctgcactggatgaatgcaggatagcaggatatattatttatcataaaatgtattcaggcacattcagactgcaagccctgttgagtgaggaagtagcatttgccatcagcttatcataatgaaatcaattgacgaaaaataaaacattctgttagaaaagaaatgtggatctcgcacccagaaagccaaatgaaatttcaaatgcagtgtaaagaaaagtagtcatatcctgggcctaattcagaacttagacttgatgattctaagaggcaattactcccccattatataggttaaggccaggatgcttttacttaccccagcaaagctgacgtccctattgagcagactccagtagaagaaaacagtgcttgaaagtggcggtatttctctcgcacaccttggctaaaatagttctctttcctatggaatttttcatttttctgattatatctgattatgtcaaggcaaggcctcaagctaacactccctcagaaacttagagaagatgacacactgaaaagaaataactgtgaccaatgaaagaaaaaggaaaaataagctgcctcgctaggcccaagagtgaaagagaagaatagcaagtctgtgaatgtgaggccgagtcccagaacagtgaaggcagtgttcttcgacttggctgaacatttacattgttagacatggttcttgcataaatttctacttcctgtgaatcaatgagccagcaatatcaaaattcatggtgatttttattctctacgcatggtacaaaatgactttgtccatctacctttggtaatgcatgtaattaagtgtgagacaattataaccttgcagttctctttggggggcctgaaatatgattcagctgctgggtttcaagggcacttaagaaagaaaagactctctacagtgacttttatatgcatgctgatgatgaatttgccctcaaagcttcagaagtctcattttgcagtagtcatagtttttattgattactgtttgattatacaaaataaggaaagtgggaccaatatattatagtggcagattatgtgaatggtgcaaacttacagaaaatcagaattagtaatgggcttattgatagcttcgattcataccctaaaatgagattttcatgtataatccttttattaagttacctacaactcaactaattggcataaatgtcatgagcaagttgctgtattgatggataattattgatgggtccataaataaaagagaaggtagaatgagcagtaagttgattttaagggtagtaaaaaaaagaaatattaccaaacttaggaataaaaggtgttggaaagaagtgaacatactaacttcatgaaaatctttacataagattttggttggttggtagagtaattgtgaactttgtatgtacctacagatcttatcagaataccaagaagaaacatggacataggaaacattttacaagagaagaaacacccacaccatctaaaatctgcatcgctgtgtgtgtaagacacaagctaggaatttttaagaacatgaaatttgcctatgctttagacagtctagaatttttaaaagagcgagttggcatttcaaaattctccatctgctaaagagaagaatgcttaagtccctgttcctttacttcccttcactcagagtgctctggcttctagggacgagtgtggtctagaatcacagatacggttaaattgcagaatattgcactagtgggtaactggaggttatttagtgaagcccccttgtgccatggaggagaatgctgaagctcagagaagtgaatacaattgctcaaagccaaacaggaatttggtggtgaacatgggacctcaaaccacattgtctttctcctaagactagtatattttccatcactggtctttctcctaagaccagctctttcccattatcactttcctggtaaagagagaggcacatgcaatttaggaacaaatgtgtctgtagcatcccttgggttttcatgctaaccaatgaatagagagtcctcaaatatgttcattttccaaactgcctggaaatcgtaaatactaacagacatatggcaaattatttataaaatgtgttgaaattaagtgacactgtctggctaattagaaccctaataaacaaataatagataagaaatgctatgttcagtttttattagagggactatctttcttttgtttggctgctggaattttgtaataaatcatattttaaaaatcacactcacagagttttacttatagttcctatttccagcaggcaatctttctacactaaggcaatttagcatttttgtatgtatttgcatttcttattgaccacatcatgcttttcattcctgatttttacacagtgtgtcatgtctagcttttgtattcttgctgcccaaactagtcaattaaagaagcaatggtagacagaggcttttgctcccatccccgacaccagtaccacacaaccaggatggatttcataatcttaagactatcttctacaagctgtgcaagtgttattagtggtaatttttattttttattatactttaaagttctggg

SEQ ID NO: 317702 - DNA, 4001 bp, Homo sapiens
ttttagattccacatataagtgtaaacatgcagtatttgtgaatctgaagaaatacacataactcactgatgtcacttcataaacacagatttcaaatgggctctcagaactgctcaaaaaacctattttcttgtcaatgcattttcctaccattctagattaggaggcagtataagaggggtcaaatacaagattctaaaaccagattacctgggttaaaatcttacttctaccacttactaaatacgtgatcttggggaagttaaactcaccaaagcctcagtttttgtatatctatccctcagtaaaattatcgttatctgtccctcagtaaaattccttatgagaataaaatgagttaataaatataagccaaaaatagaatctggcacatagtaaatactatctaatgcttatattgttatcattgatgatgatttcacatcttaccttctctcctcaaacctttttctcccactctttctcttcactgatggccttgctttttatttcattgaaaaaattgaaaaagtaagtcaaaagtgaagaagttccacaacttcctatcatcaaatcttccaatttacttgcagctgtacctgtcactctactaccatacataaactgttattgttcctacagttaactcctccacttgggtacccttctagtctacttaaggagttgctcctgcaattatcccttctctgctgaataacccatttttaattttctcaacctgatcagcatacaaaaatgtcataaaagttgccatcttaaaaataaaaccctccaactccacattcccctccaaatagggtgccatttctctgcacataaaaaatgtctttcaaaaattgtctatagttgctgtctagacttccttccctcccatattctcttcactccgatcccatcgcctttcactttcagtactccatggagtccccatttgacaaagtgaccagtaatctccacattttcaagtccaaaaggcaattctcagtcctcatcttatctcttttcacactttctcactcccttcttcacttggctttgaacagagtgtaacattggccactctttcttcatctgttttgcttcacctgccttctcttctgtaccactaaactttggtgtgctcaggactctaatctctgttctacctacagtcatcacctaagctatctcaactagagccacagttttaatactatttattcattgattactcctcagcttcttatcatatatccaactgtccacttcacatccctggatgtttgacagttcaaacttaacacatccaaaccagaactcttcatttcctcctttgaaatttgctcctctcctcgtatttcccactttggaactcacccaactcacaactcacaactctacaactcacccaagtgctgaggtcaaaaatcatagtgctgtaattaactcctctctcacatcctacagtcctgagcaaattctgttcattctaccaccaaacagtgtatctgacccaaccactttttactgtctccactgagggtccaagctatcaccatctctcatctgaactattgcaataccttcccaagtggcctcccagattcatgtctttttctcctctcaacagccagagtaaccccataaaaatataaatcttattttgctacctactcccaagctcaaaactttacaatggctttaaatcaccagaagagtagaaaaaggctttaccatggcctacaggctccacatgttcctgtgtaactctcagaccccatctaatgccacactactcctcagtcactatgctccccttcttcactgatctttcagttcttagaaagcactagcccattctacatctgcacagagatgtcaccttaaactaccctatccagagtagccacccccatccccaagtcactatcacccatccagctatattttctctatagctctacagtatgtaaaaatcatctatttaattatttaatttacatctatctaactggtctgtcctctcacatttagaatataaactgtatcagagcagaaaccttcaccctcttaatttaaccgccatattcccggtacctacaacagcgtctggcacatagaaggcatttttaaacatccttgctgagtgaaccaatatcccagaaacctctcacagctagttcatcttacaggagaaacagtattaaagagttaattaaatggccaggcgcggtggctcacgcctgtaatcccagcacattgggaggccgaggcgggcggatcactcgaggtcaggagatcgacaccagcctggccaacatggtgaaaccccctctctactgaaaatacaaacatcagccaggcgtgatggtggaagcctgtaatcccagctactcaggaggctgaggtgggacaatcgcttgaacccgggaggcggaggttgtagtgagccaagatcgcaccactgcacaacagcctagaagacagagtgagaccctgtctcagaaaaaaataaaaataaaaataaataaatctataagtaaatgactcgccagtcaaaataaacggcaactttagggttaaaggcccaatctggctccaaagcttggggttttagttactacactacattgcttcactatattttacaatttactagctgcttataagtatgaattaaggctcagaagtctaattttccagactactcggaggactctcgccccactccactccacaaagattcagctcagcgactccttcctactctgacctagccccgcgtcccgctctcagtggcttgggcaagagcgcctgcgcggtgagcgggtcccataaaacgcattctgggattggtagtccatgttcctccggtctccagcattcaaaagaaaaagggggaaaaaaaaccatgcaaattagatatctctgaatttcttgcaaattaaataagacgcagattctggctcaggaaagtgatgcaaacgcgtcgttttcaaaggagagaccccagcctcgggtcaggcgcggcgcagacagcggcgcggggtccttggctgggcggggcttgctcgcggtggcttgtggctccttcctgcggtgcttctctctttcgctcaggcccgtggcgccgacaggatgggtgagctgttgtggccggtttaagggcgctgcaagcgggacttggggtcttggggacgggcgggcggatgcgaatagagtagggcgggggatgccatggagaggctccatgggggagggccggggaagcgccgctccaggaggcacgtggtccggcgcggaaggggcccatgaggcgtggaggccgccgaggtcggggtaccgagggacgcagggaggccagcgcttcctcccgggcattcgagcggggcctcgtccttcgggagaacacattctccggagccctcttcgaacgtttattagtcggttcagggcaacttgaaggccaaatgtttggcccacaggccaataaatagtacgagagccaatcggcttaagggtttattccaggtgaggcgagtgtcttagaagatgggaaacacgtagatggcgtgtttttacggaagaactaaaatatttaatttttaggcaagtgtcgtggacttcgtactgctaggaagctccgtagtcaccgacgagaccagaagtggcatgataaacagtataagaaagctcatttgggcacagccctaaaggccaacccttttggaggtgcttctcatgcaaaaggaatcgtgctggaaaaagtgtaagtccattgctcccgtcaagttttagtttattataggaattcgagacatgaacttacgaattcttgttttgaaagtaattgcaggtttttgtgtagtagtattcatttgggcattgtggggtaaaattgcaaagcgtttgttctatttaaaagttggtaaaattagtttttgggaattaggtagttaaggttttaatttaacgttggcctggaaggaattggagaaga

SEQ ID NO: 317703 - DNA, 4001 bp, Homo sapiens
agggctaagtggaaacaggatgggtttcattaccctggataatggcaatgacatcccaaggaaggggagagaatggtctttaagaaaggaattgtcagtgctattagtacattaataaatgcttctttgagtacaaaggccataaaggcagacagtagggtaatgaaacagttgaagatataaacacaacaaagaagcactttgttgttcgctaactccagtaggaaaaacaagtctaattaactttggtaaatacaattgctttaataatgccagaattctgactctgtccatcaacctctataggtaggagagatgaccccatataactggtgttaccagggaggaggaacttgatacttaaaaatgataaaaattcatctaccatgtatcttttaaaaaaaaataattttagactaataaagcaaatgtatcccagggagcaaaaggggttcaggtcacaaaatattagggaagtagtaaaaatctttttctttcttttttttttttttttttgagacggagtctcgctctgtcgcccaggctggagtgcagtggcgcgatctcggctcactgcaagctctgcctcctgggttcacgccattctcctgcctcagcctcccgagtagctgggattacaggcgcccgccaccacgcccggctaattttttgtgtttttagtagagacgggtttcaccgtgttagccaggatggtctcgatctcctgacctcgtgatccgcccgccttggcctcccaaagtgctgggattacaggcgtgagccacggcacctggccaaaaatctttttcttttaataaagacaatagaactattcactcaacaggtatttattgggtgcctcctgtgcatacaaggtactatgaaaaccaggcactatgaagccaccaattaggttcaagaataaagcaagagatggtgtttctgacaaactgacttcagtcgaagtttcacctctcatcatcttgaactgagaaaaaaatgactgagaagcaaaagaggaaccaggaagagggtgttccaaggctcctttgaagattaagcctctattttatactacagttaaaaagtttaattccaaaagagacaaagctctaaccaacaaagaagtctggaaaaacaaaatctttcttagccaatcattctaagcacttcttacactcacatacaagagccggagcgccctccaaaaggcatgacgcaggggtttctcaacaatacctcctgctctttggtaattaatctcgctttagatcaggccccaaccgcctcctggcgcccactagatgcaaggcctgggctcaatgttgtcgaaggagcttgttctgtacgcaaccgcgacagcatgggaggcagagaagccaatttctgttttatttatttgatccttaagttcaggcaaacgaggcctcatgtgggtggaaggcagggctaaagggggacagtcgactagggacaaaccccagtttctcccagattcggcctgctcatttccgactgcacctccccacacaggactatgatgagaaaaaattcccctgaaactcgtttccaaggggggtccaccaaaggtcaccctccactcgctcaggccggaggacactgaagctgctgcgaaaaggaacacaaggagttccgccgggtcgggggcctgactctgcagcgcggggggcgcccatgcaacgttctctgacccgtgtgggggtcgtgcctttccccgccccggcctgctagctcctcaccgcccgttcctcccaaggcgggcctcacgcacttacccccggttaggacccttagggatgaaccaaggcaccaagaagccgacgaagccccagaacacgctcatcacaatgagaggcacagtgaggccgtgatacgccatggtcgccgcctgagcgccaacccctaccccgtcgcctcactcggatcccaccaggaagtgtcaatagctgaccgcgtgaccagcgtgtgcaagccccgcctcccgcgcccccacgtgacccgcgcgccggcctccgcccctcggggagcccagaggcagagccccgccttcgcctggctgtctcctggctgcagctccttggaggcatgtcgctcaccccagagctagggattcggtcacccggggctcagcaaagtgttctgatgagaacttggcccttttagacaaagagtgtagttatctacagcctcatctacttatgcaacagacatagagaacttaacaatagttgtcccttactattctgaattcccgtgtgcctggcactgggccatgatctttaagttcatgagccccaggccgggtgcggtggctcacgcctgtaatcccagcactttggcaggctgaggcaggcggatcacttgaggtcaggagttcgagaccagcctggccaacatggtgtaaccctgtctctactaaaaatacaaaaattagctgggtgtggtggtgcgcgcctgtggtcccagctactcaggaggctgaggcaggagaatcaattgaactcgggaggtggaggttgcagtgagccgagattgcgccactgcactccagcctgggcaacagaacaacactctgtctcaaaagaaaaaaaaaaaagtgcatgagcccgtgttgaactcctcacttcagcctatgaggtaattgtaattattatccccactttgcagttgaagaaactgaggcccagggaagaggataaggatcttgcccaaagtcacatagtaagtggcagggccaggattcaacccctgattatctgattttcaaggccagagctcttaactagcgcaccactatttatcttgtgtgctgtgccaggctctggagttacagaagtcaatcaggcacccctgagggagttcacattctggggagcagatgaccttgcaaacaggcgactcaatgcagtgtgaaagtaagtggacgaccctgcaaggctttctacccaactcgtccttgctgagccttgaaagacaagtagaaattagccagaatggtaagaagaaaaacaggccaggcatggtggctcacacctgtaatcccagcactttgggaggccgaggcgggcagatcacctgaggtcagtagttcaagactagcctgggcaacatggtgaaatcccatctctactaaaaatacaaaaattggccaggtatgcacctgtagtcccagccactcaggaggctgaggaacaagaaccgcttgaatccctgggaggcagaggttataatgagctgagatcgcaccactgcactccagccttggcgacagagtgaaactctgcctcaaaaaaaaaaaaaaaaagaaagaaagaaaaagaaaggtaaaacagttttgtttgtttgtttgttttttgagacagggccttgctctgtcacccaggctggagtgcagtggtgctccatagctcactgctgcctggaactcccgggctcaagccatccttctgcctcagcctcctgaggagctgggactacaggtgtgcaccaccacaccagctaatttttaaaatgttttgtagagacagagcctcgctatgttgccccggtgggtcttaaactcctggcctgaagggatcctccacctcagcctcccaaagtgccgggattactggcataagccaccgtgctgagctgataaacagggcttagaacgcttgctgagaattttcacatatgttagttatagtatgcgccaagcttggaatagacaaggaagccagttctcagagaggttgaggagcttgatgataaagcttacaggtgaaagcaagatagaaagcaggtctttaaatgcaatgtgctttaccagggaccatggtttccttgcagtagccacattgcattaactcctgatttctttcatcaagtagaatggattcctgtattaaacgggaaactggaccaataatcttcaacatctgtaccaacttttcggacatgattctaagcctttaacctgatcagcaatgtagaaaact

SEQ ID NO: 317704 - DNA, 4001 bp, Homo sapiens
gaacctctacagattctcccttgccctctgggctttttctggggacagggtagagactggagagatggatatggggtgatatcccaccttcatgaaaagaagcagtgactattatccaggggaacggcgtggactgggtactccgagcacgtccacacgctaattccctcggccctgctcccctctcctatgaggaccacatccccatgggcatcatcctgtgctctaagagcacaaaccgcagagcaactggattgaacccagagtcccaattcctcaggacagtggacaccgagaacaattgttcctggtgccaccaggtggcaaaccagatttgcagtcccagtggctcccaggcccaggccaccctggctctgaggggcagtccagaagaggctttgtctccctcatcaatcactgcccaagactagtaaaaggcggattcaaacccaggcaggctggctccagagcctacactagatagctacactagcctgcatcagttgcgtggatctttgcaccaaccctgtgtcaaaagcacagaattgacatcagtaaatttctctggaaacagctatggaaaaggatcaggaaatagaaatgctcctctgttacctttcctttcttgtctcatacagaccttcgtactacgaggtttgaatcctcagctgctctggttacaggacctcaaaactgcaaaggtaacgggaagacaactggcacctcctgttgtgctaggcagtgccatgctctttacatgtgtgcggtcctttaatcctcacacagccctgcagagccaatactgtcataactggctcagtgacggaaaggctgcggtcggacagatgcaggggtctctgctcacataattacggaggactcctgcccaggtcgaacgctagtccacgctttctattatattcctgttttcccctttcaacaccaagtctgaaaaatccccaaaagtacaagttgtggccactaaattccagaatcttatggcacctgacggacttaagaaacatgaaggaaatgaggtgtcattcacgaggaggagatccagtcatgtgttctgtgagaagacttacagggacacatctcaagtgccccacgaatggaggcagtcaaatcgctttccccattctgctttagtgagaaacaaaattagctaaggtgtgggccaagctcgcatctttcacgtagggccaatacagctgcacaggaaatggactaatgcgtgtataaggagtgtctagtacgtgccaggcagtgaccagccaggcagagcacggagcttctgtctggtgggttctgctggtggcctgcgaaggatggggggaagtgttaaggaggaagggtagggtctgaggctatatggatgtgatgaggaaggcagagaccagagaaacggaatacacgtcctcagggatcagagacaaattgagaaacacaaatccatggtgagaggtcagcggagtcagagacccgcatgcagatagagggaggctggtggagaaacacagacacaacgaaacacataacgagagagactagcaaagaggggatcagaaactcacaaagggaagtcaatggagaaatacggacccacgggccggggggaaggtgctgggggaaggacgagtgccgcggaaagggagagggggcgggggaggcagagacccacagggacagacagaaaccggaacagagcgccagggacccacagggagaaccacacgccctcacagaaacccgcagacatggagacgtgatggcctcgggttcccagattccgccggcggccgagaagggagcggcgcccgggaggacggggcccgggcccaccgccgccgctcacctgccgtcctcccagggcagctgcgccgctttcctccgcgaggggaacatcgtgcggagaggcggcggcgcatggggcaggcgctcgcagcccggccggcccggcctcccgggcctacgcggcgcctccgcctcccgctccgcccaggcctgtccgccccgccccccggtccgccgggtccgccgctccggccgcgccgccagctcccggagccgccgcctccaaggttctgcttgcgagcagcgcgggcgcgcctccctctctgggcggctccttcctagccgccccgggacccgcctggaagcccgagaaactgaagcccagaggcccagggcctcccaacaaatcactgggctgggactggacctaagagtccagactcccaaaccaacgctcggggagaatctgcatctccgtcctctttccgaggggaggcgggagcgtcccggggtccccgtctcggcccaggcggcgcgttctccgcgcaagcttggaggggcaaagccaagctcacggctcggcgctgagttcagctgacagcccgcgcaggcgttaggagccgagccctgaagacaagttgactgaatttgaaacccgactctgcttgccgggcgcggtggctcacgcctgtaatcccagcactttgggaggccgaggcgggcggatcacgaggtcaggagagcgagaccatcctggctaacacggtgaaaccccgtctctactaaaaatacaaaaaattagccgggcgtggtggcgggcgcctgttagtcccagctactcgggaggctgaggcaggagcatggtgtgaacccaggaggcggagcttgcagtgagtcgagatcgcaccactgcactccagcctgggtgacagggcgagactccgtcaaaaaaaaaagaaaagaaaaagaaaaagaaactagactctgccaattcagctgtgttttgaccaagccacatctctgcatctgtttcctcacctgggtatatcaatggctcctattctatatggtagctgtggggattcaaggagaaagtgcaaacacttgtgcagcgctaggcacacagttcaacgccatataaatgacagctgtcatccaggaaaagggtactttggtggagctgagaactgaagaagggaataggagactgagttcccatatctgccccgtcaccgtgggaacttaaccatccccctcacccccagcccccccacccctcctactagcctcctacctggggaaagaaagcggcaattgttagacttgacctcctctgctcttccaggcaaacttttaagtttcctaatagatagcaaacatctattaagttcttattatgtgccagtcattgttaatagttcttactacatgagggttatctcacgtagtccttatcggtaggtgcttatccccaagttaaaattgagagaactgaggcacagagaggcaaatcaggtagtttggttgcaaatctatgggtttggggtttttgttttgttcttccccacaatctatgatcttaatcactctgctccagagagaacttcaccgtgggtgggaaatgaatcattcccagtaacccctttaccccgtaaacctggaagtatataatccacccattccccttcctgttgactcccccagggcactgcatcctaccccagaaccgtggtcaatgcacagcccatctaaaggggaccactccatccggttagctgttactatatcaggatgaagctctacttcagattgtcagattcacactctcaagaaatcagatctcaaatgaaaacccaaattatctaatttttaaatgtgatatccagctaagagccatgttgataatgacacttcaactctgatctcttttctacttttttattttattttattttatttatttatttattttttgagacagagtctcactctgtcagtcaggctggagtgcagtggcacgatctcggctcactgcaacctctgcctcccggggtcaagcaattctcctgtctcagccttccgagtagctgggattacaggcgcctgccaccacgcctggctaatttttgtatttttagtagagacggggttttaccatgttggcggctggtctcgaactcctgacctcaggtgatccgcctgcc

SEQ ID NO: 317705 - DNA, 4001 bp, Homo sapiens
ttgcagccgcgcattgtgcgtgcgatcggatccaggattccgcaatttttatttttctggaaatggaggggggacgggggcggggggagcaggaaccgggcgccgggtttcagctttagcgctttgggcaaaagctgctcaaccccaaccctacgctcccagcggggctgagcccagttagggccgcgcgctgtcaggttcaagcccacaccccccgggcccgggccggggccgggacccagggcggaggcgcctggcgcattcttggaaccaaaggctcgaaaaaacaaactgctccgaggcagcccacgggttcgtaggaaggcaattccgccactgacgaggctggggctccgatctgctcgggaggtgcttctgagtgcacgtcgccgtgtgaacctcgtattccttggccccagaaccaagatccaggagtcccatgggtcgagaaaacccgtttgccaaagcaaaaagccacccacttccttctgatcgggccagattccccatcttctttctccccggactcccgccccaccccacccccaccctccatctttggctgctgcgcccctcgccccgagcgctttctcccaggctggtaagggctccgatgacggaagcgctcccttcagcccacagaaccgtctccccgggactcaacgcactgagggggtttcgcattcggcaattcctcccgtcacccgcagctcctctccccgacagccccctccccccagctccgtttaccaacctcgccgcccccctcacccctccaccatgcgagcggctgaagcctcccacttctgggccccccatcacccgggatccccgaagtgcgacggagccctcacagagggaccccaggcccttgccgtccaatccgggcccacatccctgctgcccgctgcatgaagggagagcccgggggctgcggggcggggcgcggcgcggtgggggacggaggcccccgggtccgcggcggcgcggggccaccgggcgcgcctccttaccggctctgggtgcctatgcagcccctgagttagcgcggtgccgccgagaggccggggtcgctggcgtcgtctggctggtgcctggccgctggcggaggctctctcccggctcgacggcggagcccggagcgaggagccagttggagcgctgccgccgccgtcgtcgccgctgccgctactgccgccgccgccgccgctgcagcctctgcatttctcgcgctcgctccccctccccttcctgcccagtgccctccccccgcgcgtccgcccgcccagcctccctcctcccgcgctccccgcccgcctctctcccctccctccagcccggcgccccgcccgtctcccctccaccccctccagctccatctccccaccccctgcactccctctgctcccctcccctcctccggcgcagaccctcccctctcccctccagcctggacacgcccgcctccccttgactccccccagctctgggcccccacctcccctcccctccagcacagtcacccccatttctctcctatccgccatcctggttcctcccttccccccacctcccaactctgtgccccgccaacgtttcctaaatgccctctattcagatcccccctccgcctcccctctcctctcctccattcctgcgtcccccttcccccgccgcgccgcctgggctgtccgtggacttctcccactctctcactctctcactcactctctctctctctctctctctctcactctctctctctctctccccctcatttatttggaaccgttggataagaagtgctcgggctctcgctcagacttagggagctgcctcgaggtgatgaatgacaccccctggcaccagctacccttctcagaccccagtccagcccgctcccgacgtcgactacgattccgctacctcggctggcagcgaggttggggtgagccccagctgcaggcgcgtctgggctgcgccgctgcaaacgagttgcgcaccttgggcggctccgcacctgcacccgcacccgcggggctcagccccgaaggctgcagcttcgggggaggcgcggtcgccgaggtccagctggtggggcgagagacgtcgcccctcggaggatgctctcggaacttgggagaggaaggagggaagagaagaggggaaaggggccgtcgatgtttttgatgtctgtgctttaatggaggccaccaatattgagaagacggggttggccgaggcagcccgcacgctgctgcttgcgagcgctcgagtcaaagctagggccaaccgcggcttgtccgggtgccctaagggggcggacacttggtttagcaccgggacacagaatagccaccggggtaggaagatgcgttcactttgcttacctgttggcaagagggacatacaaaaataacgtaacgtgacatcgttgacaacggtagctctttgattacacaaaagccaattttaccttcccgcaaaagccagttgacgcctttggaacttttatttgcggcattttggcgccctctggctgtgtttggatcgctttcatgctcgcctgcgtcccagccaagaaaaaatcgatggagctgcaggttgtcctcaggatggttctgccctcaggacctgggcgtgaattcagggacagggtggccctccagaaccggagtgacaaactgtaaccatacttagggaggcagacgtcaaaggcaagtacatctgtattcaactgggtaaaggtaagtgcattttcacttaacaggaaaattaacttatcgtaactttaacgtacatatttgaattaagcaaagtggcaatatttactcaactgcactagcgattttgcagtggaaacacttgacgaccctactgtacacatttacaggtcataggaggcagcaccaaattagattaatgcatgccagctggaaatgttcaaatttaaaccaaaggtaagaaaaaagcgggaactgtttgttttttcctgtttctctttctgccatttaaagtgaaataaaaagttagtgtagtaaaataccagggaagcaaattacaaatgaggttgcttctaaagcattttattcttttgaatatttatttccctcacaccagtacaccatctataaagctaaatggaggatgcaggttttcccacctccttttggggccagatatttctttgttgtggaaggctgtcctatgcactgtaggatgtctggcattcattgctggcctctactagcagccagtaccaccctccacacacaccaccagcaccagcaccagttgtgacaaccaaaaatgtccccagatatcgccaaatgtctcctgggaggcaaaatcactccaggctgaaaaccactgagctacattttctttcaacctctatgagcaagtctctaggtttttaccctatcgaattagatgaatatttgcaatgttctgctcaagacatttcctgagtttgttagaggagctgcctacttgttcatttagcattcagggtttttatccttgtgatcttccaggcatgtaaatcatctaaaaattagcaaatacatttcctcattgtatttgcagtctaagcctgtgggtgttatcttccttctctattctctttttccaatttttccaaaaaaaaaagacaacataaaaattaatgttcagtaccttcagtgcttccagctaaattttcatgatggagaaaacaaacctttcaaaggtgtgattggaatacagatcacgggttaccatagaaaccggaggcaaaagcttacaccaacaaggagaactgcaggtctccttaattttgtcttccatcagatttagttgttctcttaaaacatttttttaaatttttttaaaggagggtgagaattcattttcaatgagataatgatgcaactgactgatagtgctattaatctttagaagcttttacagaatttgtaggtttgcagcaaatggttgccaaaatgttacctctcaatgta

SEQ ID NO: 317706 - DNA, 4001 bp, Homo sapiens
ccctcactgcagtaagatatgttacaggaaaaagaacaatgaacagtactagaaaggaaaataacagtgtgcgggtacaaaatatttaatccacaatttgccttcatcctcatcaaggcaaatcttaattttggtcaattgaaatcagcaagaaagcaaaagatgagagacagcctggaaaagaagaaacacacacacaggcgggaaaaactgtcattggtgtccaagggtttcccgcaacatttagggcaaacgcctttgttcctcggctcgggaggggagtgggtggctggatgatggagatgggatggggctgccgggccctccacaccctgctctccggcgcatgcgcgaggccaagacaaaggaataggtaattacagtcccgattcattcattttgcctgcagtatactgggggtctgttggcccgggctgtaatcccgggaggtgggggtggggggtcggtccacaaccctatagcagaaggccatttcgacgctagtgttgggttttagcccgccccacagtgcgagtggccgcgggggagacagaggtgttgtcaacctgtacaaggtcctaaaaaatgcacccatgtgtgctgtgctaatttcagcagagtgagaattacatgggcaagggctgtccaccgagttcgtttcaaggcggaaatgtctctggggacgcagataaggagcctggccaagcgttcgatgaatattcatgaaaagaatgcggtttgcagccgcgcattgtgcgtgcgatcggatccaggattccgcaatttttatttttctggaaatggaggggggacgggggcggggggagcaggaaccgggcgccgggtttcagctttagcgctttgggcaaaagctgctcaaccccaaccctacgctcccagcggggctgagcccagttagggccgcgcgctgtcaggttcaagcccacaccccccgggcccgggccggggccgggacccagggcggaggcgcctggcgcattcttggaaccaaaggctcgaaaaaacaaactgctccgaggcagcccacgggttcgtaggaaggcaattccgccactgacgaggctggggctccgatctgctcgggaggtgcttctgagtgcacgtcgccgtgtgaacctcgtattccttggccccagaaccaagatccaggagtcccatgggtcgagaaaacccgtttgccaaagcaaaaagccacccacttccttctgatcgggccagattccccatcttctttctccccggactcccgccccaccccacccccaccctccatctttggctgctgcgcccctcgccccgagcgctttctcccaggctggtaagggctccgatgacggaagcgctcccttcagcccacagaaccgtctccccgggactcaacgcactgagggggtttcgcattcggcaattcctcccgtcacccgcagctcctctccccgacagccccctccccccagctccgtttaccaacctcgccgcccccctcacccctccaccatgcgagcggctgaagcctcccacttctgggccccccatcacccgggatccccgaagtgcgacggagccctcacagagggaccccaggcccttgccgtccaatccgggcccacatccctgctgcccgctgcatgaagggagagcccgggggctgcggggcggggcgcggcgcggtgggggacggaggcccccgggtccgcggcggcgcggggccaccgggcgcgcctccttaccggctctgggtgcctatgcagcccctgagttagcgcggtgccgccgagaggccggggtcgctggcgtcgtctggctggtgcctggccgctggcggaggctctctcccggctcgacggcggagcccggagcgaggagccagttggagcgctgccgccgccgtcgtcgccgctgccgctactgccgccgccgccgccgctgcagcctctgcatttctcgcgctcgctccccctccccttcctgcccagtgccctccccccgcgcgtccgcccgcccagcctccctcctcccgcgctccccgcccgcctctctcccctccctccagcccggcgccccgcccgtctcccctccaccccctccagctccatctccccaccccctgcactccctctgctcccctcccctcctccggcgcagaccctcccctctcccctccagcctggacacgcccgcctccccttgactccccccagctctgggcccccacctcccctcccctccagcacagtcacccccatttctctcctatccgccatcctggttcctcccttccccccacctcccaactctgtgccccgccaacgtttcctaaatgccctctattcagatcccccctccgcctcccctctcctctcctccattcctgcgtcccccttcccccgccgcgccgcctgggctgtccgtggacttctcccactctctcactctctcactcactctctctctctctctctctctctcactctctctctctctctccccctcatttatttggaaccgttggataagaagtgctcgggctctcgctcagacttagggagctgcctcgaggtgatgaatgacaccccctggcaccagctacccttctcagaccccagtccagcccgctcccgacgtcgactacgattccgctacctcggctggcagcgaggttggggtgagccccagctgcaggcgcgtctgggctgcgccgctgcaaacgagttgcgcaccttgggcggctccgcacctgcacccgcacccgcggggctcagccccgaaggctgcagcttcgggggaggcgcggtcgccgaggtccagctggtggggcgagagacgtcgcccctcggaggatgctctcggaacttgggagaggaaggagggaagagaagaggggaaaggggccgtcgatgtttttgatgtctgtgctttaatggaggccaccaatattgagaagacggggttggccgaggcagcccgcacgctgctgcttgcgagcgctcgagtcaaagctagggccaaccgcggcttgtccgggtgccctaagggggcggacacttggtttagcaccgggacacagaatagccaccggggtaggaagatgcgttcactttgcttacctgttggcaagagggacatacaaaaataacgtaacgtgacatcgttgacaacggtagctctttgattacacaaaagccaattttaccttcccgcaaaagccagttgacgcctttggaacttttatttgcggcattttggcgccctctggctgtgtttggatcgctttcatgctcgcctgcgtcccagccaagaaaaaatcgatggagctgcaggttgtcctcaggatggttctgccctcaggacctgggcgtgaattcagggacagggtggccctccagaaccggagtgacaaactgtaaccatacttagggaggcagacgtcaaaggcaagtacatctgtattcaactgggtaaaggtaagtgcattttcacttaacaggaaaattaacttatcgtaactttaacgtacatatttgaattaagcaaagtggcaatatttactcaactgcactagcgattttgcagtggaaacacttgacgaccctactgtacacatttacaggtcataggaggcagcaccaaattagattaatgcatgccagctggaaatgttcaaatttaaaccaaaggtaagaaaaaagcgggaactgtttgttttttcctgtttctctttctgccatttaaagtgaaataaaaagttagtgtagtaaaataccagggaagcaaattacaaatgaggttgcttctaaagcattttattcttttgaatatttatttccctcacaccagtacaccatctataaagctaaatggaggatgcaggttttcccacctccttttggggccagatatttctttgttgtggaaggctgtcctatgcactgtaggatgtctggcattcattgctggcctctactagcagccagtaccac

SEQ ID NO: 317707 - DNA, 4001 bp, Homo sapiens
agaggctgggcacggtggctcacacctgtaaccccagcactttgggctgaggcaggtggatcacttgaggtcaggagttcgagtccagcctggccaacatggtgaaaccctgtctctactgaaaatacaaaaattagttgggcgtggtggggcacgcctgtagtcccagatacttgggagcctgagacaggagaattgcaagaacccgggaggtggaggttgcagtgagccgtaccactgcacttcagcctgggcgacagagcaagactccatctaaaaaaaaaactaattaaaaaaaaaaaaaaaaaccactttcccagagtcagtaatggcaaaaaaagtgactaaaaaacaaattatattccccaaacgtaaatgtcaactcaaaaaaaaaaattaaatatccttgaccataaatatctcaaaactacaatctttgggcaatttattaaattatcaaccatcacgcactcacacataattaacgaaatctctgagaactttattaatgtaacagcgactagtatcggtatctcctttctgtgtagaaattttgaaacagattcatgtaataaacttggaaattactaaccatcactgaactatcaacgtaacaccatacactcagcaccagttcaggccaatagaggaagatgttccaaaaataaataaatgtttcaccttcctatcacagcataaacagaatttgtactatctcacttcacttaacaaggctgtttactgatttcctcatatatatagaaacagagaccatcttagcctaacatgtcttaaatttactccatcacctttctaaaaaactagtaactttttgcgggcaactattctgctatatcccctgcaaggtagttaatatgaattatctccaatctgcaccaaaacgctccaagtaggcaatattattcccattttgcagatgagcaaattctgcctgagaaaagtttacctgtagactaaaagagtcctgaatccaaatatgatacatgacgctaaagccatgcttctctattcaggaaacacggtcaccatagttaaagaggcacacttcaattaagtgaccagaactcttactcactgacataaatcggtaaagccaaagcaatacttatcttctcctttaaaaaataaatattttataaattgaaagacaaaaacacttccctgcaaagcactccagaaggatgaaaactatagtgacctaaattctcaaatgaatagtgtggatattcttcacttcaggactgccataccccgattctccctaccaccacttgaagacatggtctcctctcggagaatctatagaccgtgacaaaatccacacaagccacaccctgcaggtcagacaactaaactgcagtttggagtggtttcatcaagcctcaactgaaaggcttactgcaaacgagagcggactcctgtgataaaattcatttgctcagcttccaggtgacatgcccggagaggcgggacaaatgaaaattcttccctctgcaacctcttacctgctcctaggagccttttcttggggctccgctccaccgaaatcgactgtgggcacatctgtgggctccgcgggcttggaagcagagtccgtggcaggatccggcggcctgggagactcccgtccacgctggggattggaagctgtggagcccctggcgcctacaccaggcctgacattcggcttcacgctaaggcgtgccctgcggaacatggcggaggcagggggcccggggaggcagcctcacggccgctcacagccccgagccccggcggctgcccggaaaggggattaggaactacgccctccccacaaagccacaccaccagctcagggggcagctaccgtagtttcactgccccgccgccgcctcctcctctctcccgccgccgccgctttttcatgaccctgccacacaccgatggctaaatttcaccctcctcccagcatccccgcgctcacaggacgccgcaactgattgcgccatcagccagcgccgcagaatgacgtcagacgcacagcactgggagccatggtaactaccaagctactgagactgggttacctgcggaccagaaattgagatgcagagatatttgctctttcttctccaggagtccttaggagtagttgaaaagaggaacagaagaaagtccacttctctgctcaaacctttactggaactattaaaatcgctggccgattttgtcttttgaagatcctgaagggtttagaaattctaaattgagtagacatagattaaaaatgctggtgtgaagaaactgataatagttacctcccaggagaggaatgtgtttctggaaaacacgtcgtggtaggaagaccatttaccgtacgcctttgtgtacttttttgtttttgtcctttgagacagggtcttgctctgtcgcctaggctggagtgtgcagttgcgcgatcttggctcactgcagcctccacctctcgggctcaggcgatcctcccgtcacagcctcccaagttgctgggaccacaggcacgcgccacgacacccggctaattttttttttctcgtatatttagtagagacggggttcatcatgttgcttaggctgatcttgaactcctaggctcaagcgagccacccatttggcctcccaaagtgctgggattacagacgtgagccaccacgcccaacctccttgtgtactttttaatatgaatgtatcacccgagatcgtaccactacactccagcctgtttaaaaattattatagttgaaaccttgtaaattattgtgagtgttcttaatctgcttcaggaggtagcagtaaacaagacgttctggatttgggaggagaaaatacaaaaaagaaatgaacaagatatttttaaaatgtatcaggcccggcgtgggtgcctcatgcctgtaatcccagcattttaggaggctaaggcaaggcagattgcttgaggtcaggagttcgagaccagcctggccaacatggttaaactccatctctactaaaaatacaaaaatgagccaggcctggtggtgcaagcctgtaatcccagctatgggaggctgagacaggagaatggcttgaaccctggaggtggaggctgccgggagccaagatggcaccactgcactctagcctaggcaacagaatgagtgagactctgtcttaaaataaatgaattaattaattaattgcaataaaataaagtatatcaaatgtcatgaaataaatttaagggttgaatgccgggtatggcgaggcacgcctataatcccagctactgtggagactgaagtgggaggatctcttgagcccaagacttccagaccaacctgctcaaaatattgagacccctaaaacaaattacctacatgcggtggctgtgatggctcccacctctagctccagctacctggaaggctgaggcaggaggtccaggctgcagtgagctatgatagtgccactgccctccagcatgggtgacaaagtgaaaccttgtccttaaaacaaaaatttaataataagaagaaaaaaaagagagaaatgtacaggatgatgtgatagaaagtaatgggagggaggctggcagtagagtggctagggaagtcctctatgatgagaggaaaaatagccagagctgaggttggccttggaggtattgggccaatgtttgaaccagtgatacaaatcccctgactcatgggaacacaaaggcctgactttcttcttagaaggaaaagaaaatcctacaagaatatggtgatacattaataacaaaaggtcaaaggaataaaattctgaactgactgaagaaattgatcacctaaagggagaacaaaaaagaggcaagtgcttttgagagtaggaaggcaagactgaaagcagagaagagaaaacatatatctctaagactatgaagaaaatgaaggtctggaggccaggcacagctcgtgcctgtaatcccagcactttgg

SEQ ID NO: 317708 - DNA, 4001 bp, Homo sapiens
cttcaggattttctgttcccaagctaaacagactttttaaaaggtggaatgtgctatgaaaaaaatataccattttgtgaaaaagtattacaaaacagtatatgtaatatcagcccatttttgtctaagaagtgcatatttgcctcaacaacaaactagcagaatatacaccagaatttaacaggcactgttctttgtgctttccctcattgtttataatgaacatgtgcaaactttgtaacatttattttaattttaaactcaaatgtgtagacatgttattgtccatatattgttttaacactgacatatgcacggaaacaagttactaggaaactgttttttccatcttacattcatctgttgcttagataattctacaaagataattctttaaaatgttagattttctgagtttgagtttggggaataagttagacttacgtggctatgagaatggggacaaacaaaaaatatctatatctataggaatcatccttcccagtctctgtggactattcatttagtacatttagggactggcgaaattctcaccctcctttgactggtgatagtccatagtcctttgccatctcaacacccactcatgccatcaacatgcatccacgatgctgcatttagaatctgtaaccgaattgaccttcttccttgtgtagaggtctttttgatttgggaggccatccctttagaaactgggcacacctcagctggttctccagcagggcaggcactgggatgagagctggacctttctcactgtccttacagcccagaggatacagttggcctggccccatctgcctccctaccattttccgggggcctctgtcgtgccaggcctgggactgggcatttgaccaaaaggtcaagtttattctctcctccctccatccttctctctctcttcccacctgtccagtctcattccacggcagtcagtccatctatccatccgttccccaaattagaggaaggcctaccgtctggactgaaaatacccctcccaacaagccactgggatagccaagagatggacttgttcatctggagctggaattgggttttacaatttcatcaacagcccttcctcagtatcttacagccactctgcccattttttcttaaaccatgttttcgaggctgacatttcggatgacatttttctgtcatcacggacatcaaattgcctgtgaaaatctgcaatcacccaaccagcgcctgggccttgggtgcagcgagaacccggcggggaggcggccccgacacccgcggtgcagatccaggcgggaaatgtcggagccagcgccgtgcactcctccctgttctgggcgcgccgggtgcagagggcgctcgcggcggcctcggacacagatgcggaggggctccgtggggacgggatatcgcgcctgcggggctaggagcagtatctctagggagttttctggtcttggggtgccagattcagaagatattggaaggctcggagttctggggacacccagccgtcagggagggctcagagggtgcctttgggtctgagaggcaaggatcacatagatctggggcgcactctggtccaagctgggctggggctggaggggacagaggcgctctgggggcgcgctctgaacgtggggcaggagtggggaggctcagaggcgccttggggtcctgctggagaagttctggaagcacattctggtctgaggctgagggaggggagggagtaggaggatgatgggtaccaggcagggtccgagggcccctctgcgctcccagaggctgggatacagagcaggtgggaggggaaggagagcgccctcgggtcccctggagactcaccttcttggcctttttgcccccaacgggtggcatcttcgtggtgtccagacaggtggtcgacacggatgcggaccgactaggcgagccttcccgctgcgcagccccgagctgctccgagtccgcagcctgcctctttatacccgcagttgggcgtggggagggcctcccagccaccgcgcgggccaacacggaccttgggcgggaacacgcccaccagcccttcatcaggcccgcctcctgttgggaacctggcctgccaaggaggtaatccagattgttcacccaaatgggtggaaccaccgaaaagtaagataagaaaaagcgaggttgccactcgctcagatttcaaacctgcctagcgtcccttttgcctcttgcacttttgccccgaccctgaccgtcctctcgctcacctgggatcatgcaccatggcccacttaggctgccagagaggcctctgagaagtccattcgatgctcagatatttgtcaaaggccaaggcgtcaagattatggaatcaggggatgaagtcctggaagatcttcagcctggagtgtgatctcctgtgtgatatacatccagtataacgggacacaaatgcggctttagtagaggagtccaatactaaccctgaattggcgggtatgttcaaaatgaccttctacccctatacccaaacatgccttgcagtttctaataacacagtagtttctaataagaatatgtttgtaatatttaacaaggacagacttttaacatttataaatggaagcagaaatgtactttgaagacttcaaaattcagcatgaaaacgatataaaaacatagacattagaagaactggagggaatagagatgttaacagtagttacctattgatggcggaattaaggcttgttttattttattcttcatgtttcactgtattttccaaaatatttttataatgagaatacattgattttaaaataataaaaacattactttaaaaaatgtacagcatggcctgcacggtggctcatgccagtaatcctagcactttgggagggtgaggcgggtggatcacctgaagtcaggagttcgagaccagcctggccaacatggtgaaacccccgtctctgctaaaaatacaaaaattagccgggcatggtggcaggcgcctgtaatcccagctactcgggaggctgaggcaggagaatcgcttgaaccctgggggcagaggttgcagtgagccgagattgtgccattgcactccagcctgggcaaaaagagtgaaactctgtctcaaaagaaaaaaaaatgtacagcatgacagtaaatagcctacagaacaatgaaatatctgaaacacagttcagaaaattttacccaaataaaagcatgtaaaaaaattctgtatgtggacaaacaacctccatttcaacacatgcagagaagaaagttactgcaacacctgatgaattaatacaaatttaacggctaaagtgacatgtgtttgaaatacaactgagaaagtaaaaatgtccttttgcttctaagtatgtcaagtttaaaatggaaaaagaaatgaaaaggtgaaaggatatactgttattcaagtgatctattatttcattggctcctccacccccaactgtgatctggggtcagcaagaatgaggcatgaggtaaagtcattcttcacagtacctagattaaaaaaaaaaaacaccttgaaggcattggagtatccgaataggtaacagtttagttagttaatgcgttaactagttaaggtattcacctggtgagcactggtgagatgaacaggtctagagtgagccccgcggtggctgcagggagcagccgcagtcgtgggtatctggcactaggaggcggtataagcactctaacactcaataaaggctgaaagccgacgttcccaatttcagtttcctcaaaatgtggcaaaacttgggagaaattttaaactagtagcattaaatttagaagtgaattatgaatttttaataggtaatatagacacatggcaaaaattttacttttttaatctttatttctccaagaacaaacatggcaaaaaaaatttagaagcctttccccagctgctgttgcagatcaagtcccctccctggagg

SEQ ID NO: 317709 - DNA, 4001 bp, Homo sapiens
aggtattaagcctagtatccattagttatttttcctgatcctctccctccttccaccctccacccttcgataggccccagtgtgtgttgttcctcaccattatactagtacgatctaaagtcaactgtaaaattataaagacaggaacatgtaaaataaggaaccctgtaaattaattttgcagtacatttatattttcattccctcctccccatcagtttggcagtgaacctgccttgcatctgacagcgagctctagggtgcatttatgccccctttttgcagatatcactacgtaagacctctgggtttaagatctggcttcaagacatctctattcatactcagtggggatcaacttcactgtgtagtaggaggtgatcagaaaaacccagtctgtctaaaataacttccccttttcctagatttgccagcagaactgctcttttggatttaagacctaattggaggtcttgtctgtggcaattaaatgaattcttaaaatgtacctgctagctgaggagagaggtgagattagttccttcccattaacaccttaactcccaggtacacattcacatggattagtgtgtgataatcttggtgttgtaacagtagaggccccaaagacactgaacaaaaacagggcattttaaaaacgtttaaaaatatgaactgtaaagatgaacatagcattagagaaagttgagagaaaaaagcacaatgttctttgattatttttattaactgtattctttcaatgctcacattttgcttttataacctgaaaaaatatcctaaaacatgctttttaaaccaatattccacatcttgtgtaactattaccattattgtgtccttccttacagtgtgtatataaatatttgtatatggttgggatcagtttgtgatatatttccttttgcaacttaacattgccaaggcacttagctggttctcatactaagttatttaactgtctaataacttaagtagatgaaccttaatttatttagaatcccgtattgcagagtatcttggtcgtttctaactttttagtataaatagctcggtggtgcacatttccacgcataaactgcccctcctcccttcctcccattctgaatgacagggctggagcgggtgggggtctctgaagggtcctggggatgtctttcgtccaagctcatgcccttcctaattttgcttagtcactccttcatcccacccccacacatactcgacgtagaaatggctgggcataaagccaacatctggtgaccagaccaggaaaggggccaggagctggggaccaccgggtgagaggaggttgaggggtgctagcgaatcccacctaccctccaccctgcaccgcagctctgggggcgtccttgcccaggactagtttcagaccagccggcgactcgcaaggccaggctgcttggccaggctgctgacttttccaaaacgcgaggggacagtccgaagagttcccggacggattagcccaaagagctgcgggcgagggtcggttgagggaagaaaatgtgtgcgcgacatgcgtccgaaagctagacttctgatcctcgctccccgcggggctggacccgtgaccctgagctagtcgcctgactcgccgagcctcagtttcctcacctgtgaaatggggataattgtgaagatgaggagataacttgagcacagcactctgtgcagcgccaggcaccgagtaagggctccataaacgctaaccaacccgtgacaggggaaaattgaggctcagggccatcccgtccaagtgttttgccgaggccccagggcttggctagggatggacgccgggtgtgaacggagtcgctcgcagcccagcggccaggagctccgcgaggatcgaggggacgaaactcaccttcttggcccccgggcgtccagcaggtgccatggtgccgcggctctgtgggcgccgggttcccgggcgcgcggccgtctaggagcccgcccccagcccggggggaggatccgacccccgccccgccggccccgcggcctcaggctgcccgctggcctcggagcaggcgcctgcgccctcggcctcggcctagtcatgctccgtcccggcgcgcagctgctgcggggcctcctgctgcggagctgcccgctgcagggctcccccgggcgcccgcgctctgtctgcggccgggaagggtgagtggggccccgtcctgctcagaggcgacggggcggctgcgggggtgggagccagaggctgaggcaggctcaggggttaggagcgctctggcctccaagaaataggccttgatatatcttctcgaattatcttttaattataaagtgaaacagtatccaaaggttccccgtgtaaagtctctcctgccccaatccccttggccagtgaacaattgttaatagtgtcttctgaatctaaccagagacagtctacgcataggcaaacacaggtcagtataggttttcctttggctttttgacatcttgctttttacaattatcaatatatcttggagattgttccatatcagcacacactgacttgccttgttccttttaatggctgcatagttttccatcctgtcaatattctacactatcgttagtctattcattaacatttaaatggtttttggttgtttattactgcaaataacgtgcatgtgaaaattcttaggcatctatctttgagtacatatgggagtcggtagcaacagtttttaaaggtgaacttgttagggaaaaggttacgtgcatctgaaagattgaaagacagcaacacattctccaagtgggtggcaagagtttgcatgcggcacaccagtgtgtgtctgtttcccacatcttccctggttcccagaatagcccattttgttatctttgctaaatctgataggtaaaaatggcatgtccttgttttgattggtctgtatttaaatatgagcaatgctgaacatctttcgacttcttatatttgtagattattcctggttgccaggaaaggcttgtttatcagcatcactcaacattattatgagttgattcgaattttattttatgtcctatgacctgaaattctggaatcagaagacctgcttttgagttccatctatccattcaacaaatatttactgggtgttgtgatgtgctaggtttgtctccagtactgggaatgcagtagccaccaactcacagttcctgcgccatctgttacacagaatgtgaccttacacttctgaggttcagtttcctcatctataaaatgaggatactaattttgctctatataactcacaggattgctgtgaatattaaataagagaatgcatgtgaaagtgctttgtaaattgtaaagcaatgcaaaaatatttataataatgatgtttttaatccagtgcaaaataaaatggaaatttaacaaacaaactgattagataaataagatacaaatttcaagactatccaaaaaattcatattttggctgagtgtggtggctcatgcctgtaatctcagcactttgggaagctgaggtgggcagattacttgaggccaggagtttgagaccagcctgatcaacatggtgaaactctgtctctaataaaaatgcaaaaattaactgggtgtcatggtgtgcacctgtagtccaagctgcttgggaggctgaggcgggagaatcgcttgaacctgggaggcggagactgcagtgagaaccgagattgcaccactgcactccagcctgggcgacagggattccatctcacaaacaaaaacaaaaacacccaaaagttgagttatttcaattgcatattctttatatacccaatttcaaactatcaaaaaatgttttattttggaaagcagttgaacaagcatacagtttgtgcttatcatttctaatacagaagataactgacctgggttttttgcatggctcctaagttttatttcaaatactcttataaacatcctcgac

SEQ ID NO: 317710 - DNA, 4001 bp, Homo sapiens
acttctccagtgtgattttacaaaccattagtgataagttagagtgtttatatagacatgtttaagggcagatttagaatctgttgctggacattcagaattactggtgccagctttcacggcaggctctggagacagaccaggtggattcgaatcctggctgtagcaacttatgagctgtgtaaagttacctggaaagttatttaaattctctgtgtctgagtttccttatcacaacactacttacctcatagaacatcatagattatgtatgtatgtaaagcacttagcagagctgctggaaaacggtaagaacgcaatacatccagctataatcagtctttctcatcagcaatgacaagaacccaaatgttagaaagagtacagaagaatgcctaagcaatttagattatgtgaaaatgtaatttcatttgtatgaaacctgtttatttttctataattggcccagaagttttgtaatgtatacatcagagaagtgaagttcaagaagttttaaatatctgcatcaaatttcactttttctctggcttattcatttaatcacacttctttgcaccgtatttgtttattctgcatctaatttggtttattctgcatctggtttatctggggagccctattttcctgcactttttgccacaccttgttacaaactctgagtctacatctaatgtttagtgactttgttgaaaatgattatttttaaaaaccaaggtttaggccgggcgcggtggctcacgcctgtaatcccagcaatttgggaggccgaggcgggcggatcacgaggtcaggagatcgagaccatcctggctaacacggtgaaaccccgtctctactaagcaaaacacaaaaattagccgggcgtggtggcgggtgcctgtagtcccagctactcaggaggctgaggcaggagaatggcgggaacccgggaggcggagcttgccgcgagtcgagatcgcgccactgcactccagcctgggcgacagagcgagactccgtctcaaaaaaacaaaaacaaacaagcaaaaacaaggtttaaaactcggtttctttttgctgaactcatggaaccgtgtctacactcccaattcttgcctaagtccactcgtttattttacctctacccttaaatggcttaaggcgaaacacttcatttcctatctgttcaaacggggtaacactctaaggtgttattcctaggttgactttcacagtccaggtcccagttttgccactgacccaggtatgccttctaacctaggccttggcgccgtactcgatttcctcaagcataaaatcacaactacggtccaggttacattcgtttcacccggtgcctcccgtgccaggtggccttggatgccaggagagctggccagcagggggcggggctagctgcctcccggacgctaccagaggatgctgaagcagcgtcagagggcggggccaagcagggtgacaggtaggttgtgaggtagtcaggggcggggcgacgaccagggctgcaggtggaaggggcaaagccgagccccgaagcagtagctgagtcaggggcggagaacagtggggtgctctggggatgggagatccggcggcacccggaaaaaggatcaaggccagcagtcaccgggacacaaccaaatggggaccgggggggtagccgaccatggggcggagcctgtggtctgggaaaccaagtggggaaagttcgggagtgacactgccaagctcacagaccagcagagcttgggttagggctgctggagcccggcaggggtcccgggatcagtacctgaataagcgccttcacctccaggtcaaatttgacaatctcttggttacagatccggacgtggacgtcttggggagccgccatgttggggacgccggctacgggcagcggcaggacccaagttcaaacgcgttttcgcaccaccttctttccctccccacccagtctcggggcagcgccccctagagaccggcgaaaatggcaagcgagggtcactgcgcagagttgggactttccctgacacgtgtagggaaatcagcctctcctcttggtatggccctaataacatggagaggaagggaagagggaatatcaagaacgcttcacagtggtctctttccatcttccttctgtcaggcattctaataactatatattttttacatagaaaaaaaaagactggaagaaaagtatcaattgagatgtctctggaaagtaccagtaataattttttgtttcttcaaactttcttatatttttaatattttctacagtgagtataaattgtggagtaaaagaggaaatgataaacgtcatatattttttaaagtatggagttcaaggcaggtcggtagagtacctcctatcactccaacacatgatctaagggatctttgtaaaacacgaaattgatcaagtcacctacctgtatgcagcccttctatggcttctcgtgtttcccttttgtatacaactggatttattaaatctaccttgctaaggtagttttgatggaaatgtcagagcaaaccctcaacaaatggtggctcttttatttttgttagtaaataatccaagtttcttagctggtcctcaaggccatcagccaccccggccatcagccaccgcaccctgcgcccttcctggattgctcaagctccttctggatgtgtagccttagaatgtggtgttccctctccctagaaagcgtttcccccactcgaccccactccatctgcatttgttcgggtcacttcagcaagcatagattgtgaggacctaaaggcttaggacttgaatgttcatctctctctctttttttttttttttttttgtggcggagtctcgctctgttgcccaggctggagtgcaatggcacaatcttggctcactgcaaactctacctcccaggttcaagcaattctcctgcctcagcctcctgagtagctgggattacaggtgcgtgccaccatgcccagctaatttttgtatttttcatagacacggggttcaccatattggtcaggttggtctcgaactgacctcgtgatccacccgcctcggcctcccaaagtgctgggattacaggcgtgagccactgtgcccgaccatgttcatctctcttaatcctcacaaccacccttgaaattgtactacactattatcacagatcaggagtagggcttagagtaaattaaaacaaaaaacaatcaaccctgttgcaagattacctatcttgaaagtggcaaagcctaggccgggcacggtggctcatgcctgtaatcccagcactttgggaggccgaggcgggtggatcacgaggtcaagagatcgagatcatcctggctaacacggtgaaaccccgtctctactaaaaatataaaaattagccgggcgtggtggcggacgcctgtagtccccgctacttgggaggctgaggcaggagaatgatgtgaacccaggaggtggagcttgcagtgagccgagatcgccccactgtactactccagcctgggcgacagagcaagactccatctcaaaaaaaaaaaaaaaaaaagaaaaaagaaagaaagaaagtggcacagcctctactgaaagccatcttttccccaaaaaatcaatatggtccccacctgttgtaagcggggctatgtgcttgtctgtgtccctacagccctctacacaccctctcgtaaggtattcatcaccccactgcacctaatagagaggcagtgtatcacaggcttggcatctgcctgggctcaaatcctgtccaccacacacttcgcatgcctgtgcctctgtctcctcggaagctaactggtgataatcaattgcgcctacttcacaggttggagaattaaatgagaaaatacatgaaaagcaccaagcacagtgtgctaatgtggcatatagtaagatctcaatgcccgttagctgctgttattctactactagcccacatttt

SEQ ID NO: 317711 - DNA, 4001 bp, Homo sapiens
tatgcctgaaaaaacactatcttcaagaactaaaacaacctggaattctcagaaggaacagctaaggagctgtacatgggaaggttccaaccactctccctcaccagccgctcaagagggtagtcccctcccccctcaggggatacgttccaagatccccagtgggtgcctgaaacctcaggtagtactgaaccctatatacactacgcatgaatgtctttgagggccattatgaagtaaaataggggttacctgaacacaagtacttccataccgcaacaattgggtaaatgaaaccgcagaaagcaaaaccttggatggggcgggctactgtagtcgcttttgttttaaaatcacacacaaaacctaacggaatataagaaatatgaatggagaacttgtcctaggaaaggtgaaagctctgtcaatacagatctgggatgtatatgtattaaattactttgtttcaaggacagacttctagttgggcttttcatcttggagaaggaacagtgtataccactttctctctctacatccgtatttaccacctggtttatttacatgtcagttttctaacctagactataagttttgaggatggggtagtgacttattcctgtaatcgcacagcttggcaactagaggccaataaacgttcaacgaataaacagactacgtttttccctatcttaaggtctaattctaagctcacaatcttgctgtgaggtaagcaaaatgtttccatgacaggctctggtaggagaaatcactaccctgcaggagtccagtgacagggtctcctaacctacaaccacagtcgtggctagacaagttttgaaaaggaagaaaatgaacattccagcaactactgtatgtctgatacttaacacccattatttcattgaatccaaaccaccctgacgagtaggtaaagtgaaatagcgttttactggtgggactgaccaatggcattaggatctcaactaggcaccaaatctccttttatcaatgatgaagtgcaaaataagggtgctgtttctacaatttatcttaattcaacgccgtactagtctgcaaaacaatgagctagagaaaaggaataaacagctataaaatggtgatgactgtgtgttcaaatcattgtgtttaatgccagcttctcagtggtgagtacggaacaggtggaaattctaaagcacgcttgcttatctacttggtttcgaagtttgttattaagggcctcagaggagttccatcttgggaatgatacggtctaggctctaaaacccacattgaaaccccaagttcggagaagggactgggtaaaatcacaactagtagtaaatgtatcaggcaggaacccacgtgtgcatcgctcagaaagctctccgtactgccccaagcggtgtaagacctcaccgctgagatttctaagctatcttttgttttgctctcggctttcgaaaatcaaagctgccacccggcggcctcacgtgcagccccgctccccaacgcccaggcggccgcagctaccttggtgtccacgtcggccaggcagtcccggcggaagctgtcaaaaaggccccggctcttgagctgctccacgatgagagcgatgagctgcgggtcgccgggaggcagcgaggccgggttgatggggccaccgcccccgctggccccagtagcgccagtcgctgccccggcagaggcctggctagttccgccgccgcccaccgcgccagttcccccgccgccgccgccgtccgccatggctgcgccccgggcccacaagggagaacgactatagcttcttctccaggacagaaggcctagaacgtgtagaggtggtgaagggggcggtgaaggaggagggccccaaggcggcagcggcggaggtggcgatggcggcaggggcggtggtgggggcggcggcggcgaaggccccctctgatacagcagaggttgtggtggacgcggcagaaacggcctgctcgattccaggcgcaccccagatggcgtcaacgttgacctttgcattgtggggcgggaagttttctgtggccatctccggcgttctttataggcagcggcctagccgagagaaactacaactcccggcagggttcgtgcttgctcgtcgcgatttcgcggggtaatatgggaactgtaggcgcaggcctcgtgatcgctgcaacccgccaggccttccccgccaggccttccccgcccactctctgctcacttcccattcaatcaacacgtcccagcagtgcccgattataacagtcatctgtggagctgattaaaagtatagattaccagaattatttcttaaagatttttatccagtatttacgggtcgagacctagcaatctgtgcttcagcatgcactcccacgtccttcttgaacaacatgttccgggaaattccggaaacagtggaacagtcaaacttctattgttcagaaatttgtgagtttccctccttttggttttaatagcaatgcatactcattttagaaaattggaaaataacggaaaagtgtgaagaagaaaataaaagttttccttaagtctgtcttatatgtgtgtggatttcctcccaaatattaaatattgtcaatcataagccaatattgaataattgaaaagtgtcaggcgtgatgctatgcactttccacgcacttcttcacgataatttaaaaaagcagatacatactactattattgctatttacagacgtagaaatggaggcagaagaaagtttgttaacctaatcacatacctagaggtagaaaagtaggatttgaacccaggttttgaggatctaaatcttgcattttagcctgaggtatcctgagagctagttggtatcccacaataggtaaggctttatatcctgatttttttaagtagccacaattcaccattggaatcctatagctgccaccattatcctctcttcccttcatcttttgcctattgttagctcagctccccctcccaacctcagcaattatgtctgctattgttgtttcctcatcttacacaagcagcagaggggatgtaaatagcaaattctgcaatatccttggctcctgcgaagatgcagaattggcaaagatccaggatgttctccacaccaatatttagtactcaagacagtttaatttttttttcttttttttttttgagacagagtctcactctatcgcccaggctggagtgcagtggtgcaatcttggctcactgcagcctccacctcctgggttcaagcaattctcctgcctcagcctcccgagtagctgggattacaggcgcatgccaccatacctggctaattttagtatttttagtagagatgggggtttcaccatgttggccaggctggtcttgaattcctgacctcaagtgatctacccgcctcagcctcccaaagtgctgggattacaggtgtgagccaccacacctgtccaagagagtttaaattaaccctcaaaagaaacattcaggtgttggattatactcatcctctaacaccagctcaatcattcacaatgggtcagttaatgacaaacattctctcttaatagctcaccatccttgagattacctaatgtctgttcctactggttgactctacactgatcactcacctttaaccccaggagaagcccagttcaggctgcctcagccccaggttctttcttctgcaagcccttgatcactctgactagtcccttctccatttttggcaccccacatcttactctccttcctcagggaaaattcttctgacccctagatccaatgagatatttcctccatgctacagaaactcaaagcctcattttttgtagcaattattataattggaagtgaatgatttacagacaaattggccacctgagtcccctgatagggtgtaatatttagaatggggaccacgacttgttcatcactgtgtctccagctcttagcacgatagttcttagct

SEQ ID NO: 317712 - DNA, 4001 bp, Homo sapiens
cttagaataaaatgttctaaaattagattgtggtgatggttgcacaactgtgaatatactaaaaaccattatattgtacattttaagtaggttaattttatagtatgtgaattatatctcaataaagctgtttaaaaaaagaaatacagctggcctggtggctcacacctgtaatcccagtaggttgggcggatcgctcgaacgcaggagttcgagaccagcctaggaaacatgatgaaacccccatctctacaaaaaaataaaaaaaattagctgggcatggtggtgtgcacctgtagtcccagctactcaagaggctgaggtggaggatcatttgagcctgagatatggaggttgcagtgagccaagatcacaccactgccctccagcctgggccacagagtgcaatcttgtctcaaaaaaaaaaaaaaaaaaataggcctggcagtggctcacgcctgtaatcccagcactttgggaggccgaggcggacagatcatgaggtcaggagattgagaccatcgtggccaacatggtgaaaccccgtctctactaaaaatacaaaattagccaggcatggccaggcgcagtggctcacacctgtaatcccagcactctggcaggccgaggtggggggatcacctgaggtcaggagttcgagaccagcctggccaacatggcgaaactctgtctctactaaaaaatacaaaaattagctgggcgtgtccgcaccactgcactccagcctgggcaacagaaggagactcagtctcaaaaaaagaagaaaaagaaaagaaagtctacttacagcttaatatgattaactatagaaatctaccgatgtgaaagagtatctaacaatttctaagacccagaaaagctgacatcctagataccttaccaattttgatcgccacttctcatgacagaagatgctaaacatagcttctctcggatggaccatggctctgtggggccagtgcttagcagcttgtgttctgggaaagggagaaaaaaaaaaaagccttggaaacaaccactgagactgtagtgctaagctccaaaatccccaaaaagaggactaaaagcctaatacaaaacatcccaacttgttaggacaaagtgagctactataaccaaatcttgattttcacctctccaagtgaaatatcaccagtgaccggggtacctattcgttgcatgtgaattattaacattttatttcttaaaacgccatggcttgaagctccgctttattaagaaacagggaatgtcagattaggcagttctccctaaaagcccagttttaagaatactggactttattccagtttgaacttattcagggcttatttcccaggaacccgagcggccagcccctcctactaccccgcctccctcttagcataaacttgtttacttctctcagatcctctactccaaatgtcgggggtaaaagagcttttcagtccaaaaaaagaaaaatggctgaaatccccgagatgcaatttcctgagtggcaagaaaagctcatggttaaaagaccccacttccactgcctcacaaacgtcagacaaaaaaatgaatggctctttgaggtgccggttactccgtctggctcataacatcttttcgtctgcacgcccaagtttctagagtgcttttacggttaacccgcagagttcctaacacactaggattcactaagctgcttctctcacacctccgctctctccctgagaaacaagaccccagatttctgggcccccaaacgttggtcttcacgatgctgtagagcgcaggtctctgaaaaccctgggctctcaagcaacccacttctcccactccctaagcgtgtaacaaaaatatggtgcctagcctcggatctacaaaggcctttcacgcaaaacctgctcagatactcactgcccgttcccgtcgccatcttggccccgaagtctccaaccctgaggagagacggtctggaagggccgaaaccctggaattctgggaaatagtgtaccggcgttggttcgcggtgcctcctgggaaatgtcgtttttccccttaagacaaagcaagcaccctaaaccagttaccctgtgcactcctgttaagattgttgctaaggaaggacaggagttggctgctgaagcctcaagatttcctttaggctcttaggtaagaaatgtctaaggttcaaggaaaaaggttaagttggaagaatcccaggcaaaataagtgcgaatccacgacagttggtaacccggacccacattagaactcagaggtcaagcagaagcgaacgactggaattccagtcaggcccgccccctttccttacgcggattggtagctgcaggcttccctatctgattggccgaacgaacgcagcgcgtaatttaaaatattgtatctgtaacaaagctgcacctcgtgggcggagttgtgctctgcggctgcgaaagtccagcttcggcgactaggtgtgagtaagccagtatcccaggaggagcaagtggcacgtcttcgggtgagtgtgcggctgtgctggagcccgggttaccagctcttgcccgcgcggaataggctttaagaaatcggagctgcagccatctgtttttctcttaatgctgcatctctgttctcacggtggtccttggggtgaggttagagaaggagccgagggatcctgacaccacctccacagcaccggcgggcgaggtgccctactttaggcgtagccttctgcttttggagccagatgtctgtggacttctgttcgcgttcagaaatgccgcctcaaacttctctcaattgttcattaagtgaacttctctcattcccttcccctttgccgataattggaggggaaaagaagtaggaagcgggacacggtgtcctggggcaagggacttattacctaaaattcgcggccccttctgtccctaaaggttcttctccctgcccactttttggtctctttttagacctaggctgcccctgccgtcatgtcgcaagggatcctttctccgccagcgggcttgctgtccgatgacgatgtcgtagtttctcccatgtttgagtccacagctgcagatttggggtctgtggtacgcaagaacctgctatcagactgctctgtcgtctctacctccctagaggacaagcagcaggtaaaggaactggggagtggctggggcggaaagtgatatcctcaggccaataattgtccatacagggtagtatgaggtcaaagactagcaatcctaaaggtctgagatcaattcaaaattaagggcatttaggacaaaatggctatgaaaagaaaaaaagaaaaaaaaattaagggcatgacaagtaaaaaaaaaattgagttgtgtgtccagaagaactataatttgcattgcattaatgaaatagcctcaaatgcatgctcttagttaatctttcagggaataatagttatctctctttgccttgaggcccagttgtgctaaataatttgcacaaggtcatataggcattatgtaagtggaatgtatgttcaggttttaatagtatcaccatagcttcaatttgttgtaggtttcctgctaggccagggtttctcagttacagcattattgacatttggggctagacagttcttgtagggatctgtcctgtacatttcaagatgtttaatagcattcttggcatttacccactagatgtcagtagtgccttcccatttgtgacaatcaaaaaatgtcttcaggcacttcaggcattgctaaatggcccttggagtggaaatgaccctggttgagaaacactgtactaggtcctatgctaaacattaacatacattgtcagattttgtgctcttatagagtttctcttagagacttataaagttccatgagagcatggtccttgatgatgtctctcactatggactatcagagcttctcggttcctaggccatagtagacactctaaatatctgggtttttttt

SEQ ID NO: 317713 - DNA, 4001 bp, Homo sapiens
tgcccacgacagagattctactaaaggcctccagcttcctttgtctcagcctatggtcactttcagcaacttcagacccaccatttgggcctcgaggtcccttcttcccaaggggaattacctgcgttttcactgacatgcatctctcttaccagtctgacccagatggggctactgttccaatactgtcttaagtgcaaacaaaaccaaacttcaagacccagggctggcaaactttttacataaaggccagacaaaaaacagtctaggctttgcgggtcacatacgattggtctctgtggagatgcctttttgtttctttttatgaacgcttaaaaaacatataagccatccttagctaacaagttaaaaaacaaaactgaagggcaccagtggtaactggccacgccttgctctagacattcagagacaccggaggaaacctcaggccagaggacacctgggatgaggccctggaaataccagctctcctccctcccatgcttctccccaaagcaacaggacacggtgccgacccctcatttacaacgatgagctgtgaacaccaggagagtctctaaaagtgcacccttgcctggctgtgtccggcacgctcggactggccgatctgggggcggctccacctccaccttcttcccaggatcaaagtcgtcagcctctccctccgtgtcacagtgctccctctctcgcttccgcttcttctcttcctgggcggcagagtcaagggagtgagaaaggcaggagtaggcgggatccggacaggtctgcccaatcccctcgcagttctcaggggagggacagaactaagggaaaccccctccgagatcctcctcatgccaggctccctcctcacagagaccctggcagggtctgctgaggaacagcacacccaggatcctggaactgagtctgcgggcctcagcggttcgcgttttgctaccaacggaacaccccctcccctcctccagccacgcaggcgcactctgcctgggtcctgggaccaggctccccacgggctcctcgtgggcagcgtccgggccaccgccgctgctcctttacctttcgcttccttctttcctcatcgtccagatgcttctccttctcggacttcttcttcttcttctttttcttttctttgtgcctctctcgctcatggtctgacctgtcatcatagtaactggagtcgtggccggatcctgagagttcagtcacttcacttcctccgaccttcaggactagctttagaggcttctccaggggcttgtcggcataatctgcacagacacagaccgagttctacccgcgtgctcaggtgcaaacgccacgcagccaggtgagacgtgaaggtgctaagagggaaaggcctccctaaggagtacagcggggctgccaaccagcagggaaagacggaagggaagaccacagtggcggcatgtcactgcctccttgttctcccttcccctccgcagggagcttcaggtccctttcgagccacggtgtcctcaccagaggccctgtgggatgttgttcacattactcgttcaagaagatggattaagagggacctggaaccccggagcccgatctccctcctagaaacccccagcacttcggttcaccctcgcctgacttcctgcaggcgcccgtgctgcccgctgacacccatggagctgctgcgggagcaagggagagggagggaaaggcgggagaaagggcagcccagcttctccctgagctccacacaaaagccagcacagatgcttccctagtctccaggaccggggtgagtgggcttgcagcctcgaacccagaaccctctaccaggaacgtaagcgcctacccaggacccctcacgtgtgcccggttccctgcccgaaatcccaggaccccctcccgcgtgcccagaacccctccctcgtggccaggacctcgcccggtgcccaggacccccgtccgcgtgcccggaactcctcccccgtgcccgggaccccgcccgccgcgcgtcacaaagcgccgccgcctcaccctcgtaggacgagcgccactcggccttgtgcttcttgtgcttcttgcccatggcggcgccggcggcgggcccgaggcgggggctgggaacagctggcacccggtcggaccttggccgccaccgccccctggccctggctggccgcccgcgctcgctgcgccgaggttgccgagctcgctgggccgcgccggaaacggggcgaggcggggccgcggcaggaagtggccctgccgggcccgagcgcttccgggtcaggaggtggtgcgcctcgcgcggcagattcgaagctagggcggggcccgcgggctgaggcagcggctgtggcggcgacgctgggcgtgaggtggcggcggccgcgccctggttgggtccccactgctctcgggggcgccatggacgaggccgtgggcgacctgaagcaggcgcttccctgtgtggccgagtcgccaacggtccacgtggaggtgcatcagcgcggcagcaggtgagccggacctgtccgacacatcctctgggcacccacccgccccgaccccagcgcgtgcaccgagccccgaccccagcgcactgattctgatgcgaccgaaccccagggtactgatccggcccgactggacccgggcgcacaggccgccgggccccgaccggatcctagcgcaatgacgcgaccccaccgcagggcactgacccggccgacccgagccctgcgcgcaggaccccagctcacagattgagccccgacccgacctcagctcacggacctggccctgaccctgcccctgccccggctgtcctccagtgcattgatgtggccctgagtcccacgttggagaataggatggctgcgcattacagagagctctagtctcagccgaaagctgggtggttattctttgagccactgcttctcagaccctttaattgttcccgttcctcacggactcgatgttaaatttttagggttcaaagcacatcccactcatttgtgaccaagtcagttcatggtatggtggggcctgtgggctgtgctgctccctggagtggggggaactcagcggcggggccagaccttcacagaccctccttatgtccacggagggtggattgaggtcaggtgagaccaccagcctcagaggggatgcagaggaagagacctttcctttaacagaatagctgttgactgggtattttctaggtgctggagttcagacacgtcagcataattgcaccagggcccagagacacctgcacaaagccccatcacagcctggcgacacctgtgtaaacaccttagcgctcagagacacctgtacacagtgccaccgcagcctagagacaccccatgtacaaccacacctgggcccagagacgctaggcataatcacaccagagcacagctgcacctagaggacagacacctacgtacaactgcaccagagttcatagacacctgcacacaaccgcactatgcatggtggtcgctgcttgtagggtgctgggacgattgcaaaggggccacatgtcacctgcctggctctgaggagcctgtccaggagggctcagagggaggcagacattgaataggacttagagggtgactgcagttgatcaggccagtaagctgggacagtgcatagcagggcacagaggtgtgatccgggaccaggtcactgttgtagaaaggggaggtgttaggaggactgcagcaagggggaccaagggaagccctggataccaagctgaaagcattagattttctcagcacgaatcacggctattggagacttgttacaatgcagaccccaggcctgaccccacagctgtggaacttcattagtaatagtgaaagccaacattattgcgtgcttactatgtgccaggtatcgtcctaaacactttgagtgtattaatgacttcacagtagcccagcatagcgagaactcttactgttgtc

SEQ ID NO: 317714 - DNA, 4001 bp, Homo sapiens
ctaggctttgcgggtcacatacgattggtctctgtggagatgcctttttgtttctttttatgaacgcttaaaaaacatataagccatccttagctaacaagttaaaaaacaaaactgaagggcaccagtggtaactggccacgccttgctctagacattcagagacaccggaggaaacctcaggccagaggacacctgggatgaggccctggaaataccagctctcctccctcccatgcttctccccaaagcaacaggacacggtgccgacccctcatttacaacgatgagctgtgaacaccaggagagtctctaaaagtgcacccttgcctggctgtgtccggcacgctcggactggccgatctgggggcggctccacctccaccttcttcccaggatcaaagtcgtcagcctctccctccgtgtcacagtgctccctctctcgcttccgcttcttctcttcctgggcggcagagtcaagggagtgagaaaggcaggagtaggcgggatccggacaggtctgcccaatcccctcgcagttctcaggggagggacagaactaagggaaaccccctccgagatcctcctcatgccaggctccctcctcacagagaccctggcagggtctgctgaggaacagcacacccaggatcctggaactgagtctgcgggcctcagcggttcgcgttttgctaccaacggaacaccccctcccctcctccagccacgcaggcgcactctgcctgggtcctgggaccaggctccccacgggctcctcgtgggcagcgtccgggccaccgccgctgctcctttacctttcgcttccttctttcctcatcgtccagatgcttctccttctcggacttcttcttcttcttctttttcttttctttgtgcctctctcgctcatggtctgacctgtcatcatagtaactggagtcgtggccggatcctgagagttcagtcacttcacttcctccgaccttcaggactagctttagaggcttctccaggggcttgtcggcataatctgcacagacacagaccgagttctacccgcgtgctcaggtgcaaacgccacgcagccaggtgagacgtgaaggtgctaagagggaaaggcctccctaaggagtacagcggggctgccaaccagcagggaaagacggaagggaagaccacagtggcggcatgtcactgcctccttgttctcccttcccctccgcagggagcttcaggtccctttcgagccacggtgtcctcaccagaggccctgtgggatgttgttcacattactcgttcaagaagatggattaagagggacctggaaccccggagcccgatctccctcctagaaacccccagcacttcggttcaccctcgcctgacttcctgcaggcgcccgtgctgcccgctgacacccatggagctgctgcgggagcaagggagagggagggaaaggcgggagaaagggcagcccagcttctccctgagctccacacaaaagccagcacagatgcttccctagtctccaggaccggggtgagtgggcttgcagcctcgaacccagaaccctctaccaggaacgtaagcgcctacccaggacccctcacgtgtgcccggttccctgcccgaaatcccaggaccccctcccgcgtgcccagaacccctccctcgtggccaggacctcgcccggtgcccaggacccccgtccgcgtgcccggaactcctcccccgtgcccgggaccccgcccgccgcgcgtcacaaagcgccgccgcctcaccctcgtaggacgagcgccactcggccttgtgcttcttgtgcttcttgcccatggcggcgccggcggcgggcccgaggcgggggctgggaacagctggcacccggtcggaccttggccgccaccgccccctggccctggctggccgcccgcgctcgctgcgccgaggttgccgagctcgctgggccgcgccggaaacggggcgaggcggggccgcggcaggaagtggccctgccgggcccgagcgcttccgggtcaggaggtggtgcgcctcgcgcggcagattcgaagctagggcggggcccgcgggctgaggcagcggctgtggcggcgacgctgggcgtgaggtggcggcggccgcgccctggttgggtccccactgctctcgggggcgccatggacgaggccgtgggcgacctgaagcaggcgcttccctgtgtggccgagtcgccaacggtccacgtggaggtgcatcagcgcggcagcaggtgagccggacctgtccgacacatcctctgggcacccacccgccccgaccccagcgcgtgcaccgagccccgaccccagcgcactgattctgatgcgaccgaaccccagggtactgatccggcccgactggacccgggcgcacaggccgccgggccccgaccggatcctagcgcaatgacgcgaccccaccgcagggcactgacccggccgacccgagccctgcgcgcaggaccccagctcacagattgagccccgacccgacctcagctcacggacctggccctgaccctgcccctgccccggctgtcctccagtgcattgatgtggccctgagtcccacgttggagaataggatggctgcgcattacagagagctctagtctcagccgaaagctgggtggttattctttgagccactgcttctcagaccctttaattgttcccgttcctcacggactcgatgttaaatttttagggttcaaagcacatcccactcatttgtgaccaagtcagttcatggtatggtggggcctgtgggctgtgctgctccctggagtggggggaactcagcggcggggccagaccttcacagaccctccttatgtccacggagggtggattgaggtcaggtgagaccaccagcctcagaggggatgcagaggaagagacctttcctttaacagaatagctgttgactgggtattttctaggtgctggagttcagacacgtcagcataattgcaccagggcccagagacacctgcacaaagccccatcacagcctggcgacacctgtgtaaacaccttagcgctcagagacacctgtacacagtgccaccgcagcctagagacaccccatgtacaaccacacctgggcccagagacgctaggcataatcacaccagagcacagctgcacctagaggacagacacctacgtacaactgcaccagagttcatagacacctgcacacaaccgcactatgcatggtggtcgctgcttgtagggtgctgggacgattgcaaaggggccacatgtcacctgcctggctctgaggagcctgtccaggagggctcagagggaggcagacattgaataggacttagagggtgactgcagttgatcaggccagtaagctgggacagtgcatagcagggcacagaggtgtgatccgggaccaggtcactgttgtagaaaggggaggtgttaggaggactgcagcaagggggaccaagggaagccctggataccaagctgaaagcattagattttctcagcacgaatcacggctattggagacttgttacaatgcagaccccaggcctgaccccacagctgtggaacttcattagtaatagtgaaagccaacattattgcgtgcttactatgtgccaggtatcgtcctaaacactttgagtgtattaatgacttcacagtagcccagcatagcgagaactcttactgttgtcccctttttctaactgggagctgaggcacagcttcttcagggcacagctggtagaggacccacaggcaaggggtggctctagatttggtcccaggcaggccaactccaacttaccctgttaactactgggctttcttatgtattgtctgagtttttcaaaacacttcattttaacattttgtttttgaactaagatcatttatgtgtgttttggcttctttttttagcactgcaaagaaagaagacataaacctgagtgttagaaa

SEQ ID NO: 317715 - DNA, 4001 bp, Homo sapiens
ttcccagacatgagcacctccaatagatatggttgactagctttttcaacagtttactttttttgtttgtttgtttgagatggagtctcactctgtcacccaggctggagtgcagtggcgcgatctcggctcactgcaacctccacctcccgggttcaagcgattctcctgcctcagactcccgagtagctgggattacaggtgcccgccactgcacctggctgatttttttttttttgtagtgttagtagagacggggtttcaccatcttggccaggctggtcttgaactcctgacctagtgatccacccgcctcggcctcccaaagtgctgggattacaggcgtgagccaccacgctggaccatttttaaagtaatacttccatcacatccttacttcccagagttttctaaacaaagttcaaatgacatagctttgacactgaattttaaaatagattttcacgtctacatcattattgccccaaatgaagcctaatgcaatccaatctggctctattttttacatttttcagcatttccctacttcaaagtctttcatcggtttttttttctcccttggagtgttccctctcattttttgaatgtcaaaattctacacttcctctgatatgcagcttacgggctaaatccttcatgattctttatcttattatactagggtaaaaataatctatatctcctgcacttccatagaatgtatcgaagtatggctcagattatagatactacctagctcaagggaagagtgagaacactaacatttactggaagtgtacaagtccagcttatttttcataaaaagtaaatattccctccccctgccccccaatctgcaggtcagaaaagagcacagaatgttgctgttaataacggggctagaatttacacttatctttcattccacagagctcacttctttcttagagcttgccatcacaccacacggggtcatttacttatcacctactccgcgctagagtactatgctaagtgcggaggacgcaaaaattaatgtcaaagataatccttgttcacagtattctgtctagcttaagaagagttcttagttgaatgaaagctaattctaacaacttgtgtgcacttcttttgaataaaaaccatcaacttatttgaattcttaagtttcctcctaaactccaacatttcaggaggaagaggtcacattctagtcatctttgcaatctcaaacccaaaggaagcctaacttggtacagtgcatggcacattcaatgtctgttgaatacaagtaaagctcatactacctagtctatttttcagtatctcttgagttaatgacctggttaacaagtcagagtcacagtcccaagggcaacaactttttaaaggctcccctaacgtacttcaggatccctgactgagagtggctgactatggcagtatatgggcatactaatcactggagaaataatagcgagaaataaccaaggaaaagcactactctccaaaaacattaaaaaaaaaaaacaactgaacaactagtaagaaagaacgctggatctgagcaccctgtaagtcgcttccccgtgggccgggtaaaggttttaaaacccgccgcctccaggaagacggccacgtgcacaaggattagctgcaaactccgtgcccagtctggccgggagaattgctaaaaccgacctaccgttaacacccgggctactctgaaattaagcaaggctgtagtcaagtaagtaacccaagaaaaggcgcacagagccgccgccgcaggtgtagcccggggacatcccctcctaccttgcaaacggggcctgggatccggtccctctcttcttcctccacctcctctgctgtggcgtgccgcttagctggcggctccgcatctatttcgtttctttttggcttcttcgcctgaactgcaaagcctccacgccgtttcctcttggttgccgccatcttgcctcgccgcccgcgctcttggcctcctttccggcgctgccgctcgctcctatttccgatctctatggttcggcggctctaagcgctcagctccgcggtcgtcctccaggtctgtgccgcctccttccggtctcggtggcgcggcacgcgcggctctctaggcctccttcagctctgtggtgacggtggccgaggtggagggccggtctgaagagtggcgggactggcttcacttcctccgcggttcctcggagccgcctcgctcctcttcagggactttgctgagaagggctctcgggcgtccagaccccaccgcaaaggtagggtttccgcactcggggaccccgagactagtaagcgatgctgtcccgcgggcgggctggtgaatggggttgtctgggactcttggaggattatctggacactccgggcccgccccgccatcgcctgttttgttggaggcggggctggtggcgcgggctgcacaaaaccgactccccgcggatttgtagctcctgtttggccgggagataccgtgtcagttgcgtgtcttcattcttcacaacttttcacgttattgtcctcttacggagacgaggaaaccgtagcttagataattttcctccagaattacaaagatagttaagtgacataggtggggttcggcctggtcagccgtgttcagcctcccagcccctttccacctctcagcgcaggtggagctcgccggacctcgccagcactgatgggagttttactgtctaatcccttcaggtgtttggcgatccgccgagaagttgttggccccaggagcatccctcggggccgaatgcgcagtggacgatgccccttctgacccaacagatccaagacgaggatgatcagtacagccttgtggccagccttgacaacgttaggaatctctccactatcttgaaagctattcatttccgagaacatgccacgtgtttcgcaactaaaaatggtatcaaagtaacagtggaaaatgcaaagtgtgtgcaagcaaatgcttttattcaggtatggaagtaggcgcctttaagcctgtgccatagatactctaaatgtaatttaatgaaatcggaaggtttcagtagacaaaataacttaatagtcataataacttgtcaatagtcataataaataacttaataaataaataatagtcttaagttagagaacaaaacgtcattacttgaattttttttctctcccggtaacaaattcttttcccatcttgttttacagagataatggttagtaatgactaaagtttattaaactaggctattggctaggctacagtcttcttattgtttaacttatttaatcttaacaatagtcctgtaaggtaggttctgttattattcccgttttatatatgtggaaacgaggcacaattttaagtgatttgccaacagtcccacagctggtaagtggctgaattgggataagaacgctgaatatttgtttccagaatatatgctcttttttccactgcgatatgctattactaaagagtatttttttcctttactggttgtaatagaatttttgttcttccaaagtaatatttgtgtggttcagataggattgcaagttcaactaagcgttttttaacacgtaagtgcacagcatgatctcagggatagagaggtaaataagacacggttcttgtcctcatgcaggggcatggtatggtggctcacacctgtatttccagctgctcaggagaccgaggctgaagcacgaagatcgcttgagctcaggcattaaagaccagcctgggtaatcatagtgagacccccgtatcaataaaaaatcataataaaagttgaaactaatgttgctcatgcattatcaagtcattcgtctattttccaagtgaccttagcagtagtgataggcacaaaaacgagacaagggagagtcacagagggatagttttagatccaggaatggagataaggatgcttcaaaggatgtctctaagatgtttt

SEQ ID NO: 317716 - DNA, 4001 bp, Homo sapiens
atgatgagagtaacaacaaaaagactgcacataagcacattattcaaattactccttctgaaactgtactgaaagtaagagtggttaaaaacaccaatataagagcatccaaacactgagacacaaaaaatttgagttttgctggcacttgaaggccacagtctgataacaattgattaaagaggacaagaaacatctaatgttgttaaatgtgtgggtgtggatcctgaagatggctaacgttaacaaaaataaaaagtaaaaaaaaatcaggataaattcaccgctggcaaagttcagtaatttaacaaagctgtatattattatttaagtctaagtgcaacttctggctatctcacagctaactctaagttaaacgcttaaagttgggaaaaactaaaaggtaataaacatgtaccatggaagctttacaagttttaccaagtaaagacatgctctgtttcaacaagctaccacaccttgttaaatactaagaatgtgctaacaatacaaactaggtagacctctgtctacagtggacttcttattaattacaggacaatctaaaaatcagcttcaaaaaagaatccccttgatgtgaatcagtatccaccaggaaaaaaacaattaatcaaaaactgatcatttaaaaatcagtcactttaattccctcatttttacagtaatacaaagtcagaacaggaaagatacctacttgggttatattttcaaatctaatagtcactgctcttaaactccaaaatgtacccgtatcttcaaatacccttgaaatatgcaactaccctaaagaatatttagttcagaaagcagtacagaaaggtctcaatttacaagagagacaaacaagcactgactttagaaaactcaggccaaaacaagtcaagggtatgatgtgcacaacgatctaactgaaatgacacattttccttactaattaaattaggaaacacttttgtgttctacttacactctgtaacactgaaaacacaaacatgtttacacaaaggcgatgtttttagctcgtctcactgatgtgtctccaaccctcgtctcccccgctcctcgagatttgctagctccgtgaatttccctcgataggcaaagtttgtcaccgataatataagaagcgcaaaaggaatatgttttttaaaatacctaaaccttaaaaaaaaaacccacaaacccgaactattaaaacttactttcccaccaatgcgcacttgtgcctgcagtttggcgagtttttcctggttcatgattgtttctttcatctagaaaaagaggaaatcctcagcaaggataggtttagctcactctagcattccatgctcgttatttcccaagataccagcaggaaaataaacgtcctacacaggccgaaacctggatcccaaatccaccccgcaaagctccaaatttgggtttccagggagcccaaagagcacccgcctccccaccactcccccacagctccccgctcttggcaggcccggatgaaaggctctaccccacgcctggccagcaccccccacccctggccctggcctggcctcggcctagccagggcctgcccggcccggccactctccgcaagcctcgcggtacctgaggctcctgtcctcgggttccgccgcgaggtggaggttgagacagcgtcgcctcgcccccagggcagccgcccctggctcgacctcgcccccgagagtcagcctgagcgggtgcgcctgtccgtcgcatcgccttcctctcctcctctgccctgtccctccctgtctcgctccttcagggaacttcccgcccccgctcccgtcctcctaccacgccgccgtccagagcctttttgtaccttgtcggagcgaataaggggccgcgcgggggactagggttggtgctcaaggggtctcgggtggaccacctgagattaggcgcacacacgcggggacgcaagatggcagctaaagggaggccggaagtgacacaaggccacttccttcaagagtcaggaaactgacttcgccgcgaactcggttcctccctgcgcacgcgcgacagcgtttgtgatggtccagcgagtccctattctcctcctcctgctccagcggctgccggctgtaggccctacgagagactgctggcttggggcgcagcccgtacctctgggagaggccacaaaggggtcggagagcgcggtcctgtgcacagttagggttaagtccgctcagtctccattgggccctgatcctgaagttctgtgccctccgaagaaagggcctattcacgtttcctggagacgccggaggtgcccagcttgtgctcaccactcaagcagctctccccttgctggaggtgtgggttggagaattgcagaatttccctctcggcccgaatgagccattaccaaagcattttgtcaaaaatagtgaagttagtttggccttccaaggttaggtggtgtggtagattgcgggaccgaggttcagaatttctgggggctgtatccccgagccccactcctcagaatgcaactctgtacgacgaaggaactgggtaatccgcatttcagccaatttagcagatgactaaccaccttaaaacggtccacacaattatcttgtttatcaggcaaaaaaattgactcctaggtaccgaattggcatggatttgacaattagcgattcacggttaagcagactttatctatcttaatccaatcaaaggagaatttctgcctgctgtgtttggagagacaacgcgtggatgtgagttaaactttgttaaacccaggacaagctttaagataaaacgactgatatttaaaatggcaatttaaataaaaatgttctctgatcagcctttttgtggtcttaaccatgaaatgtctttgcatattcaaaagtgagtccgaaatcttagaatgcaatgtgtgtagcaagaaaacttgttcaagtgcagacccctctccagttaagatcaatgtttaaactttttgaatactttttacatataagtttgttgcaactgatgtctcaagaacataactggtgaggacagctgtattgccttttagaataattgttacagttatatttacaaaaaacaatgttgcttcagttaaatatgagtgaagttttagtacaggtaagggtgtttgtagttaggcttatgtgggttaccttcctaatgacaaaggccaaaatggcagtaccaacattatgctgtgctctggagatattacaaaatatatagaaagactcccccttttggaagaaatgtgtatctttgtccaggaacagtttttttcctctcctccatgttatattggaggcatttgaaacttcctagtcacgtgatgttttctgagcttttatagagacaagattgtatgtatgtaacctgccaccttttttttctttttctttgccttccctctcctctgcccttttaatacacctgttttcaggaaatattgtgagctacttttatttatttatttatttctactttttgaaaccagggatgctgctaattttatttttataatttttttaaaaaatataaaactttaaaaaaattaaaagagatggggtctcactttgttgcttaggctgggctcaaactcctgcgctcaaaggatccttcagtctcagccacttgagaagctgaaactacaggtgtgcaccactttccctggcttatgactttttaattttcccctcgttcctacttttttctcctgttctttcatgaatttaaaagtttgctgcgtgttgaaaatataaaagattacttaatagtaaaaaagaaaattttgattttctttttacgttctgttttggtttggtttttgtgcttttctatttagagatggaggtcttgctatgttgcccaggctggtctcaaactcctgggatcaagccatcctcccatctgggcctcccaaagtgctggtagtacaggcatgagccacgatacctggccaa

SEQ ID NO: 317717 - DNA, 4001 bp, Homo sapiens
gcaacctgctcattagcgcaccctctatggcttacctcccgctggcttcactctctgcaccctgtcacttttgtttctgagaacagtctgctaaacaaaccacctgcagaaaggcccttgctctagatcagcttttgggacccagcctgtcagctgggctgctgtgagtgctgccttcaaggctgtgtgagactctcaagccaggcaaacagtttttagtatatgtctgtttctccggccagccttgctgctgtcatttgtcttgccgacagcgtctccctttactccttcccctggggagaagcaaggaatgacactgtctgttgtcgcaacatactgtgccccagcggagctccgtgctggacgctctacatgcacgagttcacgcaatccacacagcagcccttcagccacaggaatgtcacagatgtgatcttattatctctatgtcatcataagcaaaaattgatgctaatagaagttattagccacaagctcatagagaaaaggaaagttttaaaaatagtgttacttcctctaaggtcatttccagcatgccctgctgcctcatgcagaaacagaaagcagacagaaaggcttgtcagaaaatgggtgagaatgtacttaaacggaggctgtcttgtgagtaacatacgtggattgtgattttttgtttttgtttttttgagacaaagtctcactctgtcacccaggttggagtgcagtggcacgatcttggcacactgcaacctccgcctcctgggtttaagtgattctcgtgcctcagcctcccgagtagctgggactacaggcgctcaccaccatgcccggctaatttttgtgtttttagtagagatggggtttcaccatgttggccaggctagtctcaaactcctgacctcaggtgatccacccacctcagcctcccaaagtgctgggattacaggtgtgagccaccacgccctctgagcacacatggattttgatccccttatttctgttttgttggctttgtttagcaaaacagtcataggtagacaaatagcaggatggaactgttccagacagaaagtgaacacagtcaaatgaactttttgtggcttaacactgaccacccagaatccagtgttctactccagcccctatctctccctgcaaaatttatttgattactgaatatcctatacaccaggctttgtcttgatggttactagaaggagaaagaagagtgggtttctgcctagactatgccaggttccaacttactcctcacttaaaggtctggtgctctaccccataactacaggtgtttctaactcagcatgtgcataactggacacattgtctttttctccaaacatcctaaacagtgccaccttccacccaggcacccaagtcaaaaacctggggattttattagagacttcccctgcctaagccccacagcccacctggggagaacaatgtgtttaccttggcgttctcaatgtgttccctccctgctcccagggcctgctcccattattctgagctactgtgatagtgcccaagtccttgagaaacagcccaaggagtcttcctcaattcctgctgccctgtgcttcccacagctcctggcattggtagtttccagcctgaggccaggagaagctggagaatgcaagcaccaaagattcctgcatctcactgtgctgagatcattgtcatgaatgaactcaaaatattattcaacaaggagaaaaacaacagtccaaactgaaaggcttacctgacaccagctcgtagaaactgagaaccaaaatgagcacaaaagccatggatattcctgtgggttgatctcacactatgaaaacagatgacagcaggggtggatggatgatttggaggtcaggccagctgtctcaggcgcaggagccgtggagaggctcttcatgaacgatgtcaaactgtgcatttctccctagagcctccctaaacatggctgtatgaatgaggagtatgggcactggagtttgagtcactgcatttattggcaggtcataaacatctatctcagaccagagaaatgataatggaaagagagtagggtacacttggagggactttgttctgggttgtgccccacataggtggtaaaggaatgccagatgcagagatattttcaggcttagtctggcaggcagagctgcaagagagagtgaacatctgtccctgaaagagagattggacgggcgcagtggctcatgcctgtaatcccagcactttgggaagccaaggcaggtgaatcacgaggtcaagagatcgagatcatcctggccaacatgatgaaaccccgtctctactgaaaatacaaaaatcagccaggcatggtggtgcgcacctgtagtcccacctacttgggcggctgaggcaggagaattgcttgaaccgggaagagggaggttgcagtgagcccagattgcactactacactccagtctggtgacagagtgaggctctatctcagaaaaaaaaaaaaaaaaaaaaaaaaaaagagatcatctcagcacagggtagtgaggcagtgaatttgcccaggcacacaggccatgccccatgagactcatatttcctggcacagcatgaggtaattctgcccatccctcccttgtcttgagttcagggacaggactctgatcatgaggccagattgtgttgaacttgccagaacaaccaggaccttgatctccaaggatccaaggtattgagaaggggaccaagacgatgtttcaggcccgggggtaaggcaaaggcaaagatgcattcattcagtcattcattagatgcactaagccaggacacacacagttagggattatgcagtgatttcaagtctagggacatgcacaaagaataagcacttactagatcagaaagcaggtttccacggagagcaccacgaaggacaacgaaggtaaagagcaatttaaaaagaggaaaccccatgaacttagaaattgttaataacacaattttaaataactaatgggtctaagagaactaataatagaagttgaaggtaattagactagaagaagaatgaaaacactacatttaaaatactatgatgcatgtaaggcagttcttacagaaaggcttatccttaagtgcttgtattaggaaaaaagaagtctgaaattggctgaacaaagcatctgagttaatcagagttaactcttggatcctgagggtctctggccactcgccttgtcttttctctcccttcacttttctttttttttcccccacaatctgtaaacatgtaatcctaccttaagtacaaagccattacaaatgcaaaaaaatcaaagattacaagtcaatttctttctgcctacagtaatagctgaaatgtaaagagatcaacttcagaaaaaaatacattgaaaaacataccactttaataagacaaaactgcaaattagatgaatagaaattaggtagatccatttattttttaaatacaagtataattttggaagagctatttgacaaattcagcattaactgccaactctgtagacatgtttaacaacaacaacaaaacaagacatttactcttggcccttttagtacaggtgaagtgtcctattgcatcacaagtattagtaatgaagtaacagatccaagggcataatattaaagatgtttttttccaattgcgatttagttgaaaaataacataatacgaacatatatgaatggctatcaagaccaccagtgatctgcagaatacctagaggcctacgtacttagaaggctgaaactagtaaaacagtattaaaatcagtgtttttattctaagatgagcaatgacagagtgagatttctgattccaattttataaggtgcggtggggagttgagaggagatattggggaagactggcactttgtgctgagttagagatgggaatgtggctcaaattagttaatattcagagtaggatattgttttagaaa

SEQ ID NO: 317718 - DNA, 4001 bp, Homo sapiens
gccctgctcctcaccacccaaccctgagtccccctgcagtgggatgggcatttccctgcctgctgacagctccgtccctggagcctggcctctgcctctctgctgagggcttcctgccacccttggaacctacttagccctggcacaaggcagctcagaaggtttgcgattttagcagtcctgggcggcacatctcacccagtggggaaaggagacagtagatgttggaatgactctgagccaccatctataaagttcctccaaaggtcccagtgggactgggtcccagttgccaccgcagcaacgctcattagcgcaccctctatggctttccccctactggcttcactctctccactccctcactttgtttcccagaatcacctgctcaacgaatcactggcaggaaggcccttgtcttaggtcaggtttggggacccagcgtatgccagctgggctgctatggatgctgccttcagggctgtgtggggctcttgaggcaaggaaacatttttcagggtacctccatttctccggccagcccttgctgctgtcacctctcttgcctataacatctcctttcactccttccacttccttcccttgaaaataagaaaggaacaagactgttgctgcaacatgccatgcacccgtgcagctgtgtgcactctacatgcacaagctcatgcagtcctcaccacagccccagcaggaatgtgatcgtatctccatgtcatcataagcaaaccaacacctaaggaagctgtgaacaataaagctcacaagaaaatgaaataagagtttttaaaaataaaatgtttctgtctccaagatcatttccaggatgtcctgctgcctcacccggaaacagaagggaaacaaagaagctcgtcagaaaataaatgaaaacaaactgaaacgagagcgtctcctgttagtaacacatatgggtttttgttttaaggaaacatgctctatgttttgattgcccttatttctgttttcttagcttcatttagcaaaaaagatataggtggacaggtggcaggatgaaccttcacagacagaaagtgaacacagtcaatcgaatcttctgtggctgggtactgaccatctagccaccagcattctaccccaacctcaagcttcctctgtgaattgtattcagtcactcaacatcctatatactaggttctgtgttaacagtaactggaaggagaaagaagagtggatttcttcccagaatatgccaggtttcagctaatttctcacctcaagacctgtacaccttcctccaccctcgtgtctcataccacagacatttctaactcagcatgtctttagctggatacattgtcttttccccaaaaatcctaactgtgtctcttcccagatggacatccatgtcagcaaccttggtgctccaataaccctgcctacaccactcagcccatctgggagaaacactgaatttattcaccttaacacgttaggtgtgtccccgtcaacgatcacggtgcgtcttcaacacccgtgtttccattatttgggggctactataattgtttccacagcgcctgatccttccccaggctgaggctaggagaagccaaaggaatggaaacgacaaagatgccttcattccattatgctgcaaccattgtagctaaagaactcaaactgttagttagtaaggaggaaacaaagatgagtcttacctgatcccagcttgaggagactcagaaccaaactgagcatgagagccatggatgtgttctgtgaatggacctcacggcatggaaacggatgacaggagaggtgacggatggattagagagaagaggagaactggcctaatgctcaaggtgcggaagccacggagaggctctgcgtgagcggagggcaaactgcgctgttctgagagtctactccatcgagacacagctgtcatgtaccagaagtgtagggactctagactttgaaccactgcataaatgtctatatcttatcaaggaagcaaagatagaaatagtgtggataagattggaggtgaactttgtcctgggcaaaacgatgccctgtgtgggtgaaacaggaatgtcagatgcggaaatacttttcacgtccaatctggcaggcagggctgtatggccatgggatctagtcctgaaaaacctcatgttagcactggatagtttggtgtccaagtaaataggccatgctccattagtagtagcctacagcaggtgacttgacatttcctggcacagtctgaggtccttttgcttacccctccattctctgaagttcagggccaggactgtaatcatgaggccagataaaaataactttccagaacaaaacagatccttagtgttaaacatctgatacattgggaaaggtgcctgggcaggttcagacatgaggaaacttatttattatataaactaagttccagggcagccacaatgagagatttgcagtctttttaagcacacggaaactcacaaagtcaccacttaactagatcagaatgaaaatttccacagataaccatcaaaataaacatactctaatcataatgcaattaaaattaaaaagtaattcaaaaacataggaaactctatacactaagaaattcttatgtaacaatttaaaacaactcacgagactaaatcacaataaaagttagcatctagaataggacaaaatgaaaacactgcatttagtctaaaatctagaacactgacaacaccaaatgctggtgaggatgcggagcaacaggaattctcactgattgctgacaggaatgcaagacggtacggttgttctagaagacagttcagcaatttcctgcaaaattaaacatacttttatcacctaatccagcaactgcactgctttttattcacctaaatgacttgaaaacatatgtccacatgaaaaattgcacatgaatgtttatagcagctttattcataattgccaaaaatgtttgcaaccagatatcattcaataatgatacatagaatgtatacacaaactatggtacatctatacaatggaatattactctgtgataaaaaaaaaaaggaaatgagttgttgaatgttgtaagcaagagagtagaatagaaaattattgatctcatgctgtctcagaaatacagatttaccaaggatatatagaccaaaatacctttttatgaagctgctgagaaggcacagtatcctctccattccagtggcagctatgccccacccatggccattcgaagcctaggcctaggcccagtggaacggtcatgacccaggcttctgaacctacaggctgctctggcccccaaggaccaaacagtccaacccagcaaggaagccaagcctggcctggtgaagcagttgtaccctctcaagcatgagccaagcaccttgaccccagagaagcatgcgcaatagaatggcaacaatacccccttgtgtgcacactaactgggggccccagactcagccccaggaaagcaatgtctgagatggtggagcagctgtgctcccttggcacataaagcggcctggtgccccacctccagaaaagctatgcccaagccagaacactggtcttattccctcagcacacaaaccagccctgcatcccacccgagggaagctgtacctgagctggtggagtagttgtgctctcttggtgcctgagctcagtgtaatctactttgctaccaccactcccacaaattactgcagtacgggccactgaggcatccacttgtcactgacattgattatagctgagaagcttcacagagactacgctactgtgccagccagaagcagagccgatacaccctactcagcacccgaggacctatcaacaagtgaaagttttttcttagaaaagctactttataagttaggagaggcaaatgttctaccagatgcacatatatcaacacagggacacaagaaacatgaaaaagcaaagaaacatga

SEQ ID NO: 317719 - DNA, 4001 bp, Homo sapiens
atggaacaggatatgctcccggcgttctcttggacggtcagagagatctccacatcaaacaggccatgcatgtctctgtttgtcctggagtctgtggacaaatcctgtccttgtggacctttccacttcgctgtgggccgggggaaccagcccgaggactgacagagtagctggatgtctctatcaacatatcccgtgatggaaatgagaggaactgagcccagtgctggggagaaaacagggaacggttgaaagcaaagatcacatcccaaagccacagcaattctgagtcaggtgcattcagtccaccccccacccattctctctcttacacacacaaacactaaaaccacgacctttggcaaaagccttcccatggcctctgttcgttgccattttttagcaactactgtgtatgcgtggctattcctaagcaccagtcatgatgaagtaagacaaaactgcttctatgagaaacttgtcaggagctcagctaaagtagagagagtgctgagccgccaggcgtaggagtaacagaccaaaggaacgatgacccgaattaaagtaatagtgaagcctctaatcagttgctacaaaagtaagagctaaaccaaggaagatgccaacccctccctgtctcatcctcccccatgaaatggaattccagttgaggggcagatggatcatcacacgtgtggggctgactcactagtgatggagtgctgaacaaaaggcttcacagctttatgaatcctgagctcaggaggaggtgtagggaggaggaattagagggtaagatactggatactaagacagagtagagaaaagtgtcttggagtttgccttttctgtcatgggggaatggcagccagtggtgtgggggtaaaagaatttaccaagatggttgtaggtagagaaaggcagatttattagagaaagtaggaaagtactttgcaaggaaggcaataggcaagttagcatgagggaagctaactgcaagaaaaaaaagtctcagggattttatagaatggagcttgggctgatcgataatgccaaggtagcagggagcctaacttatattcttttgtcagctgggatatttgataaattgaggtgtttgatgataagcaggaagtctgtgagttatgtatgttatctgggcaggaaggccaaatgttctgggccatatatcctggactgtatgtccaggatgacgaagaaaggcagacctgtagcttatctgctgtctcttttgtttaaattttctagacatgaagaaaggcatgtttatagtttatttcctctttttttttttctttttgctttcacctggtcctgccagcctgactccttttccctaattaggactccacattctcctccttgttataaggcacttgaaagtcctgcccaaggcctgagattctgagaattaaaatgcctgggctagaaatgcaaatatgtaaagaccaggacagcttagccgggcctgagggctcacctgaaactctcctcagagactgcaaagcattggttgtactccaagtctgctatgaggaggaggccttccaggaaacgcttttgaaaattgcctatcatcaggcctgaaatatcactcatagtggtttttaaaaaaatttaagttagtcaaatttagcagtggggagtcgtatgccaattgtagtgacactactaagttcggataatccactaccgtcagagcagccccactcacaggtttttaatcaggacacagattattcacaactcactgactgcacacggcaacaactgtaaacaataaatttctgttttttccttctttcatcttcttttttttttttttttaatagagatgaggtcttaccatatgcccaggctggtctcgagctcctggactcaagcaatcctcctgtctcagcctctcaaggtgttgggattacgggcttgagccactgcacccagccccgtcaaatacatttcactgtgaagggtgtgactatggaagtatggtcaagttaacacagagcattgagcaactgattgtcaggggaagtcacagcttcctggagctgacgtttgctccctgctgtatcagataaacaaaaaatttgtaggacaagtgagcaggaatctttatttgttaatttaaaaataaatgttcataaggaaaactattttgacagtggggaaaaaaaagaaataaagtatcgatacaagcaataatttggatagatcgcaagagcattatgctgaatttaaaaagtcaatctcaaaaggtcacctgcggtgtgaagctgtgtatgtaacattcttgaaattacagcatcagggagatggaaaaccccaggcaggggctgagaaggggtgggtgtgaccatgaaggggtgacagagggagatcttcgtgatgatggggtagttctataccttgatgtgatggtggttacctgaatttaaacatgtgacaaaacacatagaactatacacacaagacagaaggaacgtagagtatagaatgctgccttctaactaaatgacctaaaattttaaaatttccttattgaaaaaaacacttataaagtccaggatggttctttgggacaactaagttatgaaatatgaaactgacctgacacctgtagctcccagatggccttctggtagtaagactgggaactaatcctgcacccatagaggccagcatccaacacagtaatgttttccagcctcagagagatgcgcccctccgcaatagaatccttcaccagttttgtcctgccttgatactgtggcatctgcataaatggctggtccttcccgtccctgtagaggtggaccacgctagagaactggcccctgaagaaccgcacttccatggcctctgcattggtcttaggagacaggaaacaggagaatgctgcgtcctcccccaccaaggcctggacaggcttgtctggcccaaacacctgccactgccctgtgggaagacatacaaaagataaatcatcaaaaccctttgtagtgagggggaggagccaagatggccgaataggaacagctccggtctacagctcccagagtgagcgacgcagaacatgggtgatttctgcatttccatctgaggtaccgggttcatctcactagggagtgccagacagtgggcgcaggtcagtgggtgcgcgcaccgtgcacgagccgaagcagggcgaggcattgcctcactcgggaagcgcaaggggtcagggagttccctttccgagtcaaagaaaggggtgacggacgcacctggaaaatcgggtcactcccacccgaatattgcgcttttccgatgggcttaagaaacggcgcaccacgagattatatcccacacctggctcagagggtcctatgaccacagagtctcgctgattgctagcacagcagtctgagatcaaactgcaaggcagcagcgaggctgggggaggggcgcccgccattgcccaggcttgattaggtaaacaaagcagctccaactgggtggagcccaccacagctcaaggaggcctgcctgcctctgtaggctccacctctgggggcagggcacagacacacaaaaagacagcagtaacctctgcagacttaaatgtccctgtctgacagctttgaagagagcagtggttctcccagcacgcagctggagatctgagaactggcagactgcctcctcaagtgagtccctgacccctgacccccgagcagcctaactgggaggcaccccccagcaggggcacactgacacctcacacggcagggtactccaacagacctgcagctgagggtcctctctgttagaaggaaaacaaacagaaaggacatccacaccaaaaacccatctgtacatcaccatcatcaaagaccaaaagtagacaaaaccacaaagatggggaaaaaacagaacagaaaaactggaaactctaaaaagcagagcgcctctcctcctccaaaggaacgcagttcctc

SEQ ID NO: 317720 - DNA, 4001 bp, Homo sapiens
cttgggctgctccctccggaaggcacagggagaaataaggggtcctgagaaatgtcactgcctgcacccagcaaaagcccatttctttcttctccttctctttttatttttcttttcttcttgctctctcattgcccccagcccgccccactcctgttctctcctcctgcacctgcaattcctaaacaaccctgatgtttttctgatttccggtccctccgtcgagtctgtctttaaagatgagtactttttgctttgctactgttatttttttagataatttattgttaaataaagaattttaaagcaaaatgcagtgggacagatgtcaaaggcaagttgaaaacataatttctgtcaaatactattctggatttcctaaggttaggcacaagaaaagcatcaaatgaaaaggtacttactcaaactaagtctttttaaaaagtctgtatttgaaaggaaaacaacttttcactaaaaatataaatcattcttattacaggaaaaccataatttaagagactgagaaaagtttttgattcacaaataaatggcatctccctaatacacttaggactgtttgtttttaatcagtgactcttaaaaatcactgcttccacctgacaaactcaggcgaatcactatggattggtgtcctctgagccaccctgaagcatcccattttctctacacatgtccttttctccaactttcagcaaagcaagaatggagaaaaagaggattagaaggaacttcagttggttccctggtgaataacttaacaaaataaaacctgcttttccatttgtattacacattcacaatctctcactcttacttactctattggtgaatttcagattctgtccacacatataattatttgcctgaacttaacactatcttcctgacaaatagtaaatctcccaaggacatctccgaacctggcagtgtccacaggccacgtcctcccacaggagtccctcgcctgctatgcagctgttggcgtcctgagcgatcccagtgtttccatgggggcagagcaaaaccttggggattctctaacataattttaagactacatttcacacttaaatgaccacgttatgaaacctggcaggaaaatccatgttattaataaatgccatgtctcttgctctcccaaacacaggaagtattttttgctctgcatatgtctgcggagactgtggggtcccagagtggaaaacttctctagtaacaaagtacagaaattatccctgaagtatagtctttgctttgctacttctgtaagctgtgtaactggtgaattttgcctgtctcctgtcctccactccccaagctgcaagtccgcaggtgtcagtggggccttggccctctcccacgggcctccccgacaccccctgcaatgcccttccccccggcagaccccagctagtgctcactgcctgcgctggtttgatttcgataggtccacaagaggatttccaccctcttagtctctaaggaagatggactgccccaagaagggaaccgcaatgaggcttgaaatctttttcgtctggtgggggcaatgggatgtatcaggatcctgcctcctgagatgcggcccacctaaacgggcgtggacatctcctcttggccacactcgaaacatcccatgctgcggccaagctcggataataaaatggtgccactaattgtacgccttcccaaagcctcccaccttcattttctgattgccgtttctgaaagatggaggtgtaggcagctgttgagaatgagccacttacctggcaggtagcagcaaaaggtctgaaatggcagatgagtcctggtgagctcacctcctctgcaaagggtgatgattgctgtaaagtgtcttggtcccagatgctaagattccctagacgtggactggcagctgagctccagaggccagggcacgtgtgacagaattatttatccatcttccaccctaagatatatgccgtttgctctgcccttggctatggaaaccaagatggatagaacaaaacaaggaagtcgtcacatcctgtctctgagaaaaatcttgaattcccatgtaaaatatctctccagggtcacagaaggaggggaaaggtatctgagagctttgtagagagcgacagctgcagaggctcaaagtgaggagaaaacgctccagctgggttcagggtctttgtgccagtgaagctcggactccaaggaggcagggtagcagtccccgaacagtgaaagagagtagactgcagtctccactaactaaccacgaggaaggggctgatgaccaatttttaacccaccataaccttctcctcaggacaaggtcagtaaggaacaaatcctgggggcattgtcgtgaggcaacctgcaaaacctgttcacgtgcaacttagaaatgcaggagggtgctggattgggatttctctagtggagaagaggtcagaaaagaagcagcaagcactaccccagcccagcccaccccatcttactgtaggccatggtgcaacttgggcattagcggactgaggcaccagccacccagctgcagcccacactgacgtcccctccagggaacaggccagagctgaggcacgagcagctcaagcacatgcagtgttgtgggaaactgaggaccggagagaccgatgtgaagaacaggaggattgtttattttaggtacacaccggctcagtggactcacatccaaaaagctgagcattaaacaaagacagagcggggtttttgtaagtggacttacaataaataaaacaaaagcagctaatcatgataggtcacataatctatagcatagcataacttgtggccttgcacagcgggtgactttgtagctgcattgaaagaaaaacaagaactggctaagtacagacatttgtaaaacacaatcatgcttaagaagcctgggaaaacagtaacagtaaaagaatttgtctttctctctttttccttcaaccttgctctggaagtggggcggcgggtatctggagcccattcctttggccttggctttctggacactgttataactgtccttgcagtgggcttgctataggcagaggaaaacttgtcctttactttttaacccttgccttgcctgttacttttcttggagtgaatgaaggcatatgtatttttaaattttctgcctcagtagcacaccccagggactcccagaagtgcctgtgtttgtagaggggcctctgcaggtgacagggcgctacatgggtgggagacgggagccagcaagcttcaggcatggacctggaggtgactgtctgtgctcagacaggctggtgagactgggcacccaggcttattaatgtgaacagatgtccctaggacagcaaaaggggctgaacagtgagctcaaacagtgggtgcagttccccgggcctggggagacagaggagggctcaaggacagggtatacttaagatggatgctgcataaacagtaggatcagggaagccatgggcagcccgggaggacagagcctgcgaggacagacattcttcgtggagggaggtgattagcatgtgggaggtaggaaaaggctaggggttagccagaccagtgtgtggctcactagtggaagggaaggttgaacagaagtggatgggaccacattgcagaggcccttgcatgccacatagggaagtgaaagagaaggaaaattgcacttgtagagaggggctgctcgaaaacgagaacatggcctaaacttttcattgcccttaggttggattcctccatgctgcctggggagaggtgagattgtcacagcagaaatgcaaagagagagagaaatgggcagagtccacttctgtggctcctagacacagccctggtgggatgtgggagggggaccccacctgccaccaccgcctgcatatcaggcgcatcatgcagtaggaaagatgtagacagcggctgtccctgccagccgaacctcccat

SEQ ID NO: 317721 - DNA, 4001 bp, Homo sapiens
ttgaccaggaagaaggagtgggtgaagctgtgggtgtggagagagactctgttaccccacagtgaacatttaggagtaggaagcatcagtgattgagacagcaggagagactgtctgatcagcagggtcagcataagagaaggaatagcgagacaggggggaggaatagggagatttgcagaggaaaaaagtgacaccttggagaacttgctgaacattcaatggagacagagtggcttcaaacgtgactccagccttgtgaaaaataatctcagttcatccatacaatgacacactatgcccattagaagaacaaagtaagcctgtatatgcagatatgaaaacatggcgaagacacactgttaagtgaaaaaagcaagttgtaccatggaatgtaaagtatgcttctctttgagtttaaaaaaaaaaaaaacagcacaaatacagagtatatatatgtacagaagggttggggaaatactttccgaaaagacacaatcttgttaaggggttacctttcagaattgggagggggtgtgtgggcttttacttttctctttctacctttttgaactgttcgaatttcttgtgatgagcgtcgttacttttataacatttaaaacaaaaggtaaacctaaggtttaaggattggaagactggtaagtgtggtatccctgctaggagatggggagaagtcagacatttgggaggaaacaaattctgcagtgaatctgatgtgttacaatgaagggctgtagtgatgcttggaaatgtgtggagagtttgaggatcgggcagttgaaagcaggagtaattgatataattactccagatgacagaataaattagagaatggtgcagagggagggcaaaaataaggatgtgagaggacagatttttaacagtgctaactgagcaccagccttggattgacctatgtaagacattgtctttctattactgctacttcagcatggtggaaacacagggtctctgagagatggccagtctaaggaagggacctctgcaggcttccaagcagggcaattttgtggtcaaggagcagaggaggatcacaatgaggtaatgcaagggactcatggtgtcagaggagagacctgggctgggagactattagggcccactgcaattatttagctgaaaagcgaggtcctagaatggggcagcagcagtggggatggagaaataaggacaaagcatattaagacaagtagtttaggtggggaaggagagtgaagagagtcatgaggcattgagtacaaatctctgcctgccgttcaataccttttgagctcagtttgccagtctgtatcatatatttaaataaatgtgaaggttaagtgaaataatgcattcagtaaatgttaactgtgattgttagctcgggtattggactcagatttaccagacttcaagtcccttttttatcaattactagctgtgcaaccctgtccaagtcattaatgtctctgagcccagttcctcttttgtagacggggataatctgttgtcatgaaaatgaaagagcacaagtaaagtgctagcaggacttggcacaaagtaggcgctcaataaatggcagagctacgggtgttactattgtaacgggtaaaccactgggcacagagcctggcacacagtaaggactcaaaacatgttaatttgtattataatacgaaggtagaagtcgagaggcaggaatgcaggagctgcccagcccgcaataaaggcgcgctggcagctctcccaccttccgcatcccgccccgcccgcagcagtgcgagtcctcctcctcctcctccccgcgcgcacttgccgcccccgcccgaccgcggtgcgggacactcaccctcgcggctgcccgccacgtccaggggcgtccggagcaaagaagctctcggcggggctccgcgtcccggctttcctcagcggcagcagccgggcagagcgtcggccccaggcatagttttcccatcccgtcatgggcgggagagccttcctcccggtcacgtgggctggcccgcagcgcagcattctctttttagcagctgtttggaaaaaacttgcagtgctgatgacaactcgggtgtgtcgatgcatctctgcgtttgtagagcttgttagcgtatttggaggttttgtgcgccagagtgatcagagtgattgtttcccacgcgtttgcaaaggtgtgcatgtacttgagtgtgatgataaatcatagggatgtgtttagttgtgtgtgtgcgtacgtgcgtttatccaaattttcatcagggctgttcggtgtatgtacacatgcatgcacatgtccaagatggcagcttggtgtaaaactggagggcacatcagtggttggatgtacacgatagtggctagacatctgtatgtggggtgcatgtttaaatgtgtgtgtgactgtgcaggggctcattctgtgtgttggtttgacatctgtatgtggggtgtatgtttaaatgtgtgtatgactgtgcagtggctcattctatgtgttgatttctatgcatgccttggtgtggattttgtccggatgtgagtgtgcacatacacactagtgtgggtgagttcccctgtgtaccagctctcatttctcttctccccagaaggtgaggattcactggtctcactcactctggcccagcctcaagtcattgagagacttatggagggtctcagctcccaggataggcaaagcaatcctatttgggaatcaagcaggcactggaggaaaggaaatcctccaaggcctggcttttgcttctccctgttccttccactgctctcttccactagctacccatatttcactctgcacagccagagcatctggttaacagctggtaagtgacacaaaatttacagtcagaattttaatacagatatgcatttgaattctaatgttgtatccaccaccttaatcaagtcagataatctcacagatggtgttttattttctaaaaaaaatgggagaataatattacctgcactgcctttaccccaaagttgggacactaactcataaagatgtttggtaagccattgaactatgtagggaattattactaatatcacataaatactatttgagaaagaaagtttgtaggcttaacaaacattcattcaacaaatatttaataagcatccattgtgtgtcagtccccaagcaaggtgctggggacatagagggaaacaaataggcttgatgcctaccctcatgaaacttagagtcctccagctggggatgacacaagtggttacaagtgaaatgagtgttatagaaaagaaaagcttaaagtataaactgggcagtcaggggaaggcctgggaaactgatgtttcaggtgaaccctgagagatgactgagacttgtctgaatgtaggggaagtgtgagctcaaaaaatgaaggaatgataacatgtggagtggagtttagggtgttgatacacagatggctggaaaggaaacttccatccaccgcctcttgggtcagatgtgtcagcaattggaaaggtgaggaaactgcttagaatgcctggaggccattcagaatctaaagggctcaggaaagcccctctcctagagtagagtggtaatatctgtgtgttatccatgtggctccatcatgacagaggttgaaatcactggcatgctctcattggttaaaaaaaaaaggttaatgaaaagttaagaaaggcagtgctgctatacctggtagtgtgaaacatttaataaacactactgattgaatgaatgggggcacatgtttttccaacttttgaaggatacctggaacctaggtttcctgaagcctagcagagttcctgggtccctgtcctatggttccttgcagtggtgatggcttcatgtagcatgcaatccaaaatacttgtccggtggcagttccacgagctgcaggaactgtgtcaagctagaatggggcttagaacttcctctccctagc

SEQ ID NO: 317722 - DNA, 4001 bp, Homo sapiens
atcctcaatatctcctgttggtggtttgtttgaaaatacttcaggaacctagaaggtagagtgaaggagaaatgtgatttgaatttcagtggcctgctgggtgttggttgtcaggacataatgaccaaagacaacctttaacttccttctgcttcctctgggggaatcacactgtcatggccaggaaagataccatctgttggccaagaaggataccatgtgtgaaatggaaagtccagatcaagtcttggacacaagtgaaaatatcttcaccacaaaacaaaaacaaacaaaaacccacacacaaattagtgctaatcattaccctttagccaaaagattatcagatgaatagacaatctctaaaagtggttttcaaaagataggatcatatttagagattatcatttcttccgtggctccttaaagaagcaattttctctggatgcatcccccacagaatggtttgggcaactgccttgtgtggtcaagttagaagttctgggttagtttcaaatctgcaattgattctgtgtgtgatcttggtctgaccatataaccaaacaaccaacccaaacttctgaatccatggtaggaaggatttagatttcaattacaagaaattcttcaggtcctatttaatgcattaaagtaatcaaatcttgtagtaaaaacctgtatgttcaaatatcatataactcaaagtaactcttcttgccccctctgacagttttcagcatactagatgtctagagggtaattcaaaatatgtctcttcctgtacttaatattttaaattacattgagtttcaccaatttgcaattcactatactgaaatcttaactcactctcatactaccaagagttaaagatatttccttagagctgaatttataacctgagaaatagatcaagtcctctgtgattatcaggcatcaaatcatgctataaggtatgcatttcaaacagtttattttttatttaactctttaattctttttaaaacaggctgaacagagaggcttaacaatctagaatgctataaatcaaataaacaagactgccatgaaatgtcacagtatactcacaaatcaaagtaaaaaaactttgattgcttttgacaaactcaaagggcagcttctccctgccggaagggatgaagaaagcccaattctcttaagaacaacaaatgattgtctacagtgaccgatctgtctgcatgggtcagcactcctttccggaccaacagagcaagaaggaaatcaagtcccagcatagcaggaagctggctggccaggttcccctttctgatggggtgatgctacggccactatcccatcacatcattgctgcctctgctgattttctaacagagaccgacagtctctcttgtacccaagagcaatccagaaagagattcacaagcagcttagcgaacttctcgaaagcattcattgattctaagaatcttagccaaaaaaagaacaacaacaaaacaacaacaacaacactcattaagctttcacaaaaatccttagaagagaattctgagtacctggccccagaatgtggtgatctgggctaggtcatctacctcggggtgcggtagctcatctggtctcagggattttaggtctgtagaagtgttattatccacagtcccagttttaggatggctccgctctctcactttctccctcctggagccgctacggccagtctgctggtggctttgcactattcttgccaccactttattagttcttccgctcacctccatgtattcatcttgacacaggcaaaaagggaggaaaaacaaagccagcagttgccaatagatgagctgcctccaaagcatgattctcaacagagcctcagagtctccctgagaagacagcagagctccaggagcgtggtctcctcgggcagatgccaggactggagctgagagctgcagcggcggagtggttttatactttggtgtgtaataaataaggctgtaggcatgccagagtgacagcagccctcctccccaggcagaacagcccccattcatcattttcccacaccacaagcaagaacgatttgtgtgcacagttcccagttggcgaaattcataaatgtcacaccttggcacgtttctgttgaagtgtgaagaaaacatacacaaccagctgggaacagagagcatgtgtccagcagtttgcttttgtgattagacatggaaaggctgtgtatttgcagtctaaaaagccttttggaaaaatctacccttgtgcttgccaggaaattcaggcttaactgcatcagttttgtctgaaatagcagtgggaacccattcagggctttcacgacagctcttggtttctagctgtactgttagtatttccccactttggcccacttaaggtaactcatttccccttccggataccagtggcagaaggcagttggttgcctacaaaacactgagcaggattcaggtgcagtgtctctgggtttagcaaaggtatttcgccaccctcagctttacttcttttccccatgacttcccaaaagccaaaattaaatcaaagttaactaagtcacttattgtcagatgaagatacaacaccctgctttgtgttaagagaaggctgtctctggctcctctttcttttgacatattcttgattaaaatagaaacggggccgggcacagtggctcatgcctgtaatcccagcaccttgagagcccaagacaggtagatcccttgagcccagaaattcgaggccagcctgggcaacttagtgagaccctgtctctacttaaaaaataaataaataacaaaactgaagaagtggaaagcaccaaacacgttatttcaaacacagcgtatccagattaagaggattctcatgtctttgctttagttgctatacttttattaattcagccaaaaagaaaatggacattcctaattgcttcaggataataaattaagagaatttaaacagttttgtcatcaaaaattgcttctatttacatatgattttatttatattactcattcactcgcttaagaaaatgttactggccttctctcatgaaaactggagagacccaggaccgtaaatagcatgggtggcaagcgtctgatgagaagggggcgaggaggcactgtgggaaactgaggcttggagaagctcagcctgctgatgaagagtcagagcagctggggaaaggggagaggagagagagctgttgacagctgcccccattgctcagccaagggcctgagaaccaagagccatctctggaagtggccagaactgtcaaaactagcctggcccctcctgcagctaccagaacagccgcttccagagtccacacttatacatggaaagggtttggtgctggggacggagggagagagttactctgtgaactaaaagctctccaggccacagttcaggggccttgggagtcatgttcagtccaagcagtcagttcccacctagtagggcataaaaattcagccatctctgtgctacaagtctacccttgagcatctaaaccttcctcactggaggattccttgagttctgtcatgtccaccattaaaaggtagatgtccctgggaagggaagtgtgtcaaactgttattcttagtaactgaggattttcttcccagacctggagctggagctggggaaaggatggcgcctgtgtttggagggtgagcaagtggatgggcttttgctgtgggaaggaaagcccagagcagtgtctcagtgggggtgttccctcctcagggaggcccagagaaaatgtcacagggagaccacaaagcaagcagtggctctgaaatctaggtcacccaattcacaggttttccaagagctgtctctggctctcaccatcatgcatcccccacgaagtgggccatactgctaagtaactataaatcagcctctgactttctaccgcattgagactttccattcgtgttttcaatcct

SEQ ID NO: 317723 - DNA, 4001 bp, Homo sapiens
aattataaggtatgcttacaaaaaatacttatatcccaagctacactgtagtgcagtggagctgctcgcctattaaagacatgtatgttcgttttcatttagcttcttttcaggacagaataatctgaatttatgacattttaaactggtgtatgtaaagacttaatttaaaagataaagattctctaaaatgtctcagtatagttagaaaaatatttatagggctctaacaaataaaagcagagactaaaggacacttaacagtccacattctgcctcacttcttgcccaattttcaaccatctcttaggggaaaaaagctgtttctgaaactacagttgccagatatatatcccttaagcattccagcaggaaatataaatgtttgtgttttatttttcttagatgattaaatggccaaaacaattaagctacttaagtactttaggaacgggaatatctgcatcaaccagggaaatcctcattacatttcactaatgataaaagggccttaggaaatggacagcagtccttcctcagggactgcaaagacttctgggagggcgtccagttagcaacactgaaatgttgctgaggaaacataagtatgtacccacagtactgtcgcagaggaatgtagggctggacaggccctgctggcaagaaagaaaacactataccaggtcacactgttttgcagctgaaaattcaaatttagggagaaacgcaggactgtgtcttggcctgaaagaaaaatgggactactaaacaaaataccgtttaatccttacaagttcttaatagtggatttttcccaccaagtatcaggcactggtttacagatttcctaatttctcaataaaagccttcaatctcttgatttcaccatgcaacatttgcaagaaatgaaatattttatcaatcaaatcctacagatgcattaaaacgaggcagggttatcctggttaactcggaacacagggaagaggaatcatgatctcccttgtctccaaactcctctctgcctcccaagccttcaggggcccaacgccccagtactctgaatctttatcaaacaccagaacctcccagtcttcaaatatgcaccagtaccctaagacagctctttccctttcactttccctctcggaaatattccattggttcagtccagtcactggattactgcccctgcccgcctcggtctttaccactgacctctcccattctggaaaacccccacctttccttggtcctgcaagattcctgagtcccccaaactcaggaccctttccagacaccacacccccagccccggccacctcctcagcccctgtcgccaccctctcttccagagtctcctaactttccgatccaagaaattttggagaccccaccaccgccattccttgcggcagcccattcttcaacgatctctaggcgctaacaccactcctccctccccgcccatctacacaccctgctgcctgctccctgggttcctgcatctctcagggaccccgcttctcaggccccttggagaccctaccaccttggaccccttcagacaccataccctccgtcctcaggcccgcggagaccctgacccaaccagacaccgccgtctgctcctgacacttggaagcgccctttccctggcccggcctgtctcctgccctgcgcccgagccctcctagccttcctaagcccacactgccgcccccctttaccactggatagagcggcggacacaagcaggagcgccaagaccagcggccgcgccaaccccacaagggcttggatggccgacccgggcagcagtttcgcttgtgctggccccctcatcctcttcgggacggcagcggccataacggactcggctgggagcctgcgctgttgctaggctctacgccatgaggtcagacgccgcggccctcggcacatacgtcccagcgtggtgacgtcgaagcctggagacgtgctctggaaaccggaataagaaggaaggattgcagggaggagggagttgccgctaggcgaaagtggggaccgccacacagttggctgcggattaaaggtagggtgtgacgtgctgaagagggccaaagcgagcccctccctgccgcctgcatgattgggtactatacagccaaaaatagcgtttttagccattttaaaaaggaagatccagctgtagaacagactgatcacgaaagcgaagtaactgctcttcctctctcaaaggcgaaagaaacacaaatgttaagtagtcctatttcggtgatgggattataagtaatttttaaaaatctttcccgacagtcatttattttttttcaacaaagatttagcacctctccctatttaagatacagcagtgaacaaaaagaaccccccacccccccgcccgccttggcagtttattttcttgtgagggcgaatatggtgtaaaatacacactatacaagatgataaagatattatggaccggccctagtgcagtggctcccagcactttgggaggccgaggagggcagatcacctgaggtccggagttggagaccagcctggccaacatggagaaaccccgactctactaaaaatacaaaaattagccaggcgtggtggcgcgtgcctgtaatcgcagctactcgggaggctgaggtaggagaatcgctgtaacccgggaggtggaggctgcagggagccgagatgccactgcactctagcctgggccacagactccgtctcaaaaaaaaaaaaaaaattatggaggaaaagaaaggaaggtagctaggaagtagaggtgaggggctgccattgaaaataactttcagatttcctaaaataagcttctctttttaaattttgttacttgaaatccccagtgtataaaaatgcaaacttacaaacttccaagaagttcacctagggccctggcgccatactttgctctgtgtgtacgttctgtaaatgtctccttaataaacagatacaggcttcaattcataaaagttccatttgatcaatttcaggaaaatcaatgtgacgttaagcaagacatttattgtgcccacagcttcaccattctggtctctatgattccctgcgaagattgctgttatcccccagagacacagctgagctgtctctctaaagggcctgtgttctactcctgaatctggtttcccctaagcttttatctcaccctggtgacagctcagaaacacacaaactctgtgttaagaaaactaagaagtcattcatctgcacatttcccgaaatcccccagaagcccgtattagactgaatggtgtccttattgcaaactctccactttagccaaggtgcaaagtcctcccagtcccccaggagcttcccttctctgagcggtacttaagttttctgtaaaaccactcagttcaacaaatgagcttctcaatcttagtttctgcttgttgactttaaagttaatctataataaacacactgcagtcctcttccctgactcattgtccactttgtccatttgtgtcctcataccagattgtctcaattctcttaactggtgagatattatgaactcaaagcattttgcacaatgatattccaacatgctgcatgcaacaagcagacaataagtaactagtgagggaaatattccctcatactcaagagaaccctttatacatttttaaatattttagggccaggcttatgcctgtaatcccaagtactcgggaggctgagatgggaggatcacaggagcccaggagttcaaggctgcagtgagctatgatgatgacagtgcacttcagtctgggtgacagagtaagactgtctctaaaagtaaaatatcttaatactgtacctgacatctgactagatgtacccagcaaccactatgtgccataatctctggataaattctatgaacattcacttagaaatagctgcaagtccctgaagacagtatgacaaatactgaggcccacagtttt

SEQ ID NO: 317724 - DNA, 4001 bp, Homo sapiens
aaagacacaggcacacaataagaattaacactgaaaccatgagcacacactcaactgcagactgaaaaacaatgctaaataatgcacataattgaaagcatactatgttgctgtaaagtggaaaaacataaaatttgtttactgtagatggtgcagatgataatctcaagcattactttgtcctcagaacttccaacctgcatctccagcggccttcctgctgcccccttgaactcaacaggtcatgtggggaaacagaccaggactggggctcaggaacaaactaccgcttaatgcctgttctaacattaactaggtgttcaaggtaccctaggtctcaaagtattcttttttttcctttaaaaagggataggggcttgtcagttgcccagcctggaaagcagtggtgtgatcatggctcactgcagccttggactcctgggttcacacgatcctcccacctcagtctcctgagtagctgggattacaggcacgcaccactacgcccagctaattttttcacttctatttttgtagagatgggatttcgctctgctgtccaggctggttagggtctttttggtacacttagaatggtggggttgggctaggtggtctataaaggccatttctcctcttacatcttctctaattctaggtttaatacctaatttgaaagcaccgtctaacctaggctttctcattctctcaaggtcatagacactatatccaggtcctgagaaacctatcttcctctcctattagctgtcaccaacagtaaatccctcttcttttttaacgtccagagaactgcctcccatcccaagcctactgatgctactttaaaacatatttattagatccatgggcctcctttgttgacttggaaaagtctagattaagacaccaatttggctactgtaaatcagcacggccataaacatggaaaccccttttagtgtttatctatgcagggcaccgtgttaaatttttttttttttttacgcaatatgggccgtgcgcagtagctcacgcctgcaatcccagcactttgggaggccggcgggggccgatcacgtgaggtcagactttcagaccatcctggctaacgtggcgaagccccgtctctactaaaaatacaaaaattagctgggtacggtgatgcgtgcctgtgatcccagctactcaggaggctgagacagaagaatcgctcgaacccaggaggcggaggttgcagtgagccgagatcgcgccactgcactccagtctgggtaacagagagagactccgtctcaaaaaagaaaaaaaaaagatttttaaacacagtatgcacacaataatactcctaagagccctgtgagtcctacgattactgtccccatttcagatcagagcccacgttccaagcataaagcctcccatctaaacagcagggctgtggtggcgattccaggagatacttggaagccagagttaactgcaggttaagaacacagggctctgcagccagactgtccggtttcgaatcccgatgccaccttttgtttggttctgggatttgggggcaaaccgaggtaaataagttgccccgactcgtaggaagcgcccataaatgtcagttctcattcttcctagttagctgttttggggtcctctccacagcaacggaatagggcagtttaactctggttaactctctggcctccgatgctaaggttgcgccctctgcttggccctctgagcgtcagggcttccgctgattctgccccagagccctgttgccgtccgctcacctcctgatgatcctccaccacccacactgggagcttggggtaacgccggagaccagcgcgccctcccgcggagtcactcatgtttttgcgcccgtcagttttgcagtaaagcggtggcagctggagaagacccgggaaagccggcgcctcatcccggccagctctctccgggcggaagcgctccctcacccggttgcgttttcggattggaggacgtagggggagggggcgcgggctccaaagggtcttttgctgacgattggtctagacgtccatcgctttcgttgacgcgccaatcaccgcgcacaaggccctgcggtgggctgaagagttttccctcccttggcccagctttctcaggtttgctttttaattccctcggtttcctgttccggaggcgcgggcggtgccactgtcttggtacctgcggtagtagcctggctttgctctgacggcgatctcgcggcccgagagccttttataggtaaaaggggtaccttgcaagtgttagaagagagtttccgagtgtcaggatttaaacggggctggagtctccggggctggggtgaaaagcgtccgggaattggggtcgggcagccccacttcagatctgcagctaagggcaaaagagcgacgctaggcctggatcccgcaaataagtggaagtgaaaaaggagacctttcattcatttgtggagcacacactatggtccaggcctggggccgcccggctctcggaggggagtgagatcctgagctcagcgcctgcctcgtggggcgtaccgtctggcgggagatgcaaacagtaaatgtgcagttatggatcaggatgaaggtgactgccctgcagatccacctggggaaagagggagttctcaataaaaatgtagtcacactttaaaattctttttacatgcactgacgttctggccgtgttaactattcaagacagctccttcagtgtctctgtttccaaaccgcaaccgagaagagacagacggagaaaagagagttacttttccaggtgcagtgaattccttgacttttgaattaaagtctgcatccacaacacagccggactatgccttcaataggtcaatttcatgattagtatttttagattttctaactactgaaacatccatgaggatctggcagtgaatgttcagctcttgttacacactgtacaagagtgttcgtgaccctgacttttgcccacctctaggtgcggcacacacctttgtgttcccctaagccctgcacatacctcttttttgtgtgtttattgcattattttgtatttttaaaacacttacttgtacgtgggttctgagttccttgaatcctacaggctgtgtgtcttattatctctgagtctacagggcctgggacagtgcttcccatttatgggctcattaaatattgcatgactcagtgaaaaggcctgctttctgttgcggaggtacatggaagggaaatgtacagtagcaacatggaaacatactattggtgagagagtaaacatttattgaccacctactgtgtgtaggttgcttttcccggggatgtgaaggatacagaaatgactgtgaatcaacccatatcatcaaggagctgataatctagtggaagagttagacgtgtgcatacttcactatgatatgaggcagtctctggtaagtgctgtaaaaggattaagtatagactaagtctagagggaatgggattacctaagggaatcaggaagggcttcatagaggaggtggcatttaagattgatagatggatagaaaatcactgggcagattcatacgttgggagatttttttttttttttttttttgagctagagtttcgctcttgttgcccaggctggagtgcaatggcgcgatctgaactcactgcaacctctgcctagggtgggagattttagagaggagaacgggagcaaagaactagctggttctttgtactcgaatggtaatctgttgggaaaacatggggtagtagggtctttctggggaaggtactggagaacaagcctgggtccagagtcaatagagccttaaatgccaagcacagaggttgaacttgattctgttggcagtgagtagcctatggtggcaggagcacctgtccgggccccaggtttatcatgagggtactggactggataatagtaataaggagtcaggcgcagtgactcac

SEQ ID NO: 317725 - DNA, 4001 bp, Homo sapiens
aaattttggaagcccaggtgggcagatcagttgaggtcgggagttccagagtagcctggcctggataacacagcgaaaccctctctctaaaaatccaaaaaattagtcaggcatggtggcgggtgcctgtaactccagctactccagaggctgaggcaggagaatcgcttgaacccaaaggcggaggttgcagtgagccgagttcgtgccactgtactccagcctaggaaacagactccatctcaggaaaaaaaaaaaaaaaataggatgaatactacatttccagacagcgtggactgaatagaagccaagagttatagaacaggttgtgtagactatcaaaggttaaagatcatctttttaaatagttactgaagccgggtgcagtggctcacgcctgtaatcccagcactttgggaggttgagaagggtggatcacgaggtcagcagttcgagaccagcctggtcaacatggttaaacaccatctttactaaaaatacaaaaattagctgggtgtggtggcgcatgcctataatcccagctacttgggaggctgaggcaggagaattgcttgaacccgggaggcagaggttgcagtgagccgcgatcgcgccactgtactccagcctgggggacagagtgagactccgtttcaaaaaaaacaaaacaaacaaaaacaaccaataaatagttccctgaatgtacaggagtcaactaagagcttctatatatttggactgtgactaaattcgaatacttaaagcataagctaaaacttaccatccttgaagttgttttattgtgtttaactcctaaagtttaacccctaaaatgagccgttctttatagaacaattcctttctcttctcttgaatgtggcagtcattactgccaacataaagaaatgtaactatttttagtaacttcacaaagcatccctgaagctttctaaacatggagaaagcttcctttcaagaaacccaagttctgttctccaaagatcaaagatcacgtaattctcagagatttatttcaggtcatttgactaactattatgtataatcatatacgtttcataattctaaatgaagatttgcaactcacctcaatcactctgaaagtccattcagcagaggccaatagccacgcaccctgccccaccacggaaagttttgataataggacggcacataaataacggcctcctttgtcttcttcctgctccttaactgtgccccacggtgcacaaataaggactctccttattttgacacgaggcgtttagaatgtattacctgttgtgtgctgaaagcgactattagcgtattggcaataacaagtttgcagaagatgcacgccaccctagagaaagggttgtgtaccctctaaaaagcaaaattcataagccgctatccgtccactcggagttccgcaagcgtagaagtccacgggcactccatcgcgacgccgatctcgagccggcaggcttttatttaaaggcgaagggcggactgcggattctgacctctcaaagaaaagaaagggggctccctccccccgccgcaggaggaatgtccccccgtaatggctccacaccggggaagagcaggctacgtccggggcccctcctctcactccggctacactagggccccttggcaggaggcctcttctccccggtcagcgaggcgcccgttctcgccgccgccctaccccgctcccggccggctgaccagcccgcgcacccctacctacctcagccgctcgtagcccggcccctcggcgcgtctaggggcttcccagcggctgggaacctcgtgctggcgccgctccctccccagcccgccgcctctgcacggtgcggagaacgggccaagacggagtggcaggcagcgagggcggcggcgaggcaggcgctggctcccagcacccgccgcggccgccgcgcacggtcctgccccggacgcagtacgaagaggccgctaccaccctgtagtgttagaggcggcgtgcgcgagctcgcgagggccgcgcacgcacacgctcactcgcatcgcgagacccgatctcccgccgccaacctgcacgcaagctttgggagggagccaggctggcaggctgcgcttgcgcgtcgtggccttaagcctgagctgctggtgatccggcgtggaccgtccccagtggctggggttgaggaacccaccaaatggggaattaataacttccttacttgtattggttttcaccacaattctgagatgctggaactcctgctgaccccatttcttagatacaggacaaataaatgatagtcaggggagttgggactcttcatgcccaggatcatgtgataatgaaaagctttattttatgggacatcctatgatccacgcagattacaggcgtaagccaccacgccccaggaattgtcgcattcattattccataatcacaggaaaggatggaacaacaaactaccgctattatgtttttcttgtgagatatctgacatatcagtcacctcacacaaacccacttagaagggattcatttcctcactccttcctcctgtgaatttccagatgtcagaatggagaggatccagaattagggcagctactgaaagggagacactttattaagcagtgggaagaggctagaggaggatgcttgcccttttcccccatgtaatgaaggatatttgaggatggacaattcatagaactgagttctaccataagcacagccctgagccaggtactgccctgccagtaggaaagaaaggaggagaaacaacttttctggacaaacacacaagccaggacacaacacacgaaacaagcaagcccattcattcaaactactgagggactggagacagataagccatgtgaacagttgatcaaacctacaccaataaaaactctggacagcctgggtgcggtggctcacgcctgtaatcccagcactttgggaggccgaggcgggcagatcacgaggtcaggagttcgaaacaagcctgactaacatggtgaaaccccttctctactaaaaatacgaaaattagttgggcatggtggtgcgcacctgtaatcccagctactcggaaggctgaggcaggaggatcgcttgaacccaggaggtggaggttgctgtgagccgagatcgcaccactgcactccagcctgggacagaacgagactccgtctcaaacaaacaaacaacaacaacaacaaaaaactctggacacaaagctcaggtggaattccctggttgggaagctaggatttttttggcagacggagattcataacatgattctaaacatcattccaactaggtggagtgattcacacctgtaatcccaggactttgggaggccaaagcaggaggccaggagtttgagaccagcctggacaatatagagagattctgtctctacaaaaaataaaacaattagctgggtgtggtgatgagtacttgtagtgccagctgctacggaggctgagacagaaggaaggactgagataggaggaaggagactgaggcttccttaagctgtgtttgtgccactgcactccagcctgggcaacagagtgagaccctgtctcaaaaaaataaaatgctaaaaaaacaggattaatcatgctagtgttatttatatgtaaaaggaaaataccaatatagaaaagttaaaatatgtacacagattttaaggcatattaagtagcctatctaaaaacaagttttttttctaagcaaggtttttttgctcttgaggtggagcactcccataccatataatcactattccaaatctgtaactctaaactcttgtctgaaatggcatttgtacataaaaacatttaagaaaaagaaattttcattctaaaaaagtcaagtaatttgcaggcccaatggaggggtagccagaataacaaagaagtcaggcagccctgagtttgaatgcctttctgccacttgcctcccatggtatttt

SEQ ID NO: 317726 - DNA, 4001 bp, Homo sapiens
agcgtggactgaatagaagccaagagttatagaacaggttgtgtagactatcaaaggttaaagatcatctttttaaatagttactgaagccgggtgcagtggctcacgcctgtaatcccagcactttgggaggttgagaagggtggatcacgaggtcagcagttcgagaccagcctggtcaacatggttaaacaccatctttactaaaaatacaaaaattagctgggtgtggtggcgcatgcctataatcccagctacttgggaggctgaggcaggagaattgcttgaacccgggaggcagaggttgcagtgagccgcgatcgcgccactgtactccagcctgggggacagagtgagactccgtttcaaaaaaaacaaaacaaacaaaaacaaccaataaatagttccctgaatgtacaggagtcaactaagagcttctatatatttggactgtgactaaattcgaatacttaaagcataagctaaaacttaccatccttgaagttgttttattgtgtttaactcctaaagtttaacccctaaaatgagccgttctttatagaacaattcctttctcttctcttgaatgtggcagtcattactgccaacataaagaaatgtaactatttttagtaacttcacaaagcatccctgaagctttctaaacatggagaaagcttcctttcaagaaacccaagttctgttctccaaagatcaaagatcacgtaattctcagagatttatttcaggtcatttgactaactattatgtataatcatatacgtttcataattctaaatgaagatttgcaactcacctcaatcactctgaaagtccattcagcagaggccaatagccacgcaccctgccccaccacggaaagttttgataataggacggcacataaataacggcctcctttgtcttcttcctgctccttaactgtgccccacggtgcacaaataaggactctccttattttgacacgaggcgtttagaatgtattacctgttgtgtgctgaaagcgactattagcgtattggcaataacaagtttgcagaagatgcacgccaccctagagaaagggttgtgtaccctctaaaaagcaaaattcataagccgctatccgtccactcggagttccgcaagcgtagaagtccacgggcactccatcgcgacgccgatctcgagccggcaggcttttatttaaaggcgaagggcggactgcggattctgacctctcaaagaaaagaaagggggctccctccccccgccgcaggaggaatgtccccccgtaatggctccacaccggggaagagcaggctacgtccggggcccctcctctcactccggctacactagggccccttggcaggaggcctcttctccccggtcagcgaggcgcccgttctcgccgccgccctaccccgctcccggccggctgaccagcccgcgcacccctacctacctcagccgctcgtagcccggcccctcggcgcgtctaggggcttcccagcggctgggaacctcgtgctggcgccgctccctccccagcccgccgcctctgcacggtgcggagaacgggccaagacggagtggcaggcagcgagggcggcggcgaggcaggcgctggctcccagcacccgccgcggccgccgcgcacggtcctgccccggacgcagtacgaagaggccgctaccaccctgtagtgttagaggcggcgtgcgcgagctcgcgagggccgcgcacgcacacgctcactcgcatcgcgagacccgatctcccgccgccaacctgcacgcaagctttgggagggagccaggctggcaggctgcgcttgcgcgtcgtggccttaagcctgagctgctggtgatccggcgtggaccgtccccagtggctggggttgaggaacccaccaaatggggaattaataacttccttacttgtattggttttcaccacaattctgagatgctggaactcctgctgaccccatttcttagatacaggacaaataaatgatagtcaggggagttgggactcttcatgcccaggatcatgtgataatgaaaagctttattttatgggacatcctatgatccacgcagattacaggcgtaagccaccacgccccaggaattgtcgcattcattattccataatcacaggaaaggatggaacaacaaactaccgctattatgtttttcttgtgagatatctgacatatcagtcacctcacacaaacccacttagaagggattcatttcctcactccttcctcctgtgaatttccagatgtcagaatggagaggatccagaattagggcagctactgaaagggagacactttattaagcagtgggaagaggctagaggaggatgcttgcccttttcccccatgtaatgaaggatatttgaggatggacaattcatagaactgagttctaccataagcacagccctgagccaggtactgccctgccagtaggaaagaaaggaggagaaacaacttttctggacaaacacacaagccaggacacaacacacgaaacaagcaagcccattcattcaaactactgagggactggagacagataagccatgtgaacagttgatcaaacctacaccaataaaaactctggacagcctgggtgcggtggctcacgcctgtaatcccagcactttgggaggccgaggcgggcagatcacgaggtcaggagttcgaaacaagcctgactaacatggtgaaaccccttctctactaaaaatacgaaaattagttgggcatggtggtgcgcacctgtaatcccagctactcggaaggctgaggcaggaggatcgcttgaacccaggaggtggaggttgctgtgagccgagatcgcaccactgcactccagcctgggacagaacgagactccgtctcaaacaaacaaacaacaacaacaacaaaaaactctggacacaaagctcaggtggaattccctggttgggaagctaggatttttttggcagacggagattcataacatgattctaaacatcattccaactaggtggagtgattcacacctgtaatcccaggactttgggaggccaaagcaggaggccaggagtttgagaccagcctggacaatatagagagattctgtctctacaaaaaataaaacaattagctgggtgtggtgatgagtacttgtagtgccagctgctacggaggctgagacagaaggaaggactgagataggaggaaggagactgaggcttccttaagctgtgtttgtgccactgcactccagcctgggcaacagagtgagaccctgtctcaaaaaaataaaatgctaaaaaaacaggattaatcatgctagtgttatttatatgtaaaaggaaaataccaatatagaaaagttaaaatatgtacacagattttaaggcatattaagtagcctatctaaaaacaagttttttttctaagcaaggtttttttgctcttgaggtggagcactcccataccatataatcactattccaaatctgtaactctaaactcttgtctgaaatggcatttgtacataaaaacatttaagaaaaagaaattttcattctaaaaaagtcaagtaatttgcaggcccaatggaggggtagccagaataacaaagaagtcaggcagccctgagtttgaatgcctttctgccacttgcctcccatggtattttgggcaagtcattgctccaccaaaagtttccacatgtaagaaattaagacaatgtcttccttgtagagctgtgaaattaaataaggtaataggactatttaaatatccatcagtggccaggcacagtgactcatgcctataatcccagcactttgggaggccaaggcgggtggatcccctgaaatcaggagttcaagaccagcctggccaacatggtgaaaccctgtctctactaaaaatacaaaaaattaggcatggtggtgcatgtcgctaaatcccagttactcgg

SEQ ID NO: 317727 - DNA, 4001 bp, Homo sapiens
ggagtgcagtggcatgatctcggctcactgcaagctccccctcccgggttcacgccattctcctgcctcagcctcccgaatagctgggactacaggcgcccgccaccacgcccggctaatttcttgtatttttagcagagacggggtttcacccgtgttagccaggatggtctcgatctcctgatctcgtgatccgcccgcctcggcctcccaaagtgctgggattacgggcgtgagccacggcgcctggcccctactgtctactgttttaagcctctaagttttggtgtaatttattacacaatagatacgtagaagagaactatttctatttttaaggaaggtataattgcagttccagaaccccacatttctggcatctattctactccaacttttggtgcagatatttaacatctggctcagagtctgagtattagaaaaagagaaatttactaagtgttcttcctgtattacttattgtctctgaataatacacctaagggtacccatttttcttcttaaactttttatttccttttccacttcctattcctccccctacaaataaaacggactcccgaacctccttttacatattcacttttgttgataaggttccttaagagtagtgatctcttttaaacttgtcatgtttaaaaatccagtgtgctcaaggtatttaataaatattccattttactaatacaagagataatcacataataaatccgcagcctatgaactaaagatactgtttgggatagcttctctgacataactgacatattataaattcctccctatgactcgcagaagccattttctgcaatggccaaactttgtcacaccccatcccccttatagcaaataccactaactttggggccttcagagtatacataacagtacttttctccttcctgaattccacaaacatataattagctggtcactttaattatacgctatcatgtattgtttgctaataatctcttagacattatttctgtcaaaacaaataagagctgatacattctctaagtaagtgtcatctgttttaactttccctcttccccaccaaccttacacattatatgcaaaaacccaaggtcaaaacacggtccaaattccagaaaccgcctttattatgctttaccagtaagtcttcttcactgaactgtagttgctgtaaacttaatatatttaatttctttaatggaaaaatatcaaaagcagatgccaaatctgatgcaactaactgacaaaggaaacacaaatcttgcttactttcactgaaactttttatagccatcagatgtctgcacttaaaatgtttagttcctatgcccattacgaataaaacaaaattctgtatttcaacatgtttcaagcctcagaagttcccagacatccttttctgagtctggtgtgatgcaataatttttcaaatgtcatttaaaaaaatgggccaggctgcagggaaaggaccatgtcacactctcagcattcaagcctcaaaggctccggggcacgaaaggctcttacaaccggttaaggacggcaatgggctccttcggcacgactcccggaaccccaccctgggccagaaaaaggccaggggcgcggagcgtaggcggagggctggggttctagggatctagaaaaagcgcgaagccggagggcggcgccagggctcctcgcagaccccagggccgcgggacggtgccggctcgtgggtcacacgcacccaggaggctcctggctcccgcgtggcggctgttccagcacgccctccgacccgcaaccggaccctccagacatcagactcagtggtcccccacctccggtctcccacctcaggacgcagttccgcggcgtccacccggccccctcccctcagtcccacgcagcggctcagccatacccaccccggcttctctgagttcaatccagcagcagctcgagcagcggctccgcccctcggtcggagccatagagacgtcggctgccggccagagtggcctcagaccgcagcgtcggccgagaggacgccgggatactggccagctccaagtcgaaaggaagcgacgcatgagttgtttggtgcggtgggtagatacctcgagtttctcctcgcccaccgtaggccccgacccctaaaaaggaaacttttgggacgtcagagtgagaggagaaaagtgtctttttagtttagttttgtcaaacctgaggattcgtttttcagtttagccggagctgtgccgcaaacgtagctgccgacatccccacgacgcacccaagtggtggcccggaagctggggatagaaaagtggcctccccgaatgccaggcacacaggccttactaccagaagcttgagctgggagcctcggccgtcgcatctctaaggtgcagcgatacggccaacttccttccgcgaagccctcagggtgggcaacggagcttttcaccagactgagggaccgggcgacctggccgaccggcggctcctcaccgcccccttggggatttcttgataattctttgccacgatgcgggcggatgttgtggagctactgtttgtagatcgcagtagcgtgacagcacttaatcatgactactaaatcctcagaagtcgaaaaagcaagtccatacagaatagtttgaccctaattaaattgcgcttacaagatacagtttgtttactgggactttggctaggtcccatcccgtctctgcctcagagtggtggttgctcttagcaccaaggaaataccagcttgacatttgactctaggaagcacaggcccaaaagaagaggcccaaggagggacattcttctttccctttcctacctacagtttctcaaaccaagtgtcagatggaaagcaaggggtggtatcatcgtaattatacagttgaccatagaaaataaatttcaatctcaaagtaaactcctaggccacccccagaatcttagagtttctcaatcatagaactcatttcttgtcacagtcttggttcttagccaatgtaaaacacccaactgacagggaaaattaaacaccttttaactcccacacaccttaaatgagaatttaaagtatctttcagcaaatgtatttataattttgagtgcttttagccatgttaaggacaaattttctccttctgaatgcagtaataatttggcattacccttttggcagtgtggtacaaagtcttataatctaggctttatggagctattgaggaacaacatagatggcttcatgcaaacccaaacaatgtaatagtagttcttttctctgtagtcggtctactgcctgtagatgtttattccttttttttttttttttttttttgagacagggtctccctctgtcacccaggctggagtgcagtggtgcaatcatagctcactgcagccttgacctcctgggctcaagggattctccggcctcagcctctggagtagctgggaccacaggcacatgccatcgtgcaggtaattaagttttttgtagagatgggcatctcgctatgttgcccaggctggtgttaaagtcctgggctcaagtgttcccccctccttggcttctcaaagtgttgggattacaggcgtgagccactgtgcccagcttactgattcatttatacaaacagagtgctctcagtgtgctacagaatgactatggagctcaagttctagtggagggtgtgagccacaaggaaacaagctagacagattgtaataagtactataaaggaagtaaatagggtgatgtaatagacttgggagatgctaactttagtcaggtagtaaggaaggcccttttgaggaaatggtacttgtttgagaattgaaatgtgaaggaatccagtgtcagaggaactaaaaaaaaaaaaaggcattgtgcccctttaacttagtgacattatcattcctgatctacactcttctccccatttttctcgttttctctgttactgcttccc

SEQ ID NO: 317728 - DNA, 4001 bp, Homo sapiens
ccatattaagtacttttgagttaattttataatagctctctaaaatacacagaaatatacaaagaaaataagcaaattcattgactgttatataatatcaataaatatatcttatacactgaaataattactaacactttcatttgcaattaaataaactgttagcaaaagcatattctatacatcaattattatcaaattaacaggtctctgtattcattaactcttatattccatcctgttcattttacttttcagtttataatgcattcacagttacataattaaaacactgaggattctgtgacacattcattaaacttaatagtgtaatcataaatcgcggccaaaagcttctgccgtaataaccaatactatattttgaaatgactgggaaaataaactttgcaaaagggtcatttctacctctatagtgtcaatccagcattacaggatttgagaaaataaaacaactaacaaccctaaattgtaggttggctcttcggaaaaaaaaaaaaaaggaaaatgagtctagtaacatcagaaatatgcaagaattgttctttcagctaggagcggcaagcacactgtaaaatgcctccattcttcctgctcaaataaaaagttcccagctccagctttacctgtgcaccacacacacacaaacacacacacacacacacacacacacggaaatcttggttccacccaaatcagtaacccactgggttgaaaactgaggtggaaggagaggcagggagtccctaagcgtgtggaacactagcaaggggaaaaggacggggccatcattcccttcgcgttcccatctcctttctggcggagacctgcagattccaccactagagagagtttggcagcttcacaatggggccgcgttgctggaggtctgactgccacccgcctcgaaacccctctcctccgcttcccacctgccccaaagtccacccgcgacaggtggggcgagggtggcaatgcccgacatctgccgcttaagcttctggctcggaccgggccccaatccacacgcgcacacacggccacagccggccagtccacccccactgcaccggcagacactcggagggcgcgggcggcctcgcacgcgggttgcaaccaggacgaggagggtcggcgagatcagaccgccggggctcgccctgaggtgctatctgacccgggcagtcgcaccctgagcgcggccgggcacgcagccaaaggtgccgccggccggggaaagctacttctcaaaggggcctccaggcccgctgccccgcggtgcgggaacagcggccaagggagggagcgagcgagcgtgcgcgccaacgcgccccgacttccgcaccgcggcaccgcgggagaggcgctccgggtcgccgagtccccgcacctccccagcgagcgcacgacgcgcgcacacgggggcgcacgcccccgcacactcacacgcgctgcacactcacggcgtctgcggccccacccctgtgccagggaaccgcaagctccccgcaccccgcgcgggccccacccagtttaccagaccccagtccccttcgggtgcctgggaaccggtccaccaaggccaagggacgctggggccgccccgccgcccatcgcagaagctggtccggccgggtttccccagcaccgcgggcatcgtgcgcccggcccagacacgaggcggagaggaaggggcggcgccgcgattagggctggcactggggatcggagcctggggcaaacccactcccccaagccccccataaccaccaccttttctgcagcacaaaaggttacagacggagccgtcgtccccgtgcaacctaccgatggcccagggctccgctgcctccgccgtgcccggggctgcggagcgggagacaggggcgggagaggcgcaggactgcggcgccgagatccaggcagaggccgccagccgagccagccgggtaccctctcctctcccaccgcgctcggcgccagctaccgccctgcttagtccccgccccctcctccgcctcctcctccgcctcctcctccgcccgccttcccgcctcctccctctggctgcagaggcgcagcccgtcagcgctgagcccgcctcctgcgcccagctctcagacacccggaggaagggcgggccggctggctgcagaaaggcgctaagaggccagaagaagttggcgggggtgggcggggttgttgactggtggtggggaggaggagtcgcaacacccgctctctagtctaaacccagcactccaactaaagagctccaacttgcggacctgggaacactccggcttcctcagttaagtggtgtgctgatatttgtcacttgtgagtctctgcttaaagggctcagcactaagcaaaagtacagaaaactagaaggccatgaaattaaaaattataggatcagtctacgaaaactcgtaatacccagtgaaggtggcggggtggggcgggggggggagttcaaattcagattctgattggattaactattttttaatttgcacaaatgttgatcttgtctattattgtaataaattattttctttgatgaagatttgcttctctcaattcatgtacatttctgccgaactggttaagctcagcaataagaatatttactggcatgcatatccaaatttacatctctcaataaccattctgtgaggaagtaaccaattatgatccacattttaaaaatgcagaaagtttaggtcatatgcctactgagtggctaaggctgaatgtgtacgcagtcggtgaaccccaaaattgtttataagtgttataaatttcggtaccagtgtccaatcaagagagttttattttttaaaagacaaaatgctttatcttaacataaaagacataaatctggagtagattaatataagtttaaacgagtcttgattcacacttgttccagaatctacatatgttcctgataatataaaggcaaaaaatatataaacacctctagtccaacagaaccactcccggaggccgctcagctataagccattttatgctactgcttatgtgccctaaaataagtaaaggaaggtagagggaagaataagttttaaggaatgttccctaaacaattttacaaaacatcagttactttttttcccgacatagatttgcatgtaatttcaaaaatatagaagctagcacaacataatatgaataaataaatgaagaaactttttttgcatcagtacattaggagaatacaccgagaattatttccgattataatctgtttgacacaatagtgtattgtcctgatgatcattctcataaaaccacctccaaaacattgtatattttatattaagagacttaatttcatttcttcctgtctgaaatcttataactttttcagaagaatgtcttgtacttgccctttgcgctgagagtttggcagtgtgctttggccaaaagcaataaagttcccctcttagtttattaggctcaaggctagctctcttgagggcattgtctccaaattgcctccctccctgggtggtgttctatgctcccatcctaaccctgaatcttcacccaatcagaacctaagtcagttcttgagtgtcacaaagaacacctaataaaccaattcaccatgcagtaatggttgataatagctttatgtgtggctccatcaaggatatgtttatgccacctagagatactgactgggtattgtcttcactcggattggatgtgggttgcaagtgccgtggctgaggggcatataagaggtgcaagttaatgcagaatcccttcccagagctttttagtgttttaggaagatctcttcaacctataaagaaaaatggcattcatataaagggttaggcccaaatgtagaatagacccagagccctgaaaggccttctgaatttggggactcagaagctccatctcacacactccttgtgtaagttatgtctttgcctcaaggc

SEQ ID NO: 317729 - DNA, 4001 bp, Homo sapiens
ataagtaaatatttaaccacatggtctctcctgaggagattcacacacttttaattattttctttctctagagaactaaatgtacctgacctctcacagagctttcaggtggctgcctgctagaccgctctctatgtccctgtcccatagataaatcaaactcaacataactaaaatggaacttaatcactcctaccaaaagcaggcttctgtaataccccctaattgcactttcactctcatctcttccctcaaatccagtctgcatacagtagtgcccagagggatcttttaaaatgaaaatcacatctatcacttcgtggcttaaaacccaccagtaccttccatttctacttaaaatccaaactcctaaactatggcctacaaaggccacacagtctggtcctatctacctctcccaatgtcatttctcaactctctcctacttctacagggcactttagatacattggcattttaaatgttctttaaacaagctctttcccatctttgcagttctttctgcctgccttgtcttttccttggctaatcacaaggctggttctttatcatcatcaaggtttcagcacaaatgtaactcctacaagggcccaacgaccaactaagttaaagttactcccaaacatctcccaatcatttgtcatccctcttcaagttttttcttcatagaatctatcatcaaaattgattatttacttgctttttattttctcccactaggatataaagtcaaccgaagcaggggccttatctgtcttatatgtaacagtatctctggcatctaaaacagtattaggcaaatagtaaatggcacaataaatatttgaatgatgaaaaataagtaaactgctcctcttgaatttgcaatttgaattaatggtgtctcattgttagcagccaatattctaaaacttgactttccactccatgcccctgtaacaagtcctgttgattttctgtctttggaacctgactctctctacctctttctctttttcaggccatagactctccaactcctgcaactgtctggaatttcttctctctccaatccatctctagtattgatgacataggtaactttccacaagtcacaccataccaagtgctttacatcacctgtttacgtacttatcaaatggcaatatagattacagatatatatataaacacacacgtatatatcgggtatgtctacttggtattttaggggaaaaaacgggtgctgatacatagatggaagacattttctgattccaatttgggaaaaatagtctatctttggtcaggtcttttttttaatagctttactgaggcggttttctaattttaaataatcaagcatacacaacaaacagtgtaatgactaaggttcttggcataccataggaaaccataacccggctccaacccacactgccattctcatctctacagtctcattcccgcttgcgttctcatcacccagcacattacgtcagggtatgtttaacactcaaaaatccacaagtctgttcttgacatgaatgagaatctcatttctttcaaaatgctatagtctctagttacagaaggagcctgatcaaaacaaccaccaaaagtcttccactcacagcagttcggagccgaaaagttgcggaaatgaggcccagcaacggtccctggctttgatttgccaaaatgctctggaagccgcagcgtcggcgcctgcccaccactgcttcttcaggggtttcttcagtttgacaaattaccagcgagtgatatttcttggtgaaagaaaaaaatcacaaccctagaggaataaggtggcagggagagtgttttggccaagatgcccgccacgaaacaggaaagcggagacagcgccaactgtaaccactaagagaaagcgcaaaccgcacaagaccagttcaaaaccagcgccctcagggagccgcttcagagctccgcaacagggaagacaggaagtcccgcccctccacaacaggaagggccggaagtcccgcccctccactccggaggctgccctcgctgcgttccctacgaagggcggagcaggaattggtgtaggaaggggacgggtgtttccttgttcggaatggggttggctcctctttgattttttacttctggtgacccacgcaaaagcagtcccgacctggttgtattaataataaaggctgtaaggatcagccttttgaacggtccagccgagaactaaccacagagcgcgttttagtggagtggtacttatttttaaataaggtaaaaaacgattatacttcagtaaagctgtttagaaaaaaaaaaacttggccaaagatggagaactcttcctaatttggtatcagaaaataggtcgtctatgtatctgcaccttttttccttataaagtggcaaataaatgtgtctgctatatttattgccactaaacaagtgtttatggaacactcactgtgtgtttaggcatagtggggataaagcagggaaggtggcccagttctttgcgggtgaggatcagagctagagattaactggaaagaaagaataaacaatcatttattacagttgtgagtgtttctaagataaaatacagaggtttgtgagagcatagagaggcataccttgttttattgtgcattttattgtgctttgcagatactgagtttactacaaatggaaggtttgaggcaaccttgatggagcaagtgtatgggtgccatgtttttccaacatcatgtgctcactttgtgtctctgacatattttggtaattcccacaatatttcaaactttttcattatttttgtatctgttagagtgatctgtgtgatcactgatctttgatgtcactactgtaattgttttgggggaccacagatcatgctcatacattataaaatggcgaactgaatctgttacaggtagttaggcatgagcaaggcaggagagggctctcccctgccacccacccactagaaatgttgggtgatggttcagcaattatcacatggcctctctaaaaatgaaaatttggcagcgccagggaaaggccatttcctgatggcccacacctgttaacatcaaaatgttaattgaatgcaggccccagagagaagcaacttcctgggcatgccggttaagagacaaaagtgatgaagtatgatttttctgatacactccaccggaaaaaggaagaaagcctcagatgggcatgtgtataaatccataaaatcactgtgtgtgctcacttcccaagggtaaagagggctctgagcatgcagggagcccatcctaagatcatggttaaatgcggcacttgaccttctctctctctctctccttttctttttcttttttttttgagacggagtctcactctgtcgcccaggctgcagtgcagtggcgcgatttcagctcactgcaatctccgcctcccgggttcaagcaattctctgcctcagccccctccccgagtagctgggattacaggcgcccaccaccatacccggctaatttttttgtatttttagtagagacagggtttcaccatcttggccaggctggtcttgaactcctgacctcatgatccacctgcttcagcctcccaaagttctgggattataggcgtgagccactgcacccggctggccttctctctttaaccttcacatgcccacttgggtctcttccatgcgtaccttcctttctttcctgttctaatgcctgtttaaataaacctccattcctactctggaacttgcttcagtctcttttctgctttatgtctgtcagtcaaattctttcttctctgaggaggccaggactgaagttgctatggacctgcaaggataggctgctggtaacttggggtaactcagatctcttccactagtaacaagtcgattgatatatattgtgtgtgtctggctgctgtattcactggccactctcatctctcaccctctcctagagcct

SEQ ID NO: 317730 - DNA, 4001 bp, Homo sapiens
gaatcgactgtatccagagcagacactccagctccaaactgaggatgtttgtataataactggctgttttctcttctgcccctggcagaggtccggcggggggaggggggtgggtcaagggagggggagggaggatgagccccaaatgctaatgaaaccacagcgggaaccgctctttagaaatggaaatactccaggccagtgctccctggtgataaaaattacacccgatttttttttcatttaaactgatctgatcgtaaaggaaccctaaaggttgccatctgatctgacagtgtttgtgtttgccatccagcgtgtgggcctctcatttacccctcttcttggaggaattccctcccaggaagcgcaaaaatgtcgcagactgtcgacggcttgcccaacccggctgctttctctctctctctgtttttcagctctatagtaattgattaaaaatatctgtcctggactgaattaggatgtcccatgtggagtcgcaacaaggttgaaaccccccgctgggtcgttgcagggggcccagcctgtgggaacggggtgtctgtgggtggagggagaggtggtcgtgggtgtgtgtgcgtgtgcgtgtgttgagatggcctgaagaggatgtgtgcaggatgggggtgtggtttgtaggaagagtggtgggggagcagtgtgggcgaaggggtgggtgggataactggtagggggcgagtggctcggctcgggagctcctggcgggaggggtaacgtgcctggaccgcgcctaccgggagcctgccggctcaggaggagccatcctcaagcacagcactgcagtttgcaactggttcccttgcacctggggaaagacagcctgatgccgtgagtgtttctcttgcgccctggaccagactggcaacccgggctccgctccctccgcgccgctgcagccgcaccacagggaggccgcaacatgccctgcgtcctgagatcactaaggctgctccgcaggctgcagggccagcaggggtgcaggagtcggctgcaggcctgagctgaggcccgccccaggccactgcgctctctcttctccaccgcacccacccgagacggcttccgaggatagaggcacctgctgggtgggtgctcccaataggccagcacagacctgacactcttccatccccctgagcgccccccataggtgacccttcggagtgggcagccagacgccctcttcggccatccccgagtggaaaagggttggagaagcgtgatggggagagggttctaggaagctggggtcctaggaaccctcgccaaccgcctcgcttctgagccccgcaaggcaaccgcccccctactccagccgcgcgtcacctgagctacctgtaatgcccactgcaccggcggcgccaacctgagctcctgcccgttctcgacgtgactgggaggcttcaggtcctgccagaggcggtttgtcaggtaacaatcatccccccagtgttttgacaacacaaatctgaaagaggagtcaacttagaaaaacaaaataaaataaaactctttaggggacggcgtcttcttagctgaagccctggcgtcattcccaacagtggaaagtcgtaacgttcagggccccgggggttgcgctgcggatttgggggcagaaagctcacctcagggccctcctggcaattcgcaaccaaggcgccccggatccaggtccatgctgggcggagtggaccgcgaggggtaggcgaccagacgcgaggccacgcggggagcctcgggccaggaggcagagcaggtccgggaccgtggaagtgagagccgcgcgcactgcccggaggaagacccgagccgcgggcgccaccatcctgacctccccacttccctgcgacttccggattggacacaggggccgggcctcctcggggtgcacagcggggcaggctgtgagtcccctaattggacccggcctggcctgaccgcgggcggcctctgcctagtccgtgagggtggagaagggggtgggggcggggtagtggctggaaggggcgggggccgggcaggggcgaagacggtggccggggacggtgggagccggccggagccgggcaggggacgtggctccgagtggatgggagtgggaggggtgcgcgccggggcacgcagcgcggccgggctgggctgcaggtccgcgagccgcgggctggggccggagctgctagagaggcggctgcgccacaaaagcctgccggtccctcccgccgcccgcctccgtcgcctccgccctcccccgcctccctcccgtctctctgcccctcccccggccgcggcccggaggctgcagcgggcggagcaggggaggggcgggcccccgaatatgcagatgagcgcgtgatggacagctgcgcgttccaatgtccctcggaaactcgagcgctccttcctcaactcctcactcccgactccagactcccccaaaccccgaccgccggcctggcgcgcggctgcgcccaccggctccgcgctgctgccgccgccaccgccaccccgccgccgccccggcccgcgggccgcccaggctagtacccgggccggcctgcctccgccggccgtccgggtgcccgccgccgcgccgcgccccggccgggcgtggatggagggcgccgcgcgccctgcccgctgctcggcgtgacgcgggccccgcgccccgcgcccaccatgtcctacccgcagggctacctgtaccaggcgcccggctcgctggcgctctactcgtgcccggcctacggcgcgtcggctttggcggctccgcgcagcgaggagctggcgcgctcggcgtcgggctcggcgttcagcccctacccgggctcggcggccttcacggcgcaggcggccaccggcttcgggagcccgctgcagtactcggccgacgccgccgccgccgccgccggcttcccgtcctacatggtaaccgggcgcgggcgggacgcgggactcctgggcgccgggacccagacggggctcaggcggagcggggctcgggttcggcgggcgggggccgccgggaatgtggcgcggctggcgactcaggagtcgccggctcggttggccgccccgcaggctgagccgggccccgggtggggagggcagcgcggcaggcggggacgtccctgagcccggccgggacccgcgcgccccccgcgcgtcccctcggctcgccggctgattttctctgagagcctgggaagtgcgtctccgccggggccggggtctggcgccgtttgtccctggtttccgcaccgcagcctggggaggcgttcggagcgggctgtgtgctcgcctgcattggcgtggggcgcgagggtccgcgtcactgcggcctctgagccgacggccgggcggttcgcattcactcgcggggctcagggcggtgggggtcaccgagttaggcccaggagccgagcattcagctgcggctccggagtccggcccgaggcgcccaggtttcggccttactctgtccagcggaccatgctttcaaatatcgtgcttgcgggcgcgtgacccgctaagggccgcctgagtcctccgtggcccgagcgcagctcctgctccggcgacctgggggcggctcgcgagtctcgaggttactgagctgggccaggcccgggccgcggcgaagcacgttacgggcgattgaggccattacggggttgtcgcgactgccggccctcggcggaatttctgggcagcgaccgagtcgctggggccttggcgaaggctgcaaatgcctcgaatttaaacgttaaaggatgaattaaaatgctaattacggcgtatttgaagaattcgaaacggtgactggcttctgagttgcaaattggatttgcccagctttagagcagtgaatagtgaattgggggctctggggtgtttttttaaccatataagggaggggaagagggagtagggggaggcagccgcactccaagcatctgcag

SEQ ID NO: 317731 - DNA, 4001 bp, Homo sapiens
tgctcattataataaaaacgaaacacacacaaaaccctgttcagtgtgcaggtaggtgatcctcctgtagatcctcctccagtagatgatgttttatttatttaagatcatagaacactcctatattacaggcaaaacacacatataacatatataaaactggtattgcatgaataaagaaaaacctacctttcccaaccaggagacacgtggccatggttttttctgcttaatacctgttgatgtcaagatttctaatcttatctccatgtttgttaagctatcaatgaccaattaagtaaaacagtcccaagattctgtaaacaataatagtaataaaatataaatgatgcataatattcactgggcattttttttttttttttgagacaagagtttcgttctgttgccccagctggagtgcagtgatatgatctcagctcactgcaacctccgcctcccggattcaagtgattctcctgcgttagcctcccgagtagctgggactacaagcgtgtgccaccacgcctggctaattttaagtagagatggggtttcaccatgttggccaggctggtctcaaactcctgacttcaagtgatccatccacttcgtcctcccaaagtgctgggataacaggcacgatccactgcgcatggaccactgaagatcttaactgacaattttcataaagttttgatttatattttatttctgagttgaagttttgctcttgtagcccaggctgcagtgcagtggcgcgatctcggctcactgcaacctccgcctcccgggttcaagcgattctcttgcctcagcctcccgagtagctgggattacaggcatgcaccaccacaccggactaatttttttgtatttttagtagaaaccgggtttcaccatgttggccaggctggtctcgaacccctgaccttgggtgatccgcccgactcagcctcccaaagtgctgggattacaggcgtgatccactgtgcccggccaaattagatgggcttgtttttttgtttttttaataaaatagctttaaaagaaaaactactcagagacagcacacaaagatctatcaagatgctagctatcagtcagcacggaggctgagatgggaagatcgcttgaggacaagagagttcgaggctgcagtgagctgtgattgtgcctgtgagagccactgcactccagcgtgggcaacgcagcgaagactccggctcaaaaataaataaataaaattgcaaataaaataaattctcacaaaagggttaaccaaatgccagagaaacgccggcattagaaaagcatcatttgcagctcctaatgaaataacaaatccagtcaatagtatcagcgctgctaaaattattgagtgaaaaaatactgggaactttatgcactgacataccctaaatccattagtcaatcttaaaattgctaagagcgaggaaaattgacgttctattcctccggatcctgctcgagaagctgggggactcgggtccggtgccgaggtgtggcccgagcctggcaccacccacgccggccgggtgaccccggccccttggggctcccgcgctccgtcagcaggcgacgctgggaggctggggtaggcccagagcgaggacgggcccggactgggtagtggggatgtaccagggccgggtgcggcgggagacggcccgggaggcggaaggtcgcggacctgcccgacagaagagtagatgaggggagaccgaggacgcccgggtccggggagcttacgaggaggccaggatcgcggggtaaggaatccgcgggcagttacctccgccaggggcagggtccggccagtcaggcgcgagaaggctaggcgaggccgactgcgcggggtgaagacgccaggccgacagctgcgggccctaccgccagccctgacgcgagcctgcgtcctggcgacggcggagggcgggcagggggcgcgggcgctgccacggcgcctgctcagaaccggccgggaacgccgcgggcgggtctccccggtcctccgcccctccagccctgctctcaggcctccgcccgggccctctaagctgccagccgcgcccgcctccgggctcctcgcccctcctcccgcgcgctcccctcctcagcggccgccggaccccctcagttcacttctcccagttaacgcgttcctcggacgctgctagtttgagcgcacaggcattgggcggggctcacgggggagccgcttaataaccgaccaacatgaaactcaagggctgccccttcctagcggggaccctgcacagacccgaaaataaggggttttgctctgccctcctcagttcacgtgggcaccttggaacactgaagaaggcattttccgaactcactgtcctacggacttattctccgcactgttttcgcctccttcgccctgttctcgtgactgacaggagcaggggtcacaagcaggcagcccgagagctctgctcacctggaaaagcatttttgtgtagcttaaatgtgaaggcctcaggcagtggcctgttgtcctcctccacatgcgcccatcttcactctttcatgtgactggcctgtttttgaaggcaggaccctgtcacccttggctaggccaggtatgttctgcaccgaaaatggccctgccctctgcattggatggctagctcttaggttggtttattttagcaaataagcgttacagggtaggcgaactggctgcatcagaaccacaattacccctgtgtctctgggtgggataaatggcggatggcattctggcagctcagccccacttatctcagaggttatagatctgaggtggtttagatccacccccaaatcacgaacattttacataagccgtgctagagttagcataaaagtctcacagaaaaatttggaaactgagaaatcctaacctattcccacaatcctgtgttcccatttttaggtcttaagatatgaagacaatgggataactgaggctgattttgctgtgtggccattagacctagaaatattggtgtgattctggagttgattgctccacacgtttatttatttattttcctttttttccctcctcttcctcctcctctattctttaaaaacgtatggaaatgtatccggcaatgtttactgtaaaaaataatgtatggaaatgactacaatttgctaaaataaaaatcattgagcacttatgtgtgtcagacactatgctaggtataaagaggggaagatggtgtccctattcaaaagagagtcacacacacttaagttacagtgcagtcataaataccatgatcgcagtatgcacaggtccattttctctatctgggtgatgggaaggttcaaaactaagctaggttttgaatgaggaatagtttcattttgaagcacatccattttgcgatgcctctggagctatctagtgaacaatttagatgcgtggttcagaagctcgatgggaggcttgggaacacagaatgtgtaaaataagcatcagtctccctttcaccctctctgcactttttaagggtcatctgtctttagtatatattggtaagagattttatggaggataccaattctttttttttttttttgagacagagtctcacattgtcacccagggtggagtgcagttgcacgatctctgctcactgcaacctccgcctcccgggttcaagcgattctcctgcctcagcctcccaagtagctgggattacaggtgcccaccaccaggcccagctaattttcgtatttttagtagagacggggtttcactatgttggccaggctggtcttgaactcctgacctcgtgattcacccacctcggtctcccaaagtgccgggattacaggtgtgagccaccgtggcctgccagcataccaattcttatgagagaatgtcaggggtagaagagatccaaggaaatggttgaccaggtaaaaaactgataaaggtcaaatagaaataagcc

SEQ ID NO: 317732 - DNA, 4001 bp, Homo sapiens
gcactttgggagctaaggcgggaagaacacttgagcccaggagttccagaccagcctgggcaacacggccgaaacctcattcctacaaaaaatataaaaattagctggggatggtggcccacacctgtagtaccagctacgtgggaggctgaggtggatcagctgagcccgggagatgcaggttgcagcgagctgtgattgttaccactgcactccaatctgggcgacaaagcgagaccttgtctcaaaataaataagtaaataaataaataaataacactggtgaacatggaagagtgaaacaggaaaacaaacaaggaaatagaggccgggcgcagtggctcacacccgtaacaccagcactgtaatcccagcactttcggaggccgaggcgggcagatcacgaggtcaagagatggagaccttcctggtcaacatggtgaaaccccgtctctactaaaaatacaaaaattaactgggcttggtggcgcgcgcctgtaatccaagctattcgggaggctgaagcaggagaatcgcttgaacccaggaggcggaggttgcagtgagccgagatcacgctactgcactccagcctggcgacagagtgagacgtgagactctgtctcaaaaacaaaaaaaggaaataaaaataaacggaaaatttgtttttaaaaaacagcatgaaacattagacgtggaataatttaaaaatgcaaatgatctccctttatttgcaactcttaggacccagctcccgaaagaaaataagtaaaaagtttctgagcccttaaaatggcccttacaaacgcttagcattaaatgcaagcttacagacacatactcagcatcttgctgactttttaacatacctcttaaacaagtctgatccacgccgggcacaatggctctcgcctgtaatcccagcactttgggaggccgaggcaggcgggtcacctgaggtcaggagttcgagaccggcctgaccaacatggagaaaccctgtctctattaaaaacacaaaattagctgggcatggtggcgcatgcctgtaatccagctactcgggaggctgaggcaggagaattgcttgaacctgggaggcggaggttgcggtgagccgagatcgcgccattgcactccagcctgggcaacaagagcgaaactccgtctcaaaaaaaaaaaaaaaagaagaagaagtctgatgctattctttctcagggcatagcagattaccaataattaggagggagggactatcagaagcagatacggtgactgcagtgttaagtgatatcaagcagggagacaggtgcgatccggaaaaggttaagtggcattctctatctggcacgctgaaagttagggaggcaaatatgtcctagaaacacagattatctgtctttaagactccggggcccgtggtttatgcgtcggcgaacagccatatcaagtccctggccccgcggaaacggacggcggcagaggcgcggggcgacggagagggcgcccaggtgtggagcagggacgccgccgcggcgcgctcggtctctaagaaccgtcctccccctctcactgaaactgcgacagcgctacttcgtggggtaggctctgcgtaaaggatgctatactcaaccggattctcccactacctgctacaattcacaagaggccacctccgcagaaccattacctctggtttgtacaagaaccaaacaaaaagctcagaacgttatgcgggggcgaccccaatgagacccgccctcagcggtccctgcactccttcgggcccggtgcatcccggagccattcgagacaacacccacagccccgccactccccgtccgctgtccccgcgccggaggaggaggagggggctggcacccgccagacctggtgcgcctggaagaggcggcagctgcagcagcgtagcacccgagaacgctgaagcgacgccatccctgcttgtgcagtcgccaggcagccaagcgcgtgcgctctgcatttgtcccgccgcggccccgccccacgcacgcgctccgaaccctctagtcccctacgccgtctcgcatgcgcttatactcttcgctccggccgccgcggccccgcccctgcgcactgggatccctctagcctgccgcgcctctcgctggtcatctgcgcccctccgacctcggaaagagtcctgggtgcgggattcctggtagccgactcgtcgtctgaccagggccgtgcccgcatcttcctaaggcactggttccggccctggggagactggaattgagacgacagggcctccgctgaccagtccttggacacaacgcggagcggggctgaggggccgccctgccaggcctgcgctgccgtgcttttaggtagcagcgaacagttagcctttgaaccggagcccggggtggaatacggggagacggaggggctcaccacacccacgcttcccggagagggcggcggaggcgcgcggccgccgagcgcgaagccggtccccctgcagccccgggagcgtcccaggcccaccctacggagggtggaggcgcccccgcagcccgacgctcacgccgcaaccctgtgtggcttagggttgtaacctcgttggaaaataaaatacaaaaaatattaaaattacctcccaccgtacaaccctcggtgtctagggttgtaattttaattttttttccaacttttacacagtgactatcaccaaaaaagcgaggtgttttttttttgttttttgtttttggagacagtctcgctcagtcgcccaggctggagtgcagtggcgtgattctcctgcctcagcctctccagtagctgggattacggatgcccgccaccacgcccagctaatttttgtatttttagtagagacggtgtttctccatgttggccaggctggtctcgaactcctgacctcaggtgatccacccgcctcggcttcccaaagtactgggattacagacgtgagccactgcacccggccgacactcgcttttaacagcagaaaccatcccgttgaagaaaacacccaatcctgacaagggtgcagggagggctacccctctgacagggtgctgggagaacggtcaagtgcaaaaccgtggaaagcaacctggcaatactgctaccccaagaaaggaatcccttcacctaggtgatttattattcattccctagtgttccctgaagaatactaggaagaaatggaaatcagtgttctgaagaacggcacggactcttaggcagttccatcagcaagaacctgagtttgaagtgacaacgtgctgtggagaggcaaggttacagaattacagtacatcgtttgacttctgtgacaccggcattattttctggcgtgtgtgtgtgtgtgtgtggctaaggtcgtaggtaatgctaatttttaaatttttccaacttttgtacagtaagtagttagaaaaaaaaattgagagacaatatgccaatagacaatggtcagataacgaatgacaataaactgactgcagcctctgcagtaaccgggcagtcggctgcttgggaaggacgtggtcaggactgcttgctcctctattttttgtaccaccctccccatgtcagaaccaacccaagaaagcgctccccaaaccagtcacagaaaacatcctgcttcttgttagctcacctccagtttccaacagcctgcggtcagaaccacctggagccttccccgttttccaccccctgcgtccttgcgcctacccacaccggggatgttgctgactcccttgctgtagcaagctctgaatactgtttctcatttgggtggttttccttcatttctacgtttgagctactgtggctgagaacagaaagcatctgcaaaaaatgttttatgcttaatgaaaggagtagaataaaaatttcatatatgacatcagttaaactctgaaaaaaaatacagaataaacaccaaaatactgagtaatctgtagcactaggaaaaattgttc

SEQ ID NO: 317733 - DNA, 4001 bp, Homo sapiens
tctattgacttgttattttaatatgacactaaaacctggcttttcaagatgcaagaagcctgggattggagtgggcggaaatcaaaatcttggccttagcttgtgaaccccatatatattgagaggtattaaagtgtgatggattgcatgctctggagttttatagatctgtctgattcctgcctttaacaaaaaattagccatgtaaacttgcacacagtgcttaactttgcatctctcagtttcctcatatgttgtcaggattgaaagatattttatatattatatatctatatatatatacacacacatacatatatctatattatatatacatacatatatcatatatataccacttatcgtagtaccaatcccaagataaacttaccttatataaataaataataaatgaaagaatgaataaataaatgttatctgttttattgttactattaataataatagcagcaaaatgatttataattcactttctcctctagtgctttagaagataatataaattttaaaaatgctattaaaatattaaacgattgatatcctagaaacaatcttcaaagtcaatagtttaatattttcttttttcaagtattatatgggatagcctttatttacagtaactactttgttgagtttcttagtgaatgtgaatataatgttcttaataaacagtattgctgatatttgtagagttttaatagtttacaaagtaattaaaaagcatattcatttgacctggtgaagttgatagttatcccgttttacagataaagaaactgaggttcaaagcagtgaacgatttaaccagtttcagagtttataagagacagggtggtgcctggtcttggtatcaaatctctcctttcacttcactgtagtgatttctttaggagtagaatggactgaataatatccgtggccatgtctagagtaattctgttgtaatgtctgtctgtgtgttcttcagccaagttacattcaaaggattctgtcactaaatgtttgcactccctctgttttctggtctatcattctgaatggagctcacagacttttgcagacaaacagtaaattaattaatgagaaggcagcatacagcatgagcttctatgtgcttggaaaaggtgggaaagaaatagttgctcgataatagtagaaagaatctaggaacctaggtttcactcccagatgccactttcacctgtatgtatgctcaagtaacttgccctctgcaacctgtttattaacctgcaaaaaggaaaatgataaaactgtacatgtttacatcattggattactatgagaaccaaatgagattatacatgacaacaatagcaggtagtatttattgcatgcttactatcaaccaggtacccttccaatttgtttcattccttttatttaattttcatgataactttacgagaaagttaaatgtccccatttatatgtgaggcctagagagattgaatagcattcctaaagtcacatttctggttagtggtagagccaggtacaggagttttattccagagtacatattcttcaccaatgaacattattaggaataattatcaaaaaataaatgccagtcagctcccatggaatttatactagaatagtgtcattatatcataagagcacataaaaaaatttcaaacttcatacatccactgaaaatagaggctaggtttttattaaaattctactttctttgtgttagaagatacacctcttgtctcccaggccagtgctctttctggagtgcccaaagaccccttctttcttttatgttctgaatcagtgccatcagctttctctagtcactgctaactactgaacaattcatgggctgtgatcagaagcacttacctgcatagcaggtcaggaataagacaagcagtcccaggacaactgtcaggcgaagtactgagacagccattctggtagcacggggtattcgtgcagataaattgttcagatacatgtgaaacaatgctccatttatagggcatagataggtgacatcatctgctttggaatttagattgttgcacaagatgtctgcacagcttgcttttggatctgtactaatgagacataccctatcattcaaaccaaacattttacatatagggaaagaaaaaccctcttgatttttaaaatttgtatctataaagggttctggagtgaatctcttgaggctagtttcaaggccagcattgataattaaagggatatcaggtagaattgctcgtcagtgccaagcagcaggcaacaaatcagattggcaaggcaagcctacaccctccctttacactctatgccttccctcgtgctctgggacaatcccttgttcccacatgggcatgccctttcacaccccatgcgtctgctcttgctcttccttcttcctcagataccctcctccttgtctcccttcggatcactcctacgtattcctcagttcaaatggtccttctttgtgataccttcatgataaccactccacccttctccaggcagtttgttacttcatcatctgccctatagcacacttgaccccattgtataagaactaagtgttggctgggcgcggtggctcacacctataatccaagcactttgggaggctgaggtgggcgaatcacgaagtcaggagttcaagaccatcctggccaacatggtgaaaccccgtctctactaaaaatacaaaaaattagctggtcgtagtggcagatacctgtaatcccaactacttgggaggctgaggcaggagaatcgcttgaaccctgggaggcggagattgcagtgagcggagatcacaccactgcactccagcctgggtgacagagtgagactctgtctcaaaacaaacagaaaacgacaacataaactgtcttatttattttacttttatttttctcttttttttccatcaacttttatttgaagttccaggctacacatgtagccagcaggatgtgcaggtttgttacatagggaaacatgtgccatgatgatgatttgctgcacagatcaacctgtcacctaggtttctttctttctttttttttttttttttttttgagactgagtctcgctctgttgccaggctggagtgcagtggcgcgatctcagttcactgcaacctccgactccctggttcaagtgattctcctgcctcagcctccctagtagctgggactacaggcatgtgccaccatgcccagctaagttttgtatttttagtagagacagggtttcactatgttggccaggatcatctcaatctcctgacctcgtgatctgcccgcctcagccttcccaagtgttgggattacaggcgtgagctaccgtgcctggctggcacctaggtattaagcccagcatccattagctattcttcctgatgctctctttccccttgaaaccctgacagaccccagtgtgtgttgctcccctgaatgtgcccatgtgttctcataggagaactaagtgttttaacagctctcttctctttcagcttgtggatccacttatttgtttattggcaaaatattgtacatattcgtggtgcacaatatgatgttttgaaatatgcatatattgtgcaaaggctatatctggctatttaatacccagactactcatacttatctttttttgtgtggcgagaacacttaaaatctgctctcttagcaattttcaagtatacaatacaatgttattaactatagccaccatgatgtaaaatagatgtctcaaactcattcctcctatttagctcaaattttatatcttttgaccaacatctccccaatccctcccactacccaactcccggtctctggtaactatcattctactctttgcctctgtgagttcatcttgtttagagtctgcatgtaaatgagatcatgtggtatgtatttgtctttctttgtctttcagtgcctggtttatttcatgtaacatca

SEQ ID NO: 317734 - DNA, 4001 bp, Homo sapiens
gaaaaaagccagtcacaaaagcccacatactctatgattcaacatatacgaaatgtccaaaatggttaaatctatggagacagaaaacagattagtacttggttagggctgggcttatgcgtaaaggagggcaaatagggagaatggtgagcaatgtttaacggatacaggggttctcttggggttaaaaatattctaaaatggtgatggttgaatatgtgaactaagcatgcaaaacgggtgaattgtatgcactgtgaactatagtttaataaagctgttattccgtaagtacaagtgatggaaatgttctatatcttaattatggtggcagttactagggtgtgtataaatctgtcaaacctcttcgaaacatacgtaaattaatcctcagtaaagctgacttagaaaaaccaagagagggcctggcgcggtggctcacgcctgtaatcccaacactttgggaggctgaggcgggtggatcacctgaggtcaagatttcgagatcaacctggtcaacatggtgaaaccccatccctactaaaaatagaaaaaaattagctgggcattggtggcaggtgcctgtaatctcagctacctgggaggctgaggcaggagaatcgcttgaaccaggggagcgtaggttgcagtgacccaagatcacgtcattgcactctagtctgggcaacagggcaagactccatctcaaaaaaaagaaagaaaaagaaaaaccaagaaaggcttggcccagtggctcatgcatgtaatcccagggctgtgaggctgaggcaggaggatcagttgggcccaggagttcgagaccagcctgggtaacacagggagacccccccgccccccatgtctacaaaagataaaaaaagtagctgggcatggaggtgcccacctgtggtcccagctactcgggaggctgaggtcaaggctgcggtcaaggctgcagtgagcctgtgattggaccaccacactccagcctgagtgacacagcaataccccgtctcaaaaaaaaaaaaaaaaaattggcttcctatacacagtgagcatttagagggcatttcgtaaaaagaaaccccatttacaacagcaaagaagattaaatatttaggaataagttgatcaagacatatgcaaaacctatgggaggataatttttgaattgaagacatttcctgatttaaacgtaaagctcatgctgtttttagccaggatgactcaacagcatccggaagtcaatcctccaggtgagggggtttgcgaagtcaacgaatctcactcagctggaacggaaacacgcaggccaaaagcctccgtgagggggccgtaaaggctccattcaacaacctctcctcttatgtcaggtgcccgtgccggccacagctggccctctgaagggaattactgggcttctccttcgcccctgcgcgtgctcgcaacacggcctgacaggaaagctgcccccagcctcctgcgtgccgcaagatggcgcccagcagctgagcccgctccgccccgtcccgccccgccgcgcccggtcccgccctgccccgctgcaccacctgcacgcgccgactgtctggtgccgctctgaactctcgatgcccgcagctgggaggaggcagaggccgcagcctccacaccaggggtcgtggggaccctgagctgggaaccgaggggcagctcgctgccaccctgaacgcccgccaccgccattgcttccctcggcttctcctggcgacagcctgccccaggcccctgaccccaaaggccttgagctccacggccgcccagttgcaggacgccactgcactgatgcgagccgaagcgcgtcacatagacgaagcgcgccgagtcctgctcccgaccccggcctgccgccgccatcgcagcctcagtcaacggcagccgggccctcagcaaacacgacgccacaggcgccagactgcccactgtgcaggcgagggatgcgggagcggttagggccagaccaccctgcggggattggggggagggagttagggccagaccaccgcgtgaggattggggggggttaggaccagaccaccctgtggggatgggggggacaaagggttagggccggaccatggcaccgcgatgagggggacgggtttagggccggaccacccccctagggatgcggtgacagggttagggccagaccaccgcgtggggatggggggagggggttacggccggaccacctcgcagggatgggggtggtggggttagggcaggaccacccagtagggatggggtgacggggttaaggccggatcaccacgtgggggtggcggggaccaccatgcagggtggggcagggaagttagggccagaccactgctggggggctggagggagaaagctgggcttgaggagcgaggcagccggtcactgcgtgggctgcaggagtaggggaagggcacgctgctgggaggtgagaggcccaggggagatggagggaagtgggaagagggcgggtgttgggttggggacgatgacgaggtgcagacccctcagaagaaatgagctactccaagaagagggtgggagaaagggaccaggtcactactagggagacgcccccatgcttgggtgcgggaggatttcagagtgaggaacccacacgggacttgagcagcctggagcatcagccacgtgacgctgggagcctgggggagaacacagagcccttggctgccggaaggttccagtatgcccttggcctggcaggtggtagtgatggagctgtgatccccaagagacacaggggtagggggacaggggtctgaggcccaagctggttaggcactggccagctgggttatttgggcaagcccttttccctctctctctctttttctttcttttttttgagacggagtctcgctctgtcactcaggctggagtgcaatggtgcgatctcggctcactgtaacctccacgacccagattcaagcgattctcctgcctcagcctcctgagtagctgggattacgaggatgtgccaccacaccccgcttatttttgtatttttagtagaggccaggtttcaccatgttggccaggctggtcttgaattcctaacctcaggtgatccgccagcctcccaaagtgctgggattacaggcgtgagccaccacacccagcccctttccttctctgagcctccattgtcttcaaatgttaactcaggagaactgagttgtgaggataaatcaaaataaggcatatattcagcatctggcacacagtgagagatagttatccattcaggacgtaaactgtgaggtgcacattgtaatttctttacattgaaactttacaaataggtttccactaacccttttttttttttcttttgtcagtcttgctctttctccagggctggagtccagtgatgcaatctcagctgactgcaatttctgcctcccaggtttaagcgattcgcttgcctcaacctccggagactgcaggcgtgcaccaccacgcccagctaatttttggcctggctaatttttgcatttttagtagaaagaaggttttgctatgttggtcaagctggtcttgacctcctgggctcaagcaatctgccagccttggcctcccaaaatgctgagattagaggcgtgagccactgcgcccaacccgaccatctctttaaattcatgtagcattttatggcagaggaactggggctccaaaatgtgaagttacttccccaaagtaataggcagtgacagagacatactttcttaaacacttgttattaaattatatgcagaaacctgcacaaatcatcactatgtagatggctgaatttttacacagtgaatatacttgtgtaagatccaccaaggttaagaaatggtgcactgcagaagcacctcatgacctcacccaatcaccatccttttcctgtttttttgatttcagatgtcatcaatggccaggtgcctgtaataccagta

SEQ ID NO: 317735 - DNA, 4001 bp, Homo sapiens
gcaggctgagggtcctcaatgaatgctccttttcagtaatgactcccctgcccctgcatcttgagcaagacaaaccggggacatttaggaacaatggtgagaagaaaggagtagatgaccctcaactggctttgaatttactacttttcctgcctttggccgctggtgggagatgcagggtgcccagtggccttcgcagactcgcagatcccatcccaggaaatgcacgggccggtgtggccaggacagaacagagggaccactctcagtccagccctccctgcaggcggctcgccagctattccttctggtcttcggtttgcaggagggcagagggtttcccgcgccctggaccatccgggcgtagtcccggcagcaaggccttctttccttgctagcctgggcctgccgcagacagaccccagagggagccgcgcccagcccgctgggcggccccggcttcccgcgaccccctccagaccctgggcagaaagagcgccctgctgtcccgacagagccactgtgcttttgagggatcctgacacctagtggctcccgctcccttctccgaagagcaccgggtcctatctgagcattcccgcgactcccagcccctgatcgcagctaagacacccattcgcgcacccggcttctcccacatcctcgtcccaggggttcagctgacactggtagtcgcctgagctgtactctttggggcccaggcgccttggcgggagctcaccctccctgtctccccagctgaccctgccgcgcccccttcatctccgcacgctcccacccggccccctccacaggctgtccagccccgcccctcggaacccacccctggtagtgaagccctgcccccagggtccctgcccgaaggtgcgctcctcctctagggcccctctactctgtgagctctgtccccgatccctagcggtgcagcccctcccagggcccctcctcgttgtgagctcctctctccagtccccggcggcgcatccctgcccccaggccccctcccctaaggtgaaccctgccccaaggccccagtccctaaggtgaaccccgcccccaggctgcctcccctaaggtaaccccgcccccaggccccctcccctaaggtgagccccgcccctaggcccccgcccctaaggtgagccccgcccccaggcccctttccctaaggtgaaccccgcccctacgccctccctccgagggagagccccgccccaagacccttccgctggggtgatcccttctcccccgcccctccgcggccgcccgcccctgcccagccgcccagccgcccagccgcccagccgcccagccgcccagccgcccagccttccggtctccgcgcccagtccgcggtcctcacccgcgccgggcggtagtagtagctgtgctctttggggtccaggcgccgcggcgggatgtagctgaaggcggactgcgccgagacgggcggcggcctgggcttgccccgcagcgtggacgcggtggtctcctcctcgtcgtcctccatgccgccaccgtccagcgcccccgccttggccgcggtccgtcccgcccgcccaggggcccagtcggagtctgcaggcctcaggttgctcagcgccagcgtctagcccgcgtctgtgttcggtcgttgcctggaaaccgccgcctggcgacccggagctgccctgcagcattcccgctccagggtggagcgaccctcccctcctccctcccggcccctcgactacacctggggtctctccttccttcctcctcgggaggagcccgactgggagacgccgcggggactacccatttccagcccgctcacctttcccatgcagcagcccctgcttcactcactgatcactccttcgcgagaccattagtgactgagcacctagcgcatggtgtgtcaggagctggagattgagccttgaacggagcaggccttgtccacaggaagcttacagtctggagaagacacatgaaagacgcgaagaagccaaatgacttgccgaggctccagggcagcgctgtccaatagaaacatgatgagagccacgtgtgtcgtttcttatttgactcagtaagtccaaaacgttatcatttcaacaaatggcactagctgcctttcaagctctcggtggccacgtgtggctagcagttacagtattggccagtgcaggtgtaaggctgcatgaatttacagaatctggcagaactcagctgctgtggacagggctcttgcaatcctttgccagtgtgtttacgttggcccttgatctgaatgctgggtcaatacctgcgttccgtttgttgaaaatgtgttaagctgtatactcgtgattggtgggtgtacagccaagaaaagttaaaaacaaacaaacaaaaaaagccatgatgaccaaggcttgggaaatgctttagccagcgtgcctgggaaggccagccttgctgagaaggtggtgtttgagatgaagcatagcgataatgagaagccagttctgtgagtctggcaatcccttccaagccaacttggtcctctgaggcagagacaatcttgtgtttgaatggcagcaggaagtggggtggtgtggcctcatgaagccagaaactggtaggaagtgaaggtgaacagataggtgggggcctgatggagagatcttacagatgatggaaggagcagtgccctgccttcttccccatccctgcaactaggtaggaatctcttgtctgccattctgtgatgcaggctggtggcttaagatgcctctctcattctgaggcacctggtgatccactctgtagaggtctccagagttctagagatccttctgggcaggatttaagacatcccggtgccaccacgctttttctctctctttttatttatatctgtctctctcgtgggtccccatgagcttcctgagaaacccatgtgccttctttgtcccactaacacatctttttgctccatggccaggcagaacacaagtcagccatgagtcaagggtcagacacctgcccaccatgtctctaagccccaggggacctagcaacctcattggagccacttggagagggtgacatatccctggtgcttggagatggagcaccatctctcctacatgtgaagcaaaggaaaaggggctcttatttttctcccatgggctgaagtcatgaaaggcatgactcatacttttttgcttttttggcctcattaaagcagcagccaaatatgttttttttttttaagcccttataatctactgcctctctcaacttctctcaatgtctccaaatacacaagagaggtcaactaatggtcacaagattttgtaagctttgcattggtgacccagtatcatactttggaaagtgaaagtacttgaaaccaattatcttgggaattcagctaaaactgagaccgagataatttcttagtaaaagaaattagtaaagtttacacagttatacagatgtgaatctgctaacttcagttcagtcggtgacattttgtcatgtcctagaccaagagctcttgagggcaaggctacctacatctttttcttcttggatggagatatggttaggctttgtgtccccaccttaatctcatcttgaattgtaatccccataatccccacatgtcaaaggagtgaccaagtggagataattgaatcctgggggccatttcccccatgctgttcttgtgatagtgaattctcacaggatctgatggttttataaggggctcctccccttttgttcagtgcttctccttcctgccaccttgtgaagaaggtgccttgcttcccctttgctttctgccgtgattgtaagtttcctgaggccaccccagccatactgaactgtgagacaattaaaactctttcctttatgaattacccagtctcaggtatttctttatagcagcatgagaacaaacttatacagatggctcaagtcaggcatacaggcatacagtagga

SEQ ID NO: 317736 - DNA, 4001 bp, Homo sapiens
ggaaaagcccataaaatgcagtattttgactagaactatttagtcaaagtaatgactggcaaagcaaaagatgaaactgattcttatataatctgtggaaaaactccctcatgacgtacttccatagagtaaacagattgtgcttgtatgatgagaaataaattaacaaaaattggctagaaatttaaagacgcattcttagatgaaataatgtctggctgtatctcatctaatctgaagaagacaatggaaatcatcaaacccttatatcctagtataaatatatactcattacattaaagaacaaagtttgaatgtatattattcttgttgcgtggaaaaataatgccaaattcaattcaagtacatgaaatcttgttttaattaaagttcataaatcttgtaatatttttaagattgaactgatttccatgctgatcaacggctcataatgtggaccactaacattgtcattttattttagtaaattttcagaagtataaagccttcaaacaagaattccatatatagcacatgacttttatttccagctctgattcattccagattaaagaactcttccaagggaaatgagaatggctttttagttcagtgataagtgaataaaaaacattctttggtctctttggactggttcaagtgaatctggaattagaggtaacatagataactttcaagttaatagctcctactacccaagaattattcatgtgaatccacagaccaaaatataagtcggcttcagggtggtctgtaggtctttaaagaacacactcctggcctggcacagtggctcacgcctgtaatcccagcactttgggaagccaaagcgggtggaatgcttgagcccaggagttcaggaccaacctggatgacatggtgaaccccgtttctacaaaatatgccaaagttagccgggcgagatggtgtgcgcctgttgtcccactactagaggggctccagcctgagcaacagaatgatactctgcctctaaaaacaaaacaaaacaaaacactcctgataaatgataatctggcaaaaaatattcactgaaactaaggcatttcatcatagaccctatttaataacaaattcaccaactattcaatcgcttaagaaaatgttccaccactgttttcctatgagtccgatgatatgagtcagtccacagaattttaaaaactatctgtagtaattgctcaaactcaaaaaggaataatgtagaacctaaaggcagctgagacgtaatgaaaagaattggacttaaattcagaaggttgaggcaattccctagcccagtttttcctaacagcttagacctttccaaaacaagtatgccaatacttaacagagcccttgtgagaactggcatgatgtatggggcagaatagtctacacaccaatgtaaagctcttctatagaatgttgttttgaatccaaaacgtaaaacgcaaattacaacgcagcaatgaaaaagtggaactgttatacatgtctttttatctttacaggatgcaaaccaccataactaatttgagtgttatcattcatcttagccatttatttaaacttctgtattttatttagattctgcccttcttccaatcgctaccgagacagtttacaccagcacggatctagacagattttccatgggttctgaataatgcggttttcgaagacaacgccttggcattgtgagttctgggaagtgggcaatcgatggcgcagaggggctcagaagcgacagacctcgggtaaccacctgcggcctgggacccaaaggaacacaggcctcagcctctagccctcacagccatcgagcgccagtaccttagcgccgtctgccccgcccgcctccctctcctccgctccctcaccatcttcaccggcagcttcgctaagttgctgtatgtgggcctgagccagatccccgagctcttccactcgtctcaccacactagagactgcggccgccatggccacaatcggcgggtgcgccccggtcacgtgaccgtgttggcccgcaatcacctgatcccccggcacgggcggggcctagggcggacctctcctggttggtgggaggagacatcagctccggaagagggctggcccaggccggcaaaggtctttccgggtcatttttccctcctggacttcccttccctcccataatcctgagcagcaaggagactaggggcgggtgtgacgttgagacacgcctctctctagccccctcctgtaagccaatagggagccagccgtgcccctcggctgacccaatcggaagtcagctctctccgcctgcctcttggaagacagcttggtgacgtctggctggcaggatgcggattgtcgtccgcactcccacttccctgtccggcgcgggaagcacagtctggagggcggacgcgagggtctggagagaggactgtcagttttggccttgtagtaaggaggttgctaaaataaagtgattataatctcctggtcctaaatggaaacccgaccggccccctgtgtaacacatccaagtctccaagagtttgttgtacatctggatggggagctccaaacactagtggagttgccagtctacatggttgaatattgcttttgtaaatctgatttttagcagtcgaatttatctctgacctcccttggagttcacatttaaagtactttagacatcttgcgtccagtggtagtaaattctgcggccacaaaactattttcatttttctttcatctcaagaccttcccttaaggcgctaattgtgcatgaggttcatcctctcaatcgggagtttcaaagcactcagtcagcaagtctaacttcactttgcattctgtgaatgctttcttgcctctggtcaaacaaatcgttaactctgtgtattcatttctcagtttgacacactatatcttgaataatctccatcctattgtttctcatggaaggtagttttttatatgtaatagaaaaatactaaaaatagagaaaaagtgtattgtgatttataagtgattgaccacaatgactctctaactgacctttgtaataccagtttcttctgacaattcaccctaaatatagaggacaggaatcatgtattttgtgtccttggtgcctcatacagtgcctggcacatatgcactcttgtcaacaagcaagatggcaaggggatatgatgtggtctgtgggagtagacaattattcaatagtgtgggaattgtaggtgaggaaaaaaagaatctaagtataaacaagaagttgagagaaggctttctcaacaagggatggagaaggtggtagttgaagaggggcaagtgctggaaggtagggtggagaatgatcgtatctgtacacaaagggggaaaaatagggaaatagggataaattcaaaatgaaagtagggagccagcaatggatagagaaaagagcagaaggttacacctgatgccttctgaatcttctacaagatgtagaactaaatgaagccttcagaagattttactaaacttttcaaaaaataattttcaaaaaataattaacctttgattaggaattttcagtctcctagaaaatgtgtaatttaccattcttaaactacttaaaagaattacctggacatgtgggcaacagacaaaggcacagctgaaatattttgactgtggatctacaaattatctctgcagaagtgttttactctcaggtccactgttcttctcaggcttttataaaagacatcttaggatctatgtaatcaggtcatccattttctagccatgagatttgggtctgggagatcttgctcatgatttcgaagtgatcttggatcgccatttgaatcaagggttcctttttaaaataaacatttagagtcaaatattcaaaaggcccttttattacaaccacagctttatctgttccctctccataaatgtggctattgaaaacattttaggccaggtat

SEQ ID NO: 317737 - DNA, 4001 bp, Homo sapiens
atagacacgggtggtgtattagatgggagaagaaagcaggttactagaaactgaactttttgtgatgtattgttttttaagtataagtatgttgtcatatatatattatatatgaatgaagcctgaacaaaatgcaccaaaatgttaacggtgattgtccctagccaatcatgctgctagtcttatttttcttattttattttatttttatttctttgagatgggatctcactctgtcgcccatgttggagtgcagtggcgcaatctccgctcaatgcaacctcagcctcccaggctcaagcaatcctcccacctcaggctcccgagtaactgggaccacaggccagccaccatgcccggctaattttttgcatttttggtagagacagggtttcgccatgttgacctgactggtctcgaactcctgagctcaggcgatccaccctcctcagcctcccaaagtggtgggattacaggcatgagccactgcacctggccttatttatccataagtgtatgctacttttataattaggacaaaaaagacaactgtggaagggtgaaacattttgaaggactagaatttttttctaactgatgccgggtgcagtggctcacacctgtaatcccagcactttgggaggcagaggcaggcagatcacctgaggtcaggagttccagaccagactggccaacatggtgaaaccccgcctctactaataatacaaaaattagccgagcatggtggtgcacgcctgtaatcccagctactcaggaggctgaggcaggagaattgcaattcattttcagccaatttggaacccggagtgtcgtgtatgtttttagatttacaaactaatatgaacaatccaatttcccagtctcccatttacatttttctgacctatgcacagcctaggtatgaggtgatggaaaaggctggtttagagatcaagatgctcaaacacaaaagtcccccaaatcctggtttttttttgttgttgttgtttaaaaaaaatccctaaaacatttaaggacacataaaactcttcacccactcagtgggtgcaccaaatttaccaatactagaaggggaagagggtggcaacgactggaaatattccctttcaagtaataaaggtcattttgaaccaaattgctttccacctcaagttctccatggacaggggcctgaaggatgcagtgaggggggtttgtggaatggaaaggagcgcgggtaattggggtttgtgaggatccgggccaggcagagggaactggggttttttccaggaccaccggggaaaagagaggctgagaaggggcgtatgagacggattcgaacttgggaggacctgggcctcgccaggttctaagagtcagggctcatccccctagggcactgcggccacatgttgtcatgcctgggggactgacgggccaggaccgattctgagaaaatgtcagtggagatgtcattctgagaaaatgtcagtggagatggggattccaggttctcccgcgattccggggcgagggagttcgggctccggggaatccgaagagctagactgggaaggtgctggtgcccggggctacgagaaatcgactatcctggggtgtgaaaaagggccggggtccggctaaggggagcgcgagtcccaaagagttagggttccctcgcgggtccgagggtctgacgaacgctctgggcatgcgggccacacctgaacagcaccggctgctgcgcggacctcggccgcggaaagcagatctgcggctgaccccctacgccgatttctgggcggcggccgagtctatcgcgctggtagttcgaacccgaggtggcgctggaactggtggtcgcctgggcggcggtcccgccgatcgtggaggatccctggtcacaggtgaccgagggcctagtcggctgtgtcattgcggcttccctgttggagaaagagttggaaactggtggctggttgccagcccacctaggtgggcgcgcgctgacgcggagtgagtccctgggcggagccctgaaccgagcgcggcgcgttgcctgggagacacatattggctgcggggaaggggacgggggctgttggacatgcgtgcagagtccggcggccacggacgcggtaatattgtccctcggcatccgccgtggtgagacccggcgcgttgctgtgaagacggacgggtctggaagaagtggggtgcggtgagctgagcagaccttttccgcttcgacgtggggactgcagtgaccccggcctgctggcggggcgggtaacgggttgagccagggtggggctgctcagcggcatggagctgaggtctgaagacccagcacaggcgattcctttctgcgacgagacaattgctatggaaaccaaagtgctgggtcagcggggattgaggctccaggatcaagactggtgtctttccggaagacccttggctaaggcttcccggagcggctgcttcctgaatgaatccgccatctcctgcggggtcttgacaccgagcaggcgaagaagcctattccaatgccagctcccccgggaaacctacctggcccacccctataagtggtgcctcgctctcgttaactcttagactttgttccacgtttataacctaatatttcggtaacgccccgcggtttttgtttacttttcccacacataatggaccagaaagacttgcttccggactttgctttatgactctgaacaagtcatttttcccactgggtctcacttccctcttgtgtaaaatggaaatattaactctagatgccggtctggttaggtttgaagatcgaaccagatgagggaagccaaagacttcataggctgtaaagtggtgaaactgaactgctaacgagttgctatttttttctcccctccctctccctcaagctaaaagttcttcagatttcttgtgatttcttcaggcggtcttgggactccctagcctccgacctggaatagatctctcttcacacttcacttccacagagcccttcattttaacttccctatccaaagcaagaaaaatagttatcatttttagagggcttactctgtgccaagccctgataaaactctttacctggattatctcattaaatttcacaacatccttttaaggtagccactgttatcctctttttaagctctgtctgcctgtaattgcctatttaatgtctgtttcccccactagactttgagctctgaaaaaaggggccatgactgtcttgtacatttcagtatctccaacacctaatacagtgcctgataaatatttcttaactagcatgaaaatgactgaccctcctcctatcactacccttaccctcaagagcattgtctctcctgcagacttttagttgctgtgatgaacagcacattcctttattcccattactcactggtttgaggggccatcagttcacttctctctggattatctgatgatgaggatccagaacatcccttagcatttaggcttccacctgggttcaggaggctttttccttgcccttcatatagtctctagaacaaggcagccctagctgcccttcctggggtgagcctgatgcatttgagtctagggcgttggcaggtagaatttacctatacaatctttggctcttctctttagtagcctcagaaccacccccatccccactcagcctgttcctggaattctacagaaaaatggccaggctgggtgccgtggctcatgcctgtaatccctgcactttgtgaggctaaggcgggcggatcacttgaggtcaggagttttcgagaccaacctggtcagcataatgaaaccccgtttatactaaaaataaaaaaattagtcaggcgtggtagcgcccaccggtaatgccagccactagggaggctgaggcacgagaatcagtcgaacccgggaggcggaggttgcagtgagccaagattgtgccactgcacttccagcctgggcga

SEQ ID NO: 317738 - DNA, 4001 bp, Homo sapiens
cagaacatggtctgccaaaaacagaagtcaagaaacttttttttttgagacagattctccctctgtcacccaggctggagtgtagtggtgccatctcagttcactgcaacctcctcctcccgggttgaagccattctcctgcctcagcctcccagggagctgagattacaggcatgcaccaccatgcctggctaatttttgtggggttttttttggtagagatggggttcctaccaaaaagaccatgttgcccaggctggtctcaaactcctgggctcaaggggtctgcccatctcagcctcccaaagtgctgggattacagttaggagccactgcgcccagccaataaataccttttttttttttttttttttttttttttttttgagacggagcctcgctctgttgcccaggctggagtacagtggcgcgatcttggctcactgcaagctccgcctcccgggttcacgccattctcctgcctcagcctcccgagtagctgggactccaggggcccaccaccacacctgcctagtttttttgtattttttttagtagagacggggtttcaccatgttagccaggatggtctcgatctcctgacctcatgatctacctgcctcgcctcccaaagtgctgggattacaggcgtgagccacggcgccccgccaagaaagacttctaatcaatgttttgttaagaagttactagacagtcctccatccaaattcactaccagacactgatataatagtatgagtctttagttcataatactcaatgttactatatttttaagagtcctaaaagctttggcaattttggcaattttttcttcattagtttcaaaatttctttacagtcataatttctaacacaattttaacttttttactttttttcattgctcaacttgttgctagattttcagaaattacaaggaaaaactgaaataatagagccggggtcagtgtcaacatcagcagggcacggggcagggctccctgtcggagtggcagtgggggctcccgcaagctccatctccttcctgtgtgcccctgccccatgctgctgccacttccctggtctctgctggcttccctgccaccttccagacccttcctttcgtgtggctaattttcaggaggggcaggggcacaacctagcagctccaacctatgaaagactttgtcagttggtgtgtcaaagccagcatcttttatcaaacagacaaaccctgaacgctcgtggtttagcacgtgcttcttcctccaggcgaagccaagtgctggccatgggcctctcctccaggaagcgactcaggaccggccctctgcagcgcggcccagtgacccacattcattctccaagacctgcgctgctgggcctctgaggggccccggaaacatccggtggccacccatcccactggcattgttcccacgagggtgccaatgactgcgctcctggaggggctgagttcgtctttgggtccaggaggtacccaaagccgcttgtctgctggtggcaggtatgacagacgtttgattcccaaccttctccgctttggtttcttcgtttactgaatgcccggcgcccacctcagtccgcgggaaacgagggacgcccctgccacactgcagtgcggacgacgaggccaacataaagacagcaggcatcagcagaggatggagacagcggctctggggctgtcttctctccgcaggttgggaagggaaaggagagaaaatgcacgcagtcacgctcggcggaggcgtccaggactgcgcccgccctggggaagggcgcacgcggtggtcgccaggggcagcgagagggcctgagttgggggggctgggacggacaagaagccccccacctcggcggtttccctgtcctgctggggagcggccatggggcaggtccccgagctgaagtcgctcggccgggagacgagtacccgccccgcgggagggcccggacccgtgcttccggcgccgttgccggaagcggaagtgcccgcgcgctgtccacttccggccgggaccccggaggcggaggcagcgaaggcggagggggcggcgggggcggcggcggcggcggcggcggcggcggcggcggcggcggcggcggcgtagccgtagagggtgagtcggtggcaggtcctgacggccggcgggtccttgggaggtggtcgccgtctttcatccttgctctccctgtctctggcttccgcgggggcgcgtagggggaggccggaccgggacctggagggcggggaggccgttccggaccccgtggagtatcccgctcgtgcgagtgtcctcggcgcaggtgtcctccccggcacatgtgtcccccccaggcgtaggtgtccccttggcacatgtgtccccacaggcacaaggtccttcctggtgcaggtgtccccttaacagtgtcttcccccacgccccaggcgctggtgtccttcctggcacaggtgtcccccctcggagcaggtgtccctccttggggcagatgtccctccaggcacaagtgtccttcctggcgcaggtgtcccctcggcgcaggagttctccaaggtgcaagtgtcccctcaagcacaggtgtccctcccaggcacaagtgtacttcctggtgcaggtgtcctcttgacggtgtccccccccaggcgcagttgtccttcctggcacaggtgtcccccctcggaccaggtgtccctcgtcggagcaggtgtccttctgggcacaagcgtccttcctggcctttaggaagctttcaaggtgcaggtgtcctccaaggtgcaggtgtcctccagcggagtgtcccctccgtgaggtgcctcccagcacaggtgttcccctcggcgcaggcgtccccccggtaaagggtccctcctggcagaggtgtctgcccggcagaggtgtctccctggcgcaggtgtctccgtgggtgctgatgttccccgcagtagggtgtccccccgctcggcggagaggctcacagcggagccagcgccaggggaaggcagtcagaaaggccctggtaggggctggacctgggtctctgtttatggtctctgagttcctctttggcttctgtgacccaaaatctttagtcttcaggctgggatggaagcctctgcggtgcgttttttaactccagattttccccttttccacatgagtagctttattctgactccaaggcgagccctgcttcacagctctccactcacattgccttggcttccacccacagcgtgacagacttcactccagccttaagatgggcgcagccacctcaccgcgtgccccagcagagcggctgggggtccacttcttgggttattatccagccctataatcaaaatcatacaggctttaatgtcaatggaaatgctgatgataatgtccaaacaaaataagaaaacaaaagtgtgcacctacaaagtcatataagcagtggaatcttagctttaaaagaaactcaaagggaaaaaactggaaggaaacaagccctgttggagggagttgcccctgagtgtcgggatttaaggggagttgtccctgggtggcgggatttaaggggagttgcccctgagtggtgggatatagcgggggttacccctgagtggtgggatttacgggaagttgtccctggattgtgagatttaagggaagttgcccctgggtagcaagatttaagaggagttgcccatagatgatgggatttaaggggagttgcctctggcatctttgtatttttgtcctgtccagattttctacgttggtatgccaaatttcataatcagaaaataaagagaaaggaaaggttgcaatgtaggtccagatgaaaaaggagaagagaggtgtctgaaagcatgtgggcatggagaatgaaaaattccaggagaaggtgaatctttttaatattcatgaagatgaaaatcagacagctgaagtcaaggggaacaggtgtatcggattccctcattg

SEQ ID NO: 317739 - DNA, 4001 bp, Homo sapiens
ataaatcagtatttatgtgtacttttaaaatacttacattttcagtatttctataaatctgttatttcagaaataattatgaaacaaatctttataaatggttagaattctaacatcaaaaggcattaatgtgttatgtaatatttttccaactaaaaactccaactggaatttgtaggatgaggttccttcctcaatcaaaccatatccacaagatagggcttacaatggaaatgaagatgtccccttttcagaaagcctcagcccttataaactaccttacaatttagcgtttgtgttaagatcttctctaattttgtttatgtaagtccatgtctttttctaacttattcttgaataacagggcccacatatgatttaagtacacagtgaaactcaaaaaagaattttattctaattcattaagaggataattcaattataatccactaagagtatggcaaatggctggtttggttttgggagttagagtaacagacattttaattttggttaactgaaatgtataaatcaacgcattcctatgttatacagtacctgtatttaaccaattgtgtcagatacaaatatacagagaggtggttcactagaaactagtcttaagctgttcagtctctcaaaatgacttgaaaaactccatctcaattagcatacacaactccagcagtgtgaaaggtgggcagtcatgggtcaagctgcttgtccaaaataatgaaaacaaactaacctttaagtcaatccttgcctctaccttttcctgagcagggagaatttctgcaatttctctcatttcagagccactgtaaaaaaactaattttgtttcccagacattaataaaatgcgctttgcatctacccccaagaccccattctccaggatgtcagctgccttccttgggcatgccaaaccaagagtcaagttgcagggaaaaagaaagatgatattttaacaaggggtggagtggtggaattaaagaacttcaaaaacaaggcaaaagttttttaaaaatagtaaagtagaaactaaatgattttagagcccaagacagtggcctctctccactctggttctcctaggccctcgagcacccagcgcgtgggtggggtgagggcacagtggggtgctacacaacaatgtagctgggactggactggaggcaggacaggtctgggtcaagccctccccggggagctcggccaggccactacccagaaaggagaggctgctccaacagcaattcaccgggagtggggaagcggagaccagactgtaggggccataggaatggggggtcagaagccaggatgtcgctgactcaaggcctgataccactagagcgccatctccgggccacaggacgccgcccaggccctcagcccgcagccctgcagagccatcgttagcaccgcaggttctactctgaaagcccagcctcctccttggcccaactgacacctgggaggagccccagatctttagggccctcagcgacccaactgcccatgaagaccccccagatctttggggccatgagcggcccaaccacccgctcaacagctaaagatggagcctgaggcatctggaagtttccacagtcctcgccctcccagacaggatttggaatgaacctttggggcttactaagtttcttgccaagtggacaggattagggtaatgtaaaatgccctcagagtgaccccggcctacggacagccaccagccgccaggcccacccagccaaccgtccccttctcggcccaaccgacacccagggagaggctccgaggccagcccggcccaccgcccacccgttgggtggtggaaggtggagcctcgggcagcctggaaatttcagcggtcttcaccctcccaaaccagattaggatccttcaagaccgagcagccgtcactacccacctggccaaccgtcaccgaggttctgacaggagcagggagccgacggtgaaggcgaagccgcgccccctgattggccagcttctccgcctgcggcatcctgggagttgtagtcccaggcaaggcccctacggagaaggttctggatgccgggttacaactgactcgcgcggccacgttggcggaaaaagcactgacattccttacccccagtgtgccaggcttttgcaacccttatctgcatttgagtcgcacaggatagcggtagcgttaagtgcagactctggaatgaagccacttgggtttgaatcctattctatcacctgcttagttgtatagatgcagataagcgattaactattcagagtgcagatgtcctcacctatcgtatggaacgataataactgccttccagtgttagtttgagggttaagtgagataattcatcagaggtgcttggcagataccaagtgctccataactgttagctattatttttcctataacattttataggaatgataatagtaaagagtagcatgaataaagagatgagttgagacatggaaaatggttttttgccaagctgagaagctgggattcgagccgtcttttgcttgactccagaggaatctctgccactgcaacctttgaggcaggcccaaagatttttcttggtgccctgagaaattgaggagtttaggctttcagcacaaggtgctatacaacaagtctttgcgtctatgcctcccctatagtacacaccagcctcttgaaccatcaccttcctgaaagcccacatcacaattgttgggtattttatatccaatttccttcactttaacactgcagaatttgttgtcgaatgcaattacctagatgaggagggacagaggagaacagagcttaatgataaccagctgtatgatcttagaaaagaatatcttccttattctgagtctctgtttccttatctgttttctattgagagggatgggctaaaccagtagttcctaaattgtactaattgctgggccactgttaagattctgtgcttatggcactcatattattattatcttctcctaaacaccttattgtctcctgtggttaactacagggagtttctaaaggtgaagaagtttttaatgataaccagctttgtaaaatacgaagctatattattgccttcatattttaaatctacttatttttaaaatttaagtctacttaaaaatctttatatcaccagtgttaaatagaataaaacgtaaagtcaggccaggcacggtggctcgcctgtaatcccagcactttgggaggctgaggtgggtgaatcacgaggtcaggagttcgagaccagcctggccaacatggtgaaacctcgtctctactaaaaatacaaaaaattagctggacgtagtggtggccacctgtaacctcacctactcaggaggctgaggcaggagaatcgcttgaacccgggaggcagaggttgcagtgagccgagatcgcaccactgcactctagtccaggtgacagagtgagactccatcccaaaacaaacaaacaaaactcataaagtcattggaaaaataaagacagtgaaaataaggcatattttaatcatgtatatacgctcgcaaccagttgcagtgttttctgcagcctgatcttttttgttaaaatgggttcttattaagtgttagagaagtgttaaagacagtctagcacaaaccaagactttcttcttgatataattagaatgactgaaagagttaaaagaggaatacaaatacggggagaccaacatagggtaagcaacatttatttctaaattaggacattaatgtataaaaccaagcaaaaagaactggcttcattgtattataaaagcaaggataatttaaaatcaaaacagaaggaagaaaataaaaggaggagggtcttaacttcagaataagactatcttgacagaaagcttacaggatgtatcctttctcctcctcacttattttgatgatgaagaagtaaaaacttcttcacttttagaaactccctgtgg

SEQ ID NO: 317740 - DNA, 4001 bp, Homo sapiens
ccaggggagcccgtggggacacatggaagctggtgggagaagctttcccacgccccccacgtggccggtggttcctagcaggtgctggtttgtacactggccctgggcggacttggcgtggaaggtgatgggagctgccctccctagagagcttcttcaggcacctgcaggagacaggaggcacaggctgcagccgggagcactgggcacctgtggacctccagggcccccctgctgacttcacaaagctctgcctacccctgcccagggctttagtgacatcatggctgtgatctcccctcccagatcagccccaggccctggggtggcatcctaggccctggtaggaagaaggacatgggagggaaggggaagagcctcactttttcgacaggaaagtgtagatctcaaggttctccagttctttcaagagaattctgtaatctggaaagcaggagatgggttatggtggcgagggagggaactgggacttacaggaggccgattgcgtgtgcccttaggggagaccccgggattggggattagaccctggagccccagcatccctgtccaaggccacagggccccaggagtgatagccaggtgcccggtgggcagcactttgtcctctccaaagtgcttcccgacacgctccatcatgggggtcacgacaacctcctggggagagaggacagaggcagtctcaaagaggactcagccatgttaaacagctgcccacatggacctgcatcccctcctgcacgtccaggtggtcactggtcccctcctgggcaacacccgctccctggaccccatggcttcaactcagcagggaatcggagatggatcccgggttccaattgccctaccaggagcttccccatcaggcctctgcagatgacttcctaggagacttggtgcttgttcctagggacaggtgaagctgtcatctctggggcttctgggaccctcagagccttacctttcaaagtgatatatttatttccgatcctgagccattcccccacttcagcttgatcctgagagacaagaaagagggtgcaggccgggtctcagtctcctgtccccacagctgcagacccagtgctcgtgaatgacacactttctccgcccagctcatggagcctgtgtgcttctctttcactggtttctaaagtgcgtaataacctttttctggtttccttctctggaaagcatggaggggttttctatgtgaggcctgccctgggtatcctcagtccctgttccgctgcttgggaaacgcacactcttgggtctgcaggtgcctctgagctggcagggaggattctgcttccgaggaggccaggggcgactccagtctcaggtgggaggctctcaggggctcagcacagcccccagagcacctcacacagaggctgggccccgaggcacctgcccaggaaggcggctgatgagcccgggctcagggcctgtccttccacagagacctcacccctctcatgaccgggtcctcgccgctgagtcctggggtttggttttgctctgacgcctcccgtgcacctccacagatggtctgggagcttgggttggaaatcctatgcccactccaacccctgcctgccctgctgtccctagagggatgatgagagttcccatcacaggagcgcctctggctgatgtggaaaagtggaaaagagagcaggaaaaatagaagcattctctgctgggtgtgggctgagggctccttacattctcgctgtcctcctctctgggaggcactgaggacggctccctgggaatgtagaggcgtaagataatcaggatcaccaggctgaacacaacaaagaggacgaaatggatgatctggggaatggggctggggcacagctctgtaccaataacactgtccagaggaaagagaatatccatgtcaactgcactgctgtcctcaggcaactgagccctgggcatcccctctgggacaagttattggggcccaggtccacatcacagagctggggcctccccctcacaaagggctcctaagggtggggtgggcagtgggaggaggaggctaaagcccagccccgcccaccaccacccacccctgcagttccctccaccctcctggccttccggatccctccttcccactccacctgctcaacctgtcagaaacagacctggtccgttttccgtcctcttgccctggcacacagatggtacctggttcattggagatctctgctcagactccctcagtttcacagtttttgaggatctggatttgtccctgaaattcctgttatttccagggattattgctccagggtctcctctgcctgctcactgcaacctccgcctcttgggttcaagcaattctttgcctcagcctcctgagtagctgggattacaggtgcctgccacgacgcctggcttatttttttaatttttagtagagacagggtttcactatcttggccaggctgatctcaaactcctgacctcgtgatcggcccgtctcggcctcccaaagtgctgggattacaggcgtgaaccaccgcacacagcctcaaaaaagtttttttagggctttggctaagtacatgaagataagtgatgcccaattcaggttttgccaaataacacaactcttttcagaaactacaaattccactggctctggcagaatgaatatcaacctaggtcaattctccataacaagaacccataaatttgccggccgggcgcggtggctcacgaggtcaggagatcaagaccatcctagctaacacggtgaaaccccctctctactaaaaatacaaaaaattagcgtggtggcgggtgcctgaagtcggagctactcgggaggctgaggcaggagaatggcatgaacccgggaggcagaggttgcagtgagctgagatcacgccaccgcactccagcctgggcgacagagtgagactccatcttgaaaaaaaaaacagaacccacaaatttgccagcccacttcacgtctcgactattagataacagcaggcaagatgcatgttcctgatgggcaccagttgcttacatggtgattcttgcaagatgcatgttcctgatgggcaccagttgcttacatggggattcttgcaagatgcatgttcctgatgggcaccagttgcttacatggggattcttgcaagatgcatgttcctgatgggcaccagttgcttacatggtgattcttgcaagatgcatgttcctgatgggcaccagttgcttacatggtgattcttgcaagatgcatgttcctgatgggcaccagttgcttacatggtgattcttgcaagatgcatgttcctgatgggcaccagttgcttacatggtgattcttgcaagatgcatgttcctgatgggcaccagttgcttacatggtgattcttgcaagatgcatgttcctgatgggcaccagttgcttacatggtgattcttgcaagatgcatgttcctgatgggcaccagttgcttacatggtgattcttgcaagatgcatgttcctgatgggcaccagttgcttacatggtgattcttgcaagatgcatgttcctgatgggcaccagttgcttacatggtgattcttgcaagatgcatgttcctgatgggcaccagttgcttacatggtgattcttgcaagatgcatgttcctgatgggcaccagttgcttacatggtgattcttctttgagttattggtgttttctccctttcttccctccctccctccgtccctttcctcctctcccctccacctaatagagggtccacgtctccacagggtcacctctgtctccagcattagaaaaggaagtcagagctggtcacggtgactcacacctgtaatcccagcacttcgggaggctaaggtgggaggatcacgaggtcaggagattgagaccatcctggctaacacagtgaaaccccgtctctactaaaaatacaaaaaattagccgg

SEQ ID NO: 317741 - DNA, 4001 bp, Homo sapiens
cccaaatgattttgtccctagaatttgttatgcaatactaggggaaggatagaggaagctcacctagtccctgctgtgtagctacacatacctgatccagatgatttctccccttcgaaataattgcaaacaagattaaaactgtattcaggaagtattccagctggcttttggcttcctctgatgtacagtccttgaataaagcagtagcaaaaattagatttaaataaggaacataaaaacacctcgctacttgtaccagatcacctcaaggtcctgctatgtttgaaaccccaaggcctagcattagagtaactgaatacatcagccagctagagtatatacaagttatgaaataaaaaaactttaataataaaaaataacctattttaaagggatttctcatagtgcctctgagtactttagagccaggcatctggaacaaaatagaaacacagtccaatcaactcccaagttggaaaaatcctcatttctattacttacctgccaacagtccatctaaataaaaccacacagccacatattcctctgatgaaggagacaaaaaaatattgatccttccttggcatgtggctactgctgccagagcaggagggaagaaagacaatctgaggatcctgcctgtttaaagcaccagccccaccaatcttaattttcacaacagggtctttctggttccaggcaattcctcagcagagcaggacgcaggttattgggctacgatatttcacacagaaccatgattagttctgctttgccccagtattatcataattatccaatatttccagggtgtatcttttttccccgtgttttaaatctttctaattacctataatgcaccccaatgtatacagctccaaatattggtagagagcttcacatgcatttttataagctagtcctcagaatatgaccaaatgagaagactgcgacctctaatagacacctcaacttgttcagcattgtgcaccaaggcatagctctagtggctgcttaaacaagacaatgtatactaattctgggaaatgcgctagaaagtattgggatataacagatcttagacaccatctctgtccttgaggaattgagaatcttggggtcaagctaaggccatactatggattttttttttaagggcactaaaatataaagtaccacatatacactatttattaataaacaagaataaagatcacccaagcaaaacattccctgtgaaagacagccttagaaacagtcacaagcctaactcacaatgacattttagtggggacttttctacccttggacttattaaaaaactgtatgagctgctatttgtcagaagtgaatatctgttgagaatgtacagtttctgatttattctctcattgttcagtacccagagggctgcttttgcccaataaggctgagaggagatccagacagctcatccagagagccccggcactcacaatgttccctgctgcacctttcaaccttttcaccccaattaaaggtcaacatggctgctcaaaaatatttatttaaaaaggcagtcagctcagcgggctcccaagtgtgattacactaccacttcatagaattcaattaaacccgggacggggcatcggcgaatcactggaggagtatgaagttgagatgttttctgctttctcgagatgttttctgctttctcttaaaaaaaaaaaaagcttccttttcccgcccgtcatttatttacttcccagagcgctatcacagacacacacacacgcgtttataatctcccccaagtagttcatggatttatggctcccggtttaattaaattccgtataacgactatccaaatgggcagcacgcggcacagcgaacccccgccagcctgcgcgtcagctcagaggcggagacccgcgagcgctcaccctcggcgcgggactaagggaacccacctgagcctcacgccgccaacgcctctgcttccgccctgcgccgggcacttccgcccgcacccaccaggcgccggccccaggccccgcacttccgccccacgccggcagcactgccgctgggcgttctatctcaggtggtgtcccgtctacgctctcaagggtggccgcgcctgaacctttactcgtgaagagtgacacacaaaccaaggccaaactaaaaaacaaaatacggaaaagtgaccccgcatgtttgggaaccatttaataagaggcctcaggtgcgggagccaactttttgaggctgcggagtccgagccattttaaccgctctgcatgcatccattctttcgttaatttaatatttactgcctcctccactaggtcttggctgaactaggttatggggaatgcgatgagcaaaactggcagccgtaccctcccgcaaactgaaaatcgtgtgagaaagcagatattaggaaattatcccttattaaataggccatgggtttattcagctaagtgctttgcagggaaggaatatgagaaaagacctgagtgggatctcgttgaagaggtagctttggggctgggatctgaagggcgtgggttggggacagagctctgcaggctgggggaagggtctggtggaggatgtgcagtatgggttgtatgcggaagactgacgagtatggctgagacttagagggaatggggaagagaggtggaaacaggctagagagggtaagcgagagtctggccatgcagggcctttcaggtttgtgctaagggtagccggggggcatttctgttttatgtgggaaggggattgaactgattgcttttcccttctgaaaggaccccttagctttgggaagtagatgggaagggtttaggataggcaagagtagaacaagcagggaggtgaggaagctactgagcattccaggttctaggtgtggtggcttgaatggtggtacagtaaataatgagaaaatgatggataataattatagtaatactcaaagctaacatttattgattgctcaccaaaagctttatactcattagtctgtttaatcctgagaacaatgcaattaagtattactagtaccattttacagatgaagtaatggaggtttaataacttgctcaagttctcacagttacaaaacggtagatttggaattccatctcatgctgtctgacgccttaagcttaccactataaattcaatgtgtactcagtggttttaaaaaagatacaaagcaaaccaaggtcaggaatgaattctttaaacaaaccacactgattatgtgatgtcgctagaggccacattaagatagtagaatttacaagttctttgtcacttcagcattttctgataggctaaagagggaattttgtgactgtcaacagactacctatagttatttttgagttgatgcactctgataagacttagtttttctggaaaaaaaaaagtcaattgataaagcacagtccacctaacagttgctgataggatacctttaaagaaggaatctgggatctagttataaacaccttggtggggcatgagtatcttagatattgtggagtgacagaaaagcttactagaaatgtaactccagatcagcttccaaatcttatttattgttggaaaacaaaggtttataaaatcacttggacttatgaaacctgatttcacccactgaaggaaaagaatggattcaaccaaggccaacaatgaaggcttttagcactggttatgagtaaatttctctaaggagccaaaagttcataaattttcagaatttgagtttaatcagtaagaatttcttgggtttgtaagtgatagcggaagacctggagcctccacattattgttttggttagagggagtcctgtcgaatgtctaggaatccctgagaactcactatggttgataccctctttgggagtgcctggctgactgccatgagctcagaggaccagtttagcctctaggtccagggcctacagtgctggggaagggagctctgc

SEQ ID NO: 317742 - DNA, 4001 bp, Homo sapiens
cctgcagtgttggggatagacatgtactaaaaaatttactctttgctttttggaaattcaaatttaactgagcatcttgtggttttatttgctaaatcaggcaggcctactctgtcccagtgtataagcatcacaccgcccttggttcttatccaacatccagacctatactggggcttctcagaatgggattcccatgaatttgggatgccctgagaggtagcgttagtagtgaaaaaggggaccctgcaaggtggaggcctcaaagccagttatttctgctgccgccctacccaaggagagtgtagatggaagtaaatatctaaatgccctcattagggtggggctgttccaacacaggaattacgacacacggccagactcagaggctgccctctgttctgtggcaaaagggtcccaaagtacagcccactgcttagcctgactgcccttcctaagtacttcttaaagactgcgtgtcccaaccgggctcaagcctgtaatcccagcactttgggaggccgaggagggctgatctcgaggtcaggagatcaagaccatcctggctaacatggtgaaaccctgtctctactacaaatacaaaaaaattagccgggcatggtggcgggcgcctgtagtcccagctactcgggaggctgaggcaggagaatagcgtgaacccgggaggcggagcttgcagtgagcagagatcgcgccactgcactccaggctgggcgacagagcgagactccgtctcaaaaaaaaaaaaaaaaaaaaaaagactgtgtgtcccactttatctgaggggccaatctgctcaagacatttttgagctgccagtcccgaactgcgtgcttaagccccaagagctagcaggtatccgcagagcccctgcacagggctgctgggagtttccattggccacgccttctgacctcagttctgcactcccatgctcattagctccctgcattcttggatgctcttgaatattcccctgctcacccttcttctcttgcctggtacaaccttggtagcctgaccccagaactgggctgcttgccctgggcaccagttggctttgttcccaggcattactgctgggattcgctctggactctgaaatatgcctcctcagccagcccgactgcccagatcccaccagcctgctctgtccagagagatgagacattcggactattcagtgtccgttcatgccatctgctgggatcatgatttctatactctggtcacacattacatgaataatacttcccccatttcctcaaaaagatcctcagacaagctcaacccccatgtgctagtagttcaggattctatgaccatcctaagtttacacaaccacttggccttggctggccaagacatgatggtgtgggagcctaggaagacccttcagagacggcagcaaccagactcctcttctcacagtccccctccagctctggtctgtcctcctcacacaacctccccctcacagttttggggtctcatctttggaccctctcttgccccattttccaaacacatcatccctggctgtattaggggtctctggggcagccgcactatgctttgatagagggatgaggtaaagttattttccactttattaacctgaaaaagcataaaccgaccaagtttaggggcctgaagcatattctaaacagacagtgtctcctccctgacccagttctcttacggaatcatgggaacccatctcctcgacttagcagcggcagacaggctggtgtttcttggcattgttttctagggctgaagctgcagttttcctgatttggcccttgcatattatttaattgtttatcttgacatacaggtttatcccagaaggggatgtttaaaaagtggcatggagaccctggctatagacagaaatgcagcttaacttaccttggcttccttcctgccagactcctcccaattattctgcaggcttctttgccctgagggcagtttgcagctccagggactggaattggcttaaaaaaaaaattccttcctctctgtgccccatgtgagggagcattgtgttctctctaaataatcagcctggctttgtgtgacctaactggacagggccctttgagagatttttcagttgcagaaagagcagtcagtggcatcctacaaaatcagaaagttttcagaccaaggagagaagtcagtgacagcaagatatttttttctttaagttgtattgtgactaattcctctctcccactggtgtttagagtaattaggtaaaagtgcaacagaagaatccaaatttatattttagatctaataaataataacatttaatcagatgatccccatccattaacaccaaaataacaaacaattcaatgaattattttagggtacttactatgtgcaaggcattgtcaaggtaattatttcttgcatttactgatttcctcctggggacgcagcactagcaagaagctaatggattagaaagaagtagaaggcctccagctgacaacccactcagaagagaacatggatcagaattgcctgcctccatggcaggcacagagctgggaattcataagcagaaattacttcattcaatcatctcaatagccctgtggggaagacagtagttctccattttacagatgtggaaactgagatccaaagactatgtatatagcaggcagaatgatgcctcccctccttcaaaaattctgaaggctgtgaataggttacctcaaatggcaaaaggggctttgaagaggtgatgaaaggttttgcagtggggatgttactatcgactttctgagtgggcccagtgtaattgccatggtctttaataagggggtagataggaagataagagtgagaatgacagggatgtgacaatggaaacagaaattggagtgatgtcgggtcatgagtcaaggaatgcatgcaccctctagaagctggaaaaggcaagaaaacagattcctccccctccaccccaagcctcctgaagacgccctgccctgataacccactgtgaacttctggcctccaaaactgtaagatatcttggtccattttctgctgctgtaacagaataccacaggctaggtaacttataaataacagaagtttatttgtcttatggatctggaggctgggaagtgcaagatcaaggggctgcatctggtgagggccttcttgctgtgtcataacatgcagaaggcattacctgacaagagagcatgcgagagagagagaggaagggaaccagaacttcattcttctatgtggagcccactcctttgataactaacacactcctgtgattaacagccttgatccattcatgagggcagagccctcatgacctaatcacctcctgtaagaccatgtttcaacattgttacaatggcaactaaatttcaacctaagttttggaggggatattaaactatagcagttatacatttgtgttattttaagccactgagtttgtagtcatttgttggaacagcaatagaaactaatacagtatgccccatttgcattccacaatggatttgaggtggtcatagacagttgctccagagtggtagaaccagtcaggactgcatgctatctaactggcccctggagttctgcaaggcaggggccctagagcaggattcaagtgaagtcaatgtgcccttaaagtctatgtcgtttctttttttctgatctgcttcctcaagataaaatttaggagcaaaatgagtgaaataccagaagagaaatattctgtaacatgacatgtttaatgaatgagtaaagagttcaggaaatgagtgagttctgaaaatgagttactggtgcatgctaaagtgatccgggaagacttgatagaggcaatatagtataacctgggccctgcagcatggacagattggaagtagcattagaggcaaacaggaggccttgcagctgagggaatgacctgatagaagaaa

SEQ ID NO: 317743 - DNA, 4001 bp, Homo sapiens
gaagactgagggcttcctgggctgctggcccagggttgggagacagcagtcacctggcttaccaggcctatgcctgaagccctgggaagccaggacgcaggccccaggctgggacaaagctaccctgaaggagggcaaaggctgccaaggccaaccccatgcctgccaaggccaggcctggcccatttggccaaggcctaaggtgtaaaacaaggggagaggtacaagaggctgtggggtctggctgggatccttggggtcttccttctgcattctccaaacgcctagagccagcagaaacgtttcgtctgattagaagccatcatttctatcccaatcccggaaaattgactgcggtgcagagagggaggcctgagaagcagccgtaggggagaaggtccaagctaattaggaggcagcatccgggggcccattagagcgcaggctgctgtcactcagccgggctgagttcccgggagaagaggctggagaaggaggggcaggcggcccctcgacgaggacaccgctgggagctgccggaacgggccccgggctctgcccccgccccggcgctggctcgaaggcgcccgctcggtgcgatcctgttcggcaaacattcactcatcctgggctgttctcgccagggctggggacttcgaggcggccgagacgggagttgattctaggcgaaacaagtcatttgaggcctgaggtgtgcacgagccgcccgggactcgcaggccagatgcgtttcttttgtgaggccgagggagaactcggtgtgtcaccggggaaggagggagaggcgcggcgaggccgcggggggcggggaggcggcgggaaggtggctgcggagggggagggcgcgggcgaggcagggagggagggagggcggcagtgagggcgcggcggcgcgggcggcttggggctggattccgcccgcgctccctcgctcgctcgctccctccccagccccctcccacccaggcccaccccacccagcacccctggcgcagggactgctggaacctggctgtgcgcgctgtcgctttaagacagactctgccggcgccgtccggagccttagaaaccggccccggatcgcgagccggagccggagccggagccggggccggccgggctgctgaggcccgagcggcaggagcgcagcgcggagcgctgagccaggcgcccagtcgcgagaagctgccgccgcctctgcccgcccggcgccgcagccccgggcggtccatggggcgggcacggcgtcgctgcaggcgccggcagccctggagggcagccgcttaggcgctgcgctcttgtccccgcaggtcgcagccagggcggcggggcgcgcccagccccggcccctggagcgcccgccgcggtccccacctccatggacgccttcaaggggggcatgagcctggagcggctgccggaggggctccggccgccgccgccgccaccccatgacatggggcccgccttccacctggcccggcccgccgacccccgcgagccgctcgagaactccgccagcgagtcgtctgacacggagctgccaggtaagcgccgttccccgcgcggcgcgcacagagcctacccgggcgcggagcacggggagctgggagcagggcctgacgcccgcgccgcgcaaccaagctccctctccgccccagaagcgtcaggagctttctttttcccgttctcgacctgacggtgaacgcggaaacttacgcacacgcgaaggcacttccacgcggtccccacgcgccaagagactggcagatgcacgagcctacagctggagggttggactgacagcccctcttgatcaggagtaaatagaacgggaaagaatttgatttgcgcaactgggcgctaaggagcggctcggacgaagggagaggaggagaccgagaaaggaagaggggtgacgggcgagagaacgcactcagagagacagagagggaggttaacaccgtgacagtaggcgacagaatgaaagagaccaaagagaaggggcgggcgggaagggtaaacggggggagaggggtcatcaagtagaagggagacacagaggacggtgagggcgagcgggccaacaggcgcggccggactcccagcaaggccagccggaacgccgatcaagggatccggcccacgtgcgcggccgaagcccggagcagcccggctctggcccccgccccggctcctgcgcgtctccctccgcgctgcctttttttgtccgagctggagcttttttccagcagcgaactgggcccgcgggtggccggcgcgggcagtggggcagcgaatccgctgcccagcgcagccggccgggttccggaggggctccgagctccccggtgtgggcgcctcttctgcgttcatttcttaatacacagctgaatgtttctctccactttcttagtatctgtttctcttttgcatccctaagtgatttttctgagaggttgtttgcttggttaaaacataatcaacgctgaactctacttttgttttcaaaagttttaagcgcggtctttggttggttttatttttaaaacctagagagatatataatcgtatattgatttttttgaaccaaatctatgaggatgaattaattttaactgtatctttcgattctgaaagaattaacgtacgaagtgtaggtctggaatttaaaatatctacatgcaacattattcttccggagattttaaaaagtcaatccaaaatggcgcgtttctccggaattttctcaaaatccatttacagtggtgttatttggggaatttaaattatctaactataatgtgtttctctgggatttaaaaattatctctacaagggccttattgggaaggagttaaaaatctatctacaacggtacattatttttttaaatcccagagaaataaatgcttctgtcaacctggagtttatacacttacagctctgtatttagttaggggtgtgtttgtacggagctttctggcttcttaatttacatttgctctgtgtttcttcctgtctgattttgagaatttgtggccctttcagtgtctttaggcatagagctgtgagcttttctgggcttctgtgttttgtttttaaactctttttctttatgtattaatgtttctatgactgcgtgtgttttgtgtagcttcaaagagagacagactaaagcccgaggtcacctagacagagtctgtctgtctgggctgcagttggtggggttttctaggctttgggactggaggcctggaagcaaggccgagaacccggctgtgttgtgcctgcccagtggggctcccatacacccctgaggagaagaaagtggagggactttaggctggagagatctgatcctagttcagaaaagcagagaccccctcagatttagaccccctaagagttcgcaaaacaaacaaacaaaaagcatacatttgctgggaacatcagcagcagggtcagaatctgagccgagctaagggtgcaggccctgcccagccaggaacgcaggcccgcggctccagctccgattcttgggctcttctccgcggcacaccagactagaggtgcctactgacgaccagcacccggcgggcgctttccagtggggacagttcccaggaaccctagagggagggagggagggaagaccgccagcgctggtggcgagcggttcggtggagccgggacggggtgcaacggggcgtaagcccaggtgacccgctccccgtcctgcctactgcagagaaggagcgcggcggggaacccaaggggcccgaggacagtggtgcgggaggcacgggctgcggcggcgcagacgacccagccaagaagaagaagcagcggcggcaacgtacgcacttcacaagccagcagttgcaagagctagaggccacgttccagaggaaccgctaccccgacatgagcatgagggaggagatcgccgtgtggaccaacctcaccgagccgcgcgt

SEQ ID NO: 317744 - DNA, 4001 bp, Homo sapiens
ctttcctttcaaccactagatagactagagaagccactcccctatacccttcacccttgccccccactgccaaaattggaattttctcatacagggaccttttcagcaagaaaaactaaatagatactttgttgttgtttttttttcttattagatgttggacaagacagatatcttccagaatatttcctcaattgtagagaaaacaaattcttaaagcttctggtgaaattttcatgtaaataatttggagaagttaaattgcaagagattactaattctcagttctcagcagacactgtcttttaacttccaaaagcttgaaaggtatgggtgagttttattccaattatcatcaaaaactgcaaaaacagaacccttataaaatattctgatcgctctttaagctataactgttctgaggcaatatggagcctgatataaattaagatggtaacattaaaacttatttgatgaggtactaatgaaagagctaattggtagcttttcttttttaatattctattattaggaatacaaattgttttatgttaaaacaattttatttttatttatttatttttttgagacagagtttcattctttcacccaggctggactgcagtggcaggatctcagctcactataaactcagcctcctgggttcaagcaattctctgcctcagcctcccgagtagctgggattacaggcccctgccaccacacccagctaatttttgtatttttagtgaactcggggtttcaccattttggtcaggctcgtcttgaactcctgaccttgtgattcacctgcctcggcctcccaaagtgctgggattacaagcgtgagccaccaagcccagcaacaatttttaatcaaataaaaataattacttctctgaatttttttgttatgatggcctagcatattgtattatatggtttcttatttattaatttccacatctctaggcattctggaggtatctaaaattacacacaggcattttacccattactgtacaattttcatacaaacatagaataaaagaatgttcggtcaatagaggaagataggaaaaaagtcttccacttcagtgccatcgtagaaaagcagaaattcttcagttttctcatagttgccatcccctcttgagttttccaaaaatcagtgatcccattgaaccattgatgatagctttatgagcatttagagaatttcaattaaaatgaagcccatcttattctaacctgtcactttctaatgtattttactcacatgaaccatttgtctgcaaggcagttcagcatatcttacccaacagatttctgaggatgctctagtttatccccagctataggttcttcctttacatctccatgtaaacttactgaatttcttatttcttattatttttttctgtgcatgcccagaggctcaagaaatgagcctttctatctttctacctttactatcgccaaggtaagctgggtagtccaggtgcatgactgaccttggctaaagagtatgtttgctttacttttaactaatttaactcatagagaaacttgatctcaaatgtcctctggaatgacatttgtttaaaaaacatgacctctggttcttttcagatttaaacaaagcaattataaaaaagaaagacaaagaaatggttatagtctgagttacatatttttatgcatgaaattgtaattttgttggaaacatgattaacaattttgaaatattaagattgaaaatgaaatcatcatattactcacctttaagcagagtttgtggtgtcctcggacctaagctgcaaattattggggaaaaaataggtatgcagaatgaagagggtatatatgttaatccaaacaaagcttcttttcttattgctagctaacacaaggcaatgctgtcatatcccagaagcctagcaacacctagagggttgtcaaaataaatgttctctggaacttgaactttgcaaatgattacaccaatcagtagtaaccctgaaactctgggtgttggatgttacacagagtcctgaattttcagtgagttttcaattcaagggctattgtagtagctattgctactgcatagaaatctctctttccattttaaagaatcctttagattaattgcttaaaattgctgccccccttaggaatgtatagattcttagtttttgattatagaatagttattggtaactatttaagaaatgtttttggagacaatgtgattgtgtatgtagaaaattcaaaagaatctacaaacattagaattaataaatgaatttagtatgatttatcaacacaagtttattatagtaaaaagtgtttctatatgccagcaaaaccaaacagaaaatttaatttggaaagaattaaaatagcaatgatcaaatgggctctttatatgtaatgatgattacgcttctctgaaatggttgcaatttaactttagattgaagtaaaatggatttcatcctaaggtgaagcagaacaaaatagtgcaatagaaaagaaaaaaaactatagggactgagaatgtggatacatattctagtcttgtttctgcactaagcagctaccagctatgtgagcttcaataaatcactatacctcattggaacactggtccctcatttgtaaaacaagtgtttttcaaacttttttcaaagcagtagaaaacaactaaaacaaatattccttagacagcttagatttttatcacatggtgggaaatgatgatctcagcaagtctaaagattacttgaaacacagctgggaacccaccactcaaaggtcacatagtttaatatacatggtagtaactttcccaaggccagagtaagtcagaactggaatacagatgatctgatttccagtcttttttctctctcttatactacattgagattttaaagattgaaatttgggcctaaagagaaagtagagtggtgtgctgcagaccagtgttgaagctagtttggggctgggatagcagcttcacccttgattacctgagaagataaacaggaaaagaaatatttggtgattggacaagaatatatgtcatttaatttgcatatttctttctttaattggtctttgaggtcctaaaataaaattcatttgtcctgagttcaaggtgtttggagctaaaggcaaatactggaagtcataatacagagagatgcaaagttaggtgccagtaggatgagcttaaagaggactttatttgtaatgtgggctatgaagaggacagagaagtaagattgtatgctgtggcactggaaaaacacaggtggagagagttaaggatggtaaggggaaatccttgagatggaatgcgaatgtctgtgatccaaacactagaattgacccagcaccaactaagaatctagaatcttttcaacaatgtatttgggttctccatcttgggttcttttggaaggttaaatgacatatctcactcatgagtcctttttctagagcagggattggtaaactagcctgatgcccgtttttgtaaataacgttttataggaataaagtcacacaattggccattgtttatggttgcttttgtgctacaatggtagagttaagaagctggcaacagaggctctccagcctgaaaagcctaaaatatttaccgtctggcccttataggaaaagttgcaacccagagagaaatatttctggtctgatacatacaacaaagtgtccagtggctttgggaagtagaagtaggctaattgggactgatgagtaggtgattgtttcagagctaggaattgaatacttgtgtgcagttgtgctcaggtctgactctgtgcatgcaaagaatataggtgttctctaaacaatatttagatgtgtgctgctgaaaaacaaagtctgctatgaagtttactggcactggctgagttgcttcagcaactgcaggccttctgaagttttggctggtaacacagaagacc

SEQ ID NO: 317745 - DNA, 4001 bp, Homo sapiens
tttaaattctatttttcaggtcagtccaatgccattaaaaactgcatagttgtcccaattttcagcccctgaaattaccaaaaaaaaaaaaaaaaaatctctgttttctgagataatagcactattttcctacaacaagacttaaactgttttcagcacattaccaccttaaaaaaatcaataaaccccttggcataaatattgagaatttaaattaccaattgcttataagtgggccttaactctaattttaggaagaggtttctgtttcctaattagttcattttattggcctgaggctgcacttaaaaagaataaaattatccattattttttcctaatatctcccaaatgtcgtacctattaagaatagggacaccgtcagctttcagctttcaataggggtgctgttggcattatgatgcgtcagttcttccttaaaccagaatgtctcacagaaattgaggattatttggcatgtctggcctgaacccactaaaagcctgggctgtccccacacatttccaaatgtcctgtagagaacaaaccactctcagctggaaatctaaacacctctgaggagaaagaattgttttattcaatttatctacttattatccagttatggataatgatttctaggttattcatgagttgcagccaaagcttcctatagtttaatttttttcctcaaaagtaattcagatgaatattttgcttttcgtccactataagcttattataaggtacaaaacacaagttgattattttttaaattttcatttgcctaggcaaatgaagtggtaacttgaacacacacacaaacacaccacacacacacacacgccagctttgtgacttagttacataactttcttcagaaaaaggacatactacaaatattggaggcacagactttcaaacacgttatatcaaaacttgtaattagtgctttcagatcccttctcttcagtaaatccagaattgttcagtaaaaacaaacaaataaacccccccccaaaacaaacaaacaaataaaaatgctgcaactgctggcgcagtggctcatgcttgtaatcccagcactttgggaggccgaggcggtcgtatcacctgaggttgggagttcgagaccagcctgaccaacacggagaaaccccatctctactaaaaatacaaaaaaaaattaggtgggcatggtggctcatgcctgtaaattccagctactgaggaggctgaggcaggagaatcacttgaacctgggaggtggaggttgtagtaagccaagatggcgccattgcactccagcctgggcaacaagagtgaaactccatctcaaaaaaaaaaacaaaacaaaaacaaaccaaaaaaacccctgcaacttctctagtcttaaacacaccagtcctatagatggatactgtgggtaaggagaaacagaatgaatgaaaatgaaaacatgaacaagttagatttgacaaaattacacttcaattagtaatgacaagatactacacaaaggtttgttttccaaatgtgaaatctccattgacttcacaaagacattgtcacacagcaatcacatattataaaaagcaccatcgcaaatgtacccaaaaccatattctataaaactgaactactgcctttgtaaactttcatctggaaatcttttaaccagccatttcaagaagcaccaacctcatatgcatgcccaccaattaaaaaaaaagaagaaaaaagtagaaaacttactatgcatctatgacttgaagaaataccagcagatacttcagcacatcaaaatccaagtccagagtaactggtttcatatttcttattatgagctctcagcaggaatcttactatatgatgaaatatttaagctagaaacatctctctttaaaagtatttcagtttttaagactcagtttcagaataaaatttaatgaatgttatgttgaagacatacaaaattaagagagacgggtatattttagggagaaactcctatgtatgctaaaccggattgagaatctctacattttagtttcctttttaaaagaaattgcaacagagactcaatgcaaatccagacacaactgtgttgttctgttttatcttcctacccccatctcctgcttatttttatcttttagtgcttttttacacaaattaaacattgcaaaaactattccaatttttaaaaatcgcaaattcagaaagattggagttgcatctcaaatatttaaaaacaaatcttacaattaaaattttcaaataataaaaacagtagtttaaaacttatttaattgtcacttatcaatccaaaattattatctttcacttcatttttaatgagattgattttcgtttttaaatagcaatgtcactacatcagaatgcggtgatttttttctgcattcgaaatactttcaaattctatgtttttgacaggtttttagattacatagaaaatgaataaaaaacattctgttgaataaaatatactgaattatataataagcaagacacactcctttggaggataaactgctggcaaaacaaaatatcctgtatatatataagtgagcaagaaaattctttctcttttttcttttttcttctttcttctttttctttctttttctgtctctttcccttctttccttctttctttcctttcttctttactctcaaaatccacttttcctaaagtatgttctacaaaactggaattgagaattaaggtgggcagggaggagagggaaaataaaaagataaaataaagacagataaaattatagcaaacaattggtaaaggctacagtcacactccaggatggtaggcactgcttgaagtaatttaaaatggagcaaaagctcagatttgtattgtagtatgaggatcaaggaggaatttaacacctgaaaccattgtgcctttttattgtaaatgctgcttcctccttcctacctccatagaaaggactttttatttcgctatttcttcctctttgaggtcctctaggtgtgcatagtgagcaggaagtttgtgtcttctgggataactcaaaagatatcttaaaagtctcatttttaagactgtgtatatctgtatggatagggcttgtgtaactgacttcccagttttggggtgaaattcaaccttttcttttgtttccattcttagaaaacatggagaggcattctttgatttagaaaaattgagattattagaaattttgcttttctgtgttctgtaatccatttggttatgacaaacttcatacgtgactgctgtttggagtcagtgtgcaaacaagcattatcatattatgaagagatttaattaactaggtaatatgtttgaatatccagtacaaggtgaaggctgcaaaacaaattagttttacccactatctgaaaagcattccttcaaacggagggattttcaacgtacttgattctttactcatagatcaggtggtaaaataactagttttatttttttattttggctgaagtgttttcatcttttcttcactacgacctaaggaagaaagctattataacataagtatatgactgggtaattttttgtctttgtttttgggattgaattgaaacatgatgtcatttacaagggtgtaaagtgaccaaacttggaaataagccatggccatctcatggaatttgttccccaacatttacagtttttgcagtgaccaatagaacaagtgaccacgtgcaggtagtttataggctgatagatagttcactgttccatgtgagaaggatgaatcaaaacttaaggtagattgggtgaaagatatttgctgtttttaagattatttgactttttaaaaaactgtaaatacaaatttcacgtaatttatttgaacaatgtctactccttcctaaggtcatttgatttcctcaaaattcaaggtcagacaaggttatgcttcagccaagatttgcttttggtcccgtcttac

SEQ ID NO: 317746 - DNA, 4001 bp, Homo sapiens
gagggacggaacaaatggctgggccacagccagctccgagggaagtcccttgtccctgacatccttctccaacacctcagatccaagttatttcctatccaagaacacagagagaaccaaagggaatcctgtgactgtctctctgaatttagttcacgtgggggctgtggggccaaaacattgcttcctcttaaaaagtctgacatagaaaccatttctagcttcttgatagcccaaggctttcacaagtgtcccttctttgtcacatatcaccaaagcatgtccttcaggtttactgtaaaaatatgaatgtccactttcaaatacaggtaagaactctacatgcgacttggagtgaaataattgctttagtgttacagttgttttagaacttgtctatcaggcttcccaatttttgctggaaagcccctatatgtaaaatttttaaaaaattaattgctttatttgttgatattttgtcaactaattaaaggatagaagtatatttattattacagcagtaaaatattataataatgattgtaaacatgtttttaagcacaaagcaattattaagatttcttattgtaaaataaagtaaaagattaatagttaacacaaatattaggaaaaaacattttggctagataactttcagaagagcatcattttcttttcttgttttttttttgttttttttttttttgagagagagtctcaccttattgcccaggctggagtgcagtgtctagtgttgccatctttatgcccatgagtacccaatatttagctcccacttaaaaattaagaacatggggtatttgattgtctgttcctgcgttaattttcttaggataatgacctctatctgcctccatgttgctgcaaaggacatgatttcattcttttttatgactgcccatcataactttaaacaaattaactttgttatttgtgtttaattttaattatttaatttcacagaaggcatggcttaatcaagatccatatcttgctcctcctctaaccccaataatgagcgagcttggattcggtgccccaatggacaatacagtgactatggaagcaatctagccactgacagatctgtgaaattattcctacagtcttacaatgcaacatttttaaagtttaaataccaaaatttacaataataaaatttgaatagcaatctcaacttatttttgcattccagagatttagtctatgatagcgatttctatctttggtcttatcttttgttgaatagctttttggttgtgttttgttttgttttttaatatttggcctttttgcattgggccaacatgtatacttggtagacctttagttttattccatctactcatatcttctattctcacaatgctgactctttcatccaggatttcaaattctcaagttccaagcctgcaaatttgcttttctattagctcttagataaatcgcaggaccctactgcatggctcctaatccaaacaagcaaaaaaaaaaaaaaaaaatacaccagaggaaagtttttcccaagaaataacaatagtactattgtatttctttatgactttatcgggactttcataaacattgtctccaattcctgattcccagacctctggacctataatttcaccacaagataagaaaaaggaattcactttggctgaactgttaaatatgtttaaataaggatttctaaacatcacccccaggtctttttcttctgtattttcctctggccttctatttatttgatgtctttcagttaggtattacacctcttcgtttaaattacatttatattacccccgttcatttgaaaagatagcttcatttacaaaagtaatgaatttattgtcttaccttcatgtttgggaaaacattcagggcagaagagaggaggaagatttcctctgtaagggccgggtaagttttcaacagcaggaagagcccagcaggctgcctgcctctctgcctctccctgctctagattatcttggcactcatatatagagcaagtggtcctgagatttagctcctaccccaaccggattctccaacgacagcaagagcctgaccttgtacttaatctgtgccttgaaaccagatgcatcttatcaattacacagccttagctacagccagctgggactgtttggaagttatagatatgtttcttagaaacatatctataaatcaggaaacacagcaaatgttctcagttcaatgtttaagtgattttcaaccaaaggagactctgtaaggcaagggatgagcctccttcttgtttcaatctactaaactaagtggatgttttcatgattctcttaaaaggtgttatatgccagactttgagattaaatattttatgaaagaaaatatttaaatgcagttctgtcactcaaaatctaaatagaatgttctggagtagaatttttccccaaagtacagcctaatacaacccaatagtcatcccttcatgcttaactttcacagaataatcagaaagaatatcaatttttgtaaacatatttgaggacatcactaattttctcaagaacttcacttaatcctttgataatcagatcactgtgttggaaagttcttctcagggtcattatccacatccattttctctcctttgctttttatcttgtcttattctaccaggtctttattttcccatagctttgcattgattctagcaagtccccaacatcaccttcatacatttaataaaatgctgcttattttgcaagattttagatttcctattgaaactgagctacagttggccaggcgcggtggctcatgcctgtaatcccagcactttgggaggccaaggcgagcggaccaagaggtcaggagttcgagaccagcctggacaatacagtgaaaccccgtctctactaaaaacacaaaaaaattagccaggcatggtagcatgcacttgtagtcccagctactcaggaggctgagagagaagaatcacttgaacccaggaggcggaggttgcagtgagctgagatcgcaccactgcactccagcctgggagacagagtgagattccatctcaaaaaaaaaaaaaaaaaaaaaattgagctacagttttatttgtattgttggaccaaatattctaacactagctgctagtgcattatgagtgaggtagaataaatgttaagcgggaaagaaaatttgagttaagaataattttataagtaaacattccattagtgaagattttctagctttaatgactttttcttcctatatccaaagcactggaataataaagacaacccctatcctcccctcataaattaatggtggtttccagagacaaagcttccgcatcttttgttcaaagctttagtgatttgtgtggaagaaattttgtcacagagacaaagatcctgactcctgaaagaaatattttttattcagctccaactgcataaattccagatgccatagactcatcttaaattctcaatatacaattccatttcagcggctctcttagtttgggttcccccagaagtagattcagaaacaagaattcaattgcaagtagtttgtttttgtttttgttttaagagataatcttagaaagcaccactggaagtgggaaagtgagattggggagaaaagaaagtcaataaagggtgttttatcaagcaagagactccagtgggcaatttgagttcagttctaatgaggaactctgaaagacattgcacacgaactctgcaattaagagttagtccagccaggtgtggtggttcacacctgtgatcccagcactttgggaggctgaggtgggtggatcacttgaggtcaggagttcaagaccagcctagccatgatggtgaagccccatctctactaaaaatacaaaaaaaaaaaaaagccagttatggtggttcatgcctgtaatcccaactactcaggaggctgaggcacgagaatcaccggaaccc

SEQ ID NO: 317747 - DNA, 4001 bp, Homo sapiens
atccagcttgtggtgctttgttatggtagtcccaggacataaataaaaccacatcttacagacgagggaagcgaggtacagagaggccaagcaacccgcccaaaatgacactgttggtaagtaaaggcaccttgacctgagcctgggaagtctagcttcagaggattttaaaagttattttgcaaatttcagttagctattattcaaacaaatcgtctcacttcatgactgagggctctgaacactctgttttgacctcaacccccgtcaaagggcaaagcacagagcattcagagcagggcaaccggggcaaactcaagagggcatagcaatgggagcccacgaaaccaaaccaaactcagccgtgcagctgctggagctggggtccagctaatggggctttccggtcctccctgaaacagctgagtgtggccaggacccagggggtacgcacttcaaagcaatcaaagcttccccacagcctctcatttttgatcagcaggagctgcaatctaggaatgtgggttgtttgaattattattattattttttagcttaagaaagggtcaggtgaagttcaagggagctaaagcaacttggaggaactgcctttccaaatcccttttgtgcccagatgcccactaaacaaaaatatttcctgaatggtacaatgctttacagataatatggaaagaggagggatgaaggaaaggtctggtcgagcactggatccagggcccatgttcatctgtgtagcacctctgggtgccccctcctgaaagatacagccctgtgaataacccacttgttgagtggagcccaggctgaatggcggcctccaactgcagccaagaggcaggcaaatatgtactggagacgggcatcaaagttcaaaacagcatttgggtaaaccaagagtcaaatgactaatgaggaattggaagcaggttatggttatgtctgagcagaggaacagggcttgggcagacatttccccccagccacactgttgaagtgaggaatatttcagtactctccccagaacggatcatcctgtattgaattatacaggtcgatgtctactctgatgactccaggatggaaggaaggatgcctcatgtgaccctaacctccaccatttctaggtacagtgtagctgttcaataaaaacttattatatgggtgatttgtttcctggatgacttgccatgggctttgcaattccgattaggatcagagaaaaaggagaaaaagtatctttggtagaagcatgagtgacaggtctgcatcactgcaattctggaatggaagaaatatgacctaaatcccaaatggccctaaacaaaatgcatgcctctgaacacaactcaggatgtcaagggaaagaaacaaaatagttaacctttgcctaatgtggaggcaaaagggtgatgtatccaaatgttaaaggtgtcaggcattgaagcagagtgagggaaagattaatttccttaattttaaacttctcagacatcaggcactaataaacccaggttcatcatacactggtgaaaacaagctttattttataattccagatatttaaagaatacctcaatcttaacatttgagtgccttgttgaaaataaatccccagaaacagcagcacatttccacagaaaactcataaagatgcaccctatgtattttcttatctcttttcgaagtttagattctagggctctgtatattgccatgtggattaacattgtcatgtactttgctgctaagaagaccttgagatgctaatcctacaggaaacttccagagacaagcagaaaagtaactgactcacctggtcgtgtactgtgctgtgaggatgcttatttctaaaatgcagattgcaactgcaaagctccggcaggctgacatgctgctcttgctgggtggctgcgagtggggtggcagggcaggtctggtaaggcatttatttgcaaagggccagaggacagggaacaagcattgtttgtctgcattcagagtttttgtcaatttgggtggcctgggtactgaagtccaaccaaaggagaatcattttgtaattcttggcctcctgctttctcatattgacaagtagatatggggcaatgggcctgtgaatgctaaagtccctaagatgggcagcagtgctgtgtgaaaatggaaacaaaggccgggcgcagtggctcacgcctgtaatcacagcatgttgggaggctgaggtgggtggattacctgacgtcaggagttcgagaccagcctggccaacatggtgaaaccccatctctactaaaaatacaaaaaattagccaggcatggtggtgggtgcctgtaatcccagctactttggaggctgaggcaggagaattgcttgaatctgggaggcggaggttgcggtgagccgaggtggggccactgaactccagcctgggcaacaagagcaaaattccggcaaaacaaaacaaaaacaaaaacaaaaacaaaaaaatagaaacaaaaatgaaggacccccagcagttcttagtttgcaagactcgaggggttgggtggaagatgagggagtatgcaattttggggaaaaaaaagcctgtggatgcttctcatggaggcatgaagtcaaagttagtaaagaactgcacttagtggaaaggatggcacagacgtagatgcttcattttttttttaatctgcaaatgggctaggtaggttatttccacgtgagcaaatgcatttacaatcctggctttccttataggccgagtggtacattttgaagaatgagatgtaaactcccgaaggcattaagggcgtccaccagaaagagtggtctccttatctcagcatcacacatgtcaacaagatagaatctgagacagaaaaacttgttcctacccatgaaaaatagtctccccctcacatttcatgcttcccagcacttgtgggaagagcagtgcctttttgggaacaccagagaatgtggacatcacaactgctcttaaagcactgactgcaaaaatagaatgacctggggactcttgagaacagtagtgatggctgcccgctgtctgctcagctctaagttaattgacttgtgatgagaccctgcatccatgcttttaaaagctttgcggatcattctaacgtgtagccagggttgagactgaggatgaccaccttgagaagaaagacatcagatatctctggatatagttcttaaagggactttataagtattattattacttataggcaaatttcaaacattagcacatataaagaccagcaaagcaaggggtggagctgagggaagacagaatatacagctattttctccagtactgccttaccttttctactgatattcctacctgtggtaaaaggtatctactctcacccactttcttggcccctctcctttttatgcagagaacttgaggtcttcaatgggactgatctcaccttttcctgagcttgctgtggagtgtaggccatgcagaactgccaagtaataagatgattcgaatggatgccacaactcgtgtaactatgtcatgggatgagtccatgcctgaaagacacttcctgtgagtcttggctaataacaggtgggctacatttggaaacagtatgaatctgtcaaatatgctgtagcagggcaggtgcagtggcgcacgcctataatcccagcactttgggaggcagaggtgggtggatcacttgaggccaggagtttgagaccagcctggccaacatggtgaaacttcatctctactaaaaatacaaaaattaggtgggtggggtggtgtgtgcctgtaatcccagctacttgggaggctgaaacatgaaaattgcttgatcctgggaggcaaagtttgcagtaagccaagatggcaccactgcactccagcctggacaacagagtgagactctgtctcacaaaaagaaaaatgctgtagcaatgttgagggctcttatgaggcctc

SEQ ID NO: 317748 - DNA, 4001 bp, Homo sapiens
ttcagaaaagctgaaagtctgcagataagagtgaacacacgtacacatgggggtatatgtgctcaagggaggtggtgcatgcctgtaggatagcctctgtgtgtgtgtgtgtgtgtgtgtgtgtgtgtgtgtgtgtgcaagcagccttcctgtatacagtcacagggccacctcccacacatatgcagacaccagcatgagctcacacatgcctataacacccatactcccacataaccctgtgagcccaggcctcacacatgcacacacatgcgtgtgcacacacacgtacatcatcctgtgtgcatgaccccagtcttcacgtagatgtgcatatcaagacctcacaggaacaccattgtgtccgcatctcatatgagcatcctcacacacccctagacctcacacacatgtgccttcctatgtgcacacagctctaacctgccatacatgtgcacatttaatgagtcatgtttacacccttgttctcattcaacccagccaacagcactcttgtaatactcacacacatgcacccttgcaaggcacacttgcattttcaggccttacacacgaagcacctcttcctggtgcacatgcatgaatgcttgcacaccctggcagggcacaccagcgtaccccagtgtcacaagcaatttccctcaaaagcccttctacagccacacacatcactcctcaaaatgcacactagtacacacacattcagaactcacaccaatacacacctgcctccagggcccctccccccgtgctcctgctgcctcagcagaaaccaaccagggcatcggtgctcctttgcccacaaggcaaactctgcctccaaaatgcacccaacccttgacccatcccaggatcctccagaaacccagctggggacatccaggaatccctccctgacactccacaccctactgggccacccacaagggcctcccctctttcctcatcctcccatccttctctacacagcagtcatcagggcagaaaatgagctctgggctgggcaactttgcttgtccagagccactgcacccttcataccctagcccctgaaacagcggtgctccccgctacagctttcctgatttcctctccccacctcccaacacccgggaagcctgtcatgctcagatattaacccctactgtactgacgccctcactcctggcaggagctgagaaaggggaggtagggagggagaagttggccactctgtacagtcactgtgggtgtctaaagtcaggaagaactaccgggagctggtgaattctctgtcactggaggtatctaagtggagggcggatggccacctcaagcaaaactagagaaggaattccagctttggacccagctgactaggaaaatccctttttaaccctaagtctctaagaatctgtgtgtatccaggttgtgtgtacttgtgtgcattttgtgtgtatgtgtgtgcactggcatacactgtcaacccttcatccctacatacacactggcctggctagcttggcacatctgtgcacccacaaacatacccacgcccgactctggacactctgtacacaggcaggtgcccccaaacccatgcagcctgccttcatctgtgtacaaggaatgctccccaagcactgcaggcacacacaccccactagagaccctgacctccccgccccccatgccttccaggacttcctgaggcacaactcacttgcccaattcctcgaagagctggtactcttccgtgaagcgggtgcaggtgatggtggccatcctggcgctgggcaggcaggtgaggcttgggactgggggaccaggactgaggcgctgctgctctgctcccgaacctagggaccacttgcctgcccgtgctgccgagtgcaaacagagaaccggtttgactgacgagcccggggcttctgagcagggcactgtggctgctcacagcctcgcgagccttcgtcagcatccaggtccccatggcaaccacctccaaaacgccctgttcccgttgccccggtaactgcctccccaacacctgcctgccttccactgcgaaacctgctctcggacgccctgaccataccgcacacaatactgcaagcctgtgtgggcctgggggtgggatggacccagcacccctggggtgatggacccaaggagggcctggaggaggtggaatagagcaaactttgtccacaagtgatcttttctcttcccacctcccccacctccaactgtggggcccttgtagcagacgggatgggattaagtggggcaaaaaggcagttgccatggtaacagccagtgggtgccgcattccggatggtccccaggaacgaatgacaggatgcagttaccctggcaacttcatctctagagagacaggtattgccccgttgccctggcaacagctgggttctaaggtttacagggaaatgatggctaattcacagggatggctctccctctgtggatcactgtagtctctgtaactgtctctctgttgccctctgttttttttttttttttttttttgcttctgcctctgtctttcttgttatgctcgtgctctttcagctctcttaccaccttgtccatcacactagcactccagcttggcgcagaagtgcagaggacaccccaggattctggagggaacagccctgactgcctgctcacccccacctctcacagctgtgacagttgctcccctccagagccctcctctgcaacctctccccaaccccatgcccccaacgggaccatggaaatctggtctcctggtgctcatgtcccagtttctgcttgtgcttccagtcaaggtaaaaaaaaaaaaaaaaaaaaaggcgagagggggctgtggggaggtgagcatagcatggcttacccgggctaggccactggccagagacttgccatgaaatcttcaatccaaaattttctgggcaccttccctgccaacttcaactcttcagggcatcagccatacctacagccacaagatcttactccaaggtcttggagttaggaagaaaagggactggagtttaagactaaggatctgagtttgagctctgattcctggacatttattatttatattatttatttatttatttatttattttggagacagagtcttactctgtcacccaggctggagtacagtggtgcaagctcggctcactgaagcctccgtctcctgggttcaagtgattctcctgcctcagcctcccaagtagctgggactacaggcgcacaccaccacgtctggctaattttttgtgttttagtacagacaaggtttcaccatgttacccaggctggtctcaaactcctgagctcaggcaatccacctgcctcagcctcccaaagtgctaggattacaggtgtgaggcaccatgcccggcctttggacatttattagctgagtgatcacgggcaagtcactcaccctctctgagcctccagctccttttctacacaacaggggaatgaagatgccctgcaggggaaggctgtggagatggagtgggctaagggctgtgaaggcctttgggaactatgtaaataggaggcctctttctaggctctagaggaggaaaatgaaggtttaaagctggcccgtgaccaccccatcactctagcttgggcttggcatctcagaccctgcataccccttcccctctccactgaggaaaaagggtgccttggcccatttcgcagcttgatgggcagaggcttcatgccagcacctgcccccagcgagcatgggttggataaaaggatccaggcatccagaccctcagggattctagcccacccgctctgaacctccacattgccttgctagtcctctcacttgcaggacatgttatctgcttgttggtattctccaaccccatgaagtccctgactcactaccctacttgcaggggccccctggagacatctggataaccctcccattctgcccttcttcctgg

SEQ ID NO: 317749 - DNA, 4001 bp, Homo sapiens
atttcttgagtttcatgacgatgaagcttattcataaagacaacgtgtgtggataagtcagcctatttgaggcatctagggttaatgttactctgaaaacagatgtgctactgggacagtccctgcagcagcatcaggcacttcctctactacacagtagtttataaaacacccagtaaacaattttaagtagatcatccctttactcagaggtttacatggttccactgtcacgcatcatacaattaataacaggcatgttttggaccttacaaaaatcgacatcattgtcctttcatttccacctatatatataatagatcttcagatgaatactgaaaaacttgatcaaaaatggatgtttatgtatacattattcagtgctcaaatacttcaaaacatttttaacagtgacaaatcactgaattttcattcagaagtttgcctattttacacatctatattcaatgagccttcaatagtactagcaaagtggggggagagtgggcagtgatcattacatcttcccactaaataccaacatccagaatcctgctctggatcctccaatgacttgaaaaaataaaaaggctgttagcaatactatttccagcaaaaagagaatgaaaaatgaaattgcaaaggagtagtaagtacagaagctgcaacttgtcaaccgttgaaattacatcttcagattccctatactaaagagcctggatctaaaataagtgttgaaaataaatctccttacctatggataacagagagaaaagacaaaaaaaaaggaagtaagggaaagaaaactataattttcaatggatacaaatacgaaagcatatggaatcatgcagaaggccaaactgctacctgtttggatcttcagaggagggataggggacatatctgcaatcctagggagatggtctgttgcatatataatttaaataaatcactccagcccatgaaagaagggaagcagcagcattctcactaattaccactgcctggatcccatatgctgctttctctttaaagccacactagttcattattctgccttcaactctcttaaatgattcatttctcccttcactcctgagcagactctgcagggaagctagtatttaagtttaatttctcgtgtcacttgctttggagagcttgacgaggggaaggaggaggaatctaacttaataattctgtcttgatttggaggggcaccctccggcccccaccctaaacaataactagacaaacaggaccctctggcaagctataatcgtgagcaaagatatcaattgggaaagcagggcccacgtgcggtgggagctgtcacccaagggaagtggcagcctgcgagaaggagggaaggtgggagggagtcgggctgatcctacagctgcaccggcctaggcgctctggtggggtgggaaggactcgagccgcacctgaatgaaggttagctctctctcaagacactaactaggtagggagaaatcgaagggcacgaaggcaggctcccgcaccctccgagccgtcgctgcgagagggacaacccccagtgcacgccgcgggcttccccagccggagcccgcgccttaccgtcccagctccgactccacctcgaagaaatcgctcagcgcatccctgttggagccgtcgatccagtaatccgggacgaggctcgcggtccccggggccgcactggcggtgaccgaagagcaggacgaggcggagcaggagggcaccgtgactttgagcatcttcgcagcgggactccggaagccgccgccgccgccgccgccgctgcccgagcgagaagccggccgccagccgccgcctgcgaacgcaggagcgagagagaggcggcgtccttcacgcgcgcacacgcccaccgccgccgcccgcgctcgcagggacggtgggcggggaagggggcgagcctctgcgagagggcgcgagggggaacccggagtcgccgcccgctggagggagactagctgcaccgctgaggagagaggctccctccccctcgctccttccctcctcacccgccctcctcccgcgccgagcctttcccgccgccctccctctttcctttctctctcccaggctgtggctgccgcggtgccggctagggcggctccggatgctggagcttggggaaggcacaaggacccgcgcatcatcccacgcgccctcccgcggggaccggagctggagggagaccgtgcgcagcgggacgctgctctgggatggcgggcgccaggcgtaccctggcagcacctgggtccgggcggccccgccggatagcgagagagggacctaggtggtggtggcgcaactcatccctccttgagcgcgtctccgtggcgagtccctcccacctaacaccagctaaccagccatcctctgtcaaagcttatattggtggccggggagggagtactgtggtcgccgatccctcagggctcctgtgcctggacccagtgagagctggaggaaaaggaagcgcccaggtccacactgacctgactcacctttgagtgaagtcttcagttggaataaatgctgtcgtcgctgctggtggcactgcctcctcggcactgctggagctcctaaaagaggagatacttggctgtgtcgagttcaatctcagcatctgaagtggctcagaattacagttctagaagggccttgtggaagccaactagtaaaccctctgccttaaggcaggacctgtcctcattcatgacagggaagactgctacatgtaaaagccctttttctcttcccaagagatgtatcccatgataagcattcttatgtcctgtccatcagctgtcatggctcttcttctcagtattaaacatacatcacttaaactacccttgaacttttttcttttcagatttcagcaaagacgaacaacaattagtcatgttctgatacatatctatgacagttattataccacaactcatttctggctaaatagctccaggcgctttcaccttacttcacaggtgttacttttggccttttttttttcctgagtttcctccaacatgcgctaaactcttcctagtaagtctccattcctgatagcaccaaccattaatatggtccaatattttaatctaatttatggatttattattcttaaaagcctgcctgctatactggtgaacaaacaaccaaaaatatccaatcaagtagttacaggaatgtgattcctagctgattggaaattgaaaatatatatagtcatgcatccctcaaccacggtgagaagttgaagagatgcatccttaggcgatgcagttgtaagaacatcatagggtgtacttgtacacaaccagatagtatagcttactacacagctatgctggatggaatagtcaattgctcctaggcttcaaacctgtacagcattttactatactgaatactacaggccagcggtccccaaccttttcggcaccagggaccagtttcttggaagataattttttccacagacagggggtggggaagatggttctgggatgattcaagtgcattacatttattgtgcactttaattctattattattacattgcaatacatagtgaaataattatacaactcaccgtaatatagaatcagtggaagacctgagcttgttttcctacaactagacggtcctatctgggggtgatgggagacagtgatagatcatcaggcagtagattcttataaggagtgcacaacctagatcccttgcatgtgcagttcacaatagggttcatgctcttacgggaatctaatgctaccactgatctgacaggaggcagagttcaggcagtaatgtgggagatggagagcccctgtaaatatagatgaagctttgcttgcttgcctgcagctcacctcctgctgtgtggcccagttcctaacaggccacagaccagcccatggcctgggggttgggaactctgctgtaggcaactgtaa

SEQ ID NO: 317750 - DNA, 4001 bp, Homo sapiens
gatattcagagatggagcaagctgaaaagaccaactttttatggataatatatcccagatgtatgattgcattgcctgccttagcttatttggttaaaaatataaaatcagtaaagccttttaaaatctatattttaaaattagatttctgaatccagtgccctatgagcatagggtgtggcatatcccaaagctactgtttatgtagtcaggcagccattagtaggcacttcagcagttttaagacactactctggggttttgtttttgtttttgttttaaaaaaaaggccaggcacaatggctcacacctgtaatcctgtaagcccagcacttttggaagccaaggctggtggatcacttgagcccagaagttccagaccagcttaggaaacatagtgagacccccccatctccacacacacaatttttttttaaattagccaggcatggtggtgtacacctgtggtcctagctactccggaggctgaggtagcaggattgcttaagcccaggagtttgaggctgcagtaagctatgatcatgccactgcactccagcctggcctacagagggagaccctgtctcaaaaaataaaacaacctttaaagacataaaattttcaaagcaaaagaacaaaatatagaaagtacctcaggtaagatcataaataatgctttaagaataaatagcccgatagaaaaatgtttcttctattgttctagaagaatttgaaatggttttcttacctctcatttgaactgcctaaaagttcagagctatacacctaaagccttacagaacaaaagtcacaaagatataaggagcttgcgaccagtgactaaaggccaattactaaaggaaacactggaaacttagataacactagggcgcgctaattgctcaattatactcacgtgaaataaattttttttaaagaaaatcattggacatgtgtttgggggaggaaggaggcgctctccttagaaatgcagctccagacatcaatcacaacaatatcccctcatgaggagaggaaactctcaggtgtgcacttcgcacttgctgggtctctgaagaatgctcactctcacttttcccaccttttctagccggcccgtaggtgacagtgttgacggcactgaacacaaacactaggatatgagcacaagagtccctgatacacgtaggatgaactagcgggcagttcagtaaagacaggctgatgtgggcggacaggagttacacagcaaaaggcaaaagaaggtagacgctagagaaggcactgtaaggaaaagcacttggaaccttaagaaggaaagccatcttcctaaggggagcagtagacatgacagtctggggatacaacgtgcgcccttcaagaaaggcgaggagtggctaaggaaaaaaggggctgttcaacgtaactgggaagagggagtgagagctctgcaggcagggtggggaaaatctcacggcgaggccccgggaaaattgaggggagcgactaggaacatcctggggttcagggatgagaacttgggatatcaccgaaggggcgggacagagaggaaatcaaagagcaaggcttggtcaaaaaggtcagaggagtggaggtgggagagggaagaatgaccctgaagattcaaggtgatgggcgggagactgaggggaaatcgaggctcttacccgcgccgctcccgggcctgtgaaagcccatgatccggttgatgcgctgttccgagttcatgagcagctttctccgacgcagctccgcccgacgctgggaagccgacagacctgagcccgctgggacccccggcctctccccgccgtcggtagcgacggccatcgactccatcctcccgtccacagtctgggaggggtggcagtggcggtgatgttggccgccgctgcgagggcgatgactagaggccgggccgcagggcgcgcgtccccttcccactatagacccgcccccgagcgcggtcccggagcctgtgagctaagcactcacgcaccgccccacgcgaccaagcgcgaggctctggccgccatcttgagtgagggcagcgctggacgccctcgtgcctccccaactcttctggccctcacccaacagccccctctgctgttcactcggaggtgaagaaaaccagcacccagggccgggagtggtggctcacgcctgtaatcctagcactttggaaggccgaggcgggcggatcacgaggtcacgatttcgagagtagcctggccaacatggtgaccccctcccccctccccccacccgtctctactaaaaatacaaaaacttagccgggcggggtggcgcgcgcctgtaatcccagctactcgggaggctgaggcaggagaatctcttggacccaggaggcggaggttgcagtgagccgagatcgcgccactgttctccagcctgggctacagagcgagactctgtctcgagaaaaaaaaaaagaaagaaaagaaaaccgggagtgggaaagggatggcagtaagtaggtcagcctagatttggtgccaggaagcaaaatggaggttgcagcggcagtcgcttgtttacagacccgcggcctcgcctgtaggcaatgggaatacgtaaccctgggagccgcacttaaagggagccttacgctgggatttgttcttggtgcctgttcctcatccttaacttctctacggcaaagtatacggctgatgtgttcctaggctttcctcgcgttttgtgcgtttttattcaaattagaatttcccattgaaacctttcgtgcacattctatctaaattgccaacactccccattccccttcaccttgttttttctccttgtcgttcatgaccacctcgcatgctaaagatgctccagcctgggcgacagaacgagactccgtctcaaaaaaaaaaaaggaaaagaaaagaaaaaaacaaaaaggccgggagcggtggctcacgtctgtaatcctaactttgggaggccgaggcaggcggatcacctgaggtcaggagttcgagaccagcctggccaatatggcaaaaccccgtctctactaaaaatacaaaaattagcctgacctggtggcatgcacctgtaatcccagctacttgggaggctgaggcaggagaatcgcttgaacctgggaggcagaaattgcagtgagccgagatcatgccactgcactccagcctgggcgacagagggagactccgtctcaaaaatacatatataaaagaaataaataaaataaaatcagaacaaatgactgggcgcggtggctcatgcctgtaattccagcactttgtgagggctgagatgggtggatcacttgaggccaggaattcgagaccagtctggccaacgtggcaaaaccctgactgtactaaaaatacaaaaattagtcgggcttggtggcgtgtgcctgtggtcccagctacttgggaggctaaggtgggaggatcacctgatcctggggaggttgaagctgcagtgagcaatgatcgggccactgcactccagactgggtgacacagtgagaccccatctcaaaaaagttttttcagaaaaaaataatatatttgctatattgtaatggatccagtctggattatagtcatcattaatagcaatacagtcataaaatataattttaagtatgttttcaggcaggaaggagccacaaaggcaaaagagcttagggcccttgaaagtcataatgcagccttggcattcagtaatgacttactaagtgaatgattagatgaatgaaggaattgaatccatcaacccttgctaacagggagcatggccagttcacacctgaggctgaggagggttttgaagcagcttactgggtgggccccctgcaactaagcctgccacacaatcaccctcaaaataaggaagtgggtgaaataccacttagaagataataaaatactatatttatattaatactgaaaaagaagtgaaaacaaaagaaactt

SEQ ID NO: 317751 - DNA, 4001 bp, Homo sapiens
gatcgcgccactgcactccagcctgagtgacagagcgagactccgtctaaaaaaaaaaaaaaaaggttaccacactgggcacacaattcaagtttcatgagcctgcaattcatgctcaccaactgccacttcatccccttaagctgtcttccagggcaaagagaactctaactaaaaggatgcaatagtgtgattgccaaaacggcagcaacgacttctgtcaaaacacttatcccttgtggccctgagaagataatgcgctaaatgaactggggagtaaggatagtaaggtgtcggggaatgctgacagccatttgcagataagtcagaaaatttctgttgtgcaacactgacccccacacacagttcactcgagcattctcatgatccagttacctggcttgtgtgtgcaccctggctgatgcacaggagaactcccacatagtcctttacctctgctctaagtataattataccaaatgtacaacagttgatccatatggcagttgcttctattcatgaccctcaaacaatgttgggaaaagactgagatacagaatgattttaaagatcaataaaattcttcccccttaaaaaaatctacttattaaaaaattaagcaaaatcttccatttcctaaatcagaggtaaaaagacttaactatggttaatcttgtcctctcaatcttttaatattaagctcagtttaacttccctcaaccagcaatcacttgtgtcatgcccagcggtaatacacaatgcccggtttcttctatcaccataactgtgacctcaggtcctgcgaaacaggactgaaccagttcactaggatggcagtgtattggtccaaaggcattcagattataataacgtaccgcaatgatcatcgagcagttactaaatgtcggacttccctgtcttattgtatacatatcttaatttaatcctcacaaatccatcgggtattattatatccattacttgacaagaacgggggcacaaagggtaagaaaactgccgaagttcacagagcaaccaatgaccaatcaaagactcgagccagggccttagcgttaaccactgcacggtctatccctgaactataatcccagcaccatcagtacactaatcgcatgaccttgggccagtcatttcatacctccaggcctccggtgtggaaagagatgcacttagatgagctttcgggggctttcctgcttttaacgccctgtccctctccaactggattactcgcctccagaataggtgctgtaactgctaagtttctcaaccactgcgtgttctccttctggtacattcccctttctcttcagggaactagggtccagtctccgctttggattttcaaatattaaactgtaacgctagttgtaaacattccctctcggtctaataccacccttccctactactaggggtacctagtaggcccgattccaccctatacttttacccagttactccagcccacctcgcggctgcccaggcagccggcaaagaggcctaagaaagccctagaagcaaagccataggaataagtcagctttcccagaggtcaaagaaggctgtcgggccacctgccacgcctcccgaccccggcggcgcggcctgggcccgcaacccaaccaaagacgcccggattcgggcctcctcgctcacggcgggcgcgtcggccagggcctgggccctcaagagccagcccgacccctcagtcgccggccacgcccgacccctcagccgcagaggcgctcccagccccccgaggtcctcacaggcccgaggacgcgctcaggtctcccctctcacctctagcctcccggggaccgcgggggtgcccgtgccccttcccgcccgcacaccttgccccgcgccgcagtaaagagagaggcggaggcggcccgaccgtcacgtgccgcagaaccaagaggcctcggccaccgctgccgcgcgagcgagccccaccgcacgaagcccggccctgtgcccgcccctggcccctgagtagccacagccggcgccaagtcccgccctcccgcgcaagccccgacatccggttggccggcgtgggcatcgctctacgcaccgtcccatacgccccctacggctattcttcgtggagtgtgaagattggccgggagtgaggcaggaagtggctgttggttgggcgggaggtgaggggcgggccacgctggatcgagaccgccgggcgcgcgcgtctcggggcggggctggtttaacaggcgttcccgcgtcggttgctgtggtgccttcggggcgttccaacccaacccccagtagccctcacccgtctggttcctggagccgagacttgggacgcatcgcgcgcccttcgctgacggggcaaacggcagccggcaaaaggggtaggagtccgacgatcggccatcaggaagggcccgttgcagcgaacgcgggcccctacgggcgtgagcagaacccagcgcgagcgcctggccggattggcgtgcactgctccgcgctgtgtgagccggcgccgcagttcctgcagagtcatggctcggcccaggagcctgcgcagcctcgtcgcccagcataacacacagtccagaataatataatccgaggttatttgaactttcaatttatgtttcctgaagtgagattaggtgtcagggcagagagatacagggatgacaggacgagagaaaggatggtgccatggaaagatttaagatacgccaccattttagtaacccactcttagtacatcttcagttttcagtatgctgagaacctcacaaaatggaagtggcccagggtttttctagacctttagagatcctgatctcttgttctctatttgtttggacacccaaaggcttgactactagggtggaaaacactagaatcagcgaatgtatcactgatctgaaaagccctcttgccaccgggaaggggaagaaaggcagggtttggtgtttgcatgagttagtatcatccaaccctcaacccccaaattttttttatttttatttttttgagacgaagtcttgctctgtcgctcaggctggagtctagtggtgcgatcttagctcactacaacctccgcctcccgggttcaagcgattctccctcagcctcccgagtagctgggattacaggcgcccgccaccacgcccggctaatttttgtattttagtagagacaggtttcaccatgttggccaggctgacctcaggtgatcgacctgcctctgcctcccacagtgctgggattacaggcgtgagccacggcgccccaacttcagccccaaaatttgtgtaggagaattttggtttcctgtctacctggggaagcagctattcaaagcagaataaaattctggatgctacatgatccaaataatgagcttaaaatgtagttacaggaagtacatttgtgagcaaaagagctactcctgcaaaggtaagtgccaaaagactgtggtactatggagaattcaatgggattctgaaggggagggactgcttccatccagaatggactggcaaagaggtcagaattggctgggcgaggtggctctccctgtgatctgagcactttgggaagctgatgcaggtggatcatttgaggccaggagttcaagactagcctgggcaacatagtgagacccctgtctctacaaacataaaaataaaaaaattagcctggcatggtgcacacccgtagacccagatactaggaagactgaggcaggagtatccttgactcctgattgaggaggctgcagtgagctaagatcaggccactgcatttcatccagcctgggcaacagagtgagaacccgtctctaaataaataaataataaaaacaaacagatgttttacatgggcatcgtttgtgcagtccaaagcaattacaatagtaacatcaacctggatcaccatgacagatataataatgaaaacatattatacgaattcccaaaatgtgacag

SEQ ID NO: 317752 - DNA, 4001 bp, Homo sapiens
tcaatggctataaatctaactccctgtctctcctcctccctcttggatctgtcctattttgtttcttccttgtcttcacctgcttcttaagtgctgtttctcaggcttcagttatctttctcttctcactattccactatcttatggcaatctcagtcatatcccctgatacaatgatgactaacaaatctttattccaatgtaggcactctctggagccagatttctcacaaaacatgtgcacttggatgacctacagacactttcagtttaatgttccagagccaaattcattacctatcttccttactctttgcttcaggaaacagcaataccatttacctgggtcattaactgaccattatcctagactcttcctaaccctttacatccaaatagcagctaagtcctatagagtttcactaccttgacacatcccgcatttccattccctcatctccattgccatggatactgactcagcctaggacatggtcacttctcatttccaccattgcaaatgtctcctagttggtttcctgcccctagctttgccctctgtactttgtctttcaaaagactgagcaatctttagaaaatgaaaacatgaacttcatgatatagtttaagaccctttgatggtcccccattgcatacaggtaaaatgaaagttcttagcattgaattcatgcattggcctttcctatgtctccagccatttctagtaattctccatccgttcaaaatctatcctgcatctctactcactcacattccccaaacacaccatagcattctgtatctctgtgcctttgtacatgtagtcacacttgcaggtacaccttctttttcctgttggcccagagaagtcccacccatccttccatgatcatgtggtgaagtccaaatagcattcacattgcaagacaatgtaattcgttttcgaattacttgccctgctagacagactataaggtccttacgaggtagagctgtatcctttgcatttactatcaccatatcatcagggcttagcaggaggctattttattgctattagaatttatcattgtcattgctattgggtaatttttatcagaatataaatacaaatgtatgcctgaaattcaaatctcaatatttaaaactttcaataacaaaatagatttttgtggttgtaggatttgaggaaaaaataagtcaaaaaaaaaaaacaggtaagaatttcatctacttaatatggtttaaatactccccagactgaaggcaatagagatggctgcctgggtcattggtgttgtcctttaatgagaacgtaaaggaccccctcaagtctctgatgaatcaaatcaactatttgatataattttgaacaagccatgtatgtacactttaataagcatcctgatttttattctgattctcagttgtcagtgtatagcagaaatagcataagtttaagtatcagacaaagcaaggtctgaatgaaagttgaaatgttttattgctttgtgacttggaaatgctgaacctccctgaagctcagttttatcagtggtcatcaggatcgttagagcaattcacccaaacccttcacactcaaatacctagtacctaatgactgctcagtaatgtttacttccttcccctttactgaatgaaatttatttttgtgcatttttatctaagcattttttttgcaaagattacaaaaatctttcccagtaccaagctctttcctcttgcactgacagcctagtgatggcttctctagtccaagaactctcaaaagacttttagattttctttttagagagtaacatctactgtcttcttttctcagctaagacataccaagaaaaaaaaaaacattaaatcatagaatagataaaaacattgatttaccttaaatgctaaccttttgccaccagttgcttcgaactgaaactatggacgctgtctcctgcatctaggaaaactggtccctcccaagccaccttagcctcctccctcttacctgtcttcctcaggggccctggtccactctcttagtattaattggaggacctgggatcactgctgcagattcacagcctgattggctcagctcactgtcaatctctactctggttctgccttttctcaagtttacactcctgttgcctaggaaatctcagtgactgtgaaagctcaagccatttgcactgggagagaagccagccagaagttttgctggcaatggtttggtttctagaacagcatcaaaacttgtctcccatgttttgtaaggtagtattcagcacattgtcttctttcttttaggcagcaccttcctgtccttctgtagtccccagaaagcttactgctagggtgcctcattgccaggtgatacttaaaaccacaactcttgggagcaggcaggggtaattataggtgattcaaggttctccctccttctctgcatttgcagaggatgtcatttctgctgttttcatccttggtttcttctcttcttttctctttttgtttctttttacttatgtttttcacatgttccctagcagttactttgccagataagaagaaatctagtggcttatttggaggaaaatatctacactatgctctctttcattgtgtatctatgacatccaccctatccttgtcattcccactcctgcacgtcctgctttcaggagcaggcaggtataattagtggtgattcagaccttacacctctctctttctctctctctctctgacacacacacacacacacacacacacacacacacacacacacacacacatctctgtatataacataatcctggctgtgtgcaacatccttgcagtataagaactcacaaaacggaatagatgccaggcacccagctctgcagactactaggcaagttctttcatggatttgacaagggcttgggtcctttgctatatctgcagggagtatacatagtagctatttcatccttttatctgaattgtctgaagaattgtcccagaattaagcaattagaactgtggttcttccagggcaacctcagatgtctaatgttttcttttcagtggtttaacccacaagatatcacgcatttgaaacttttaagaagaaacttaatttcatctgtgaatgcagaagcaaatatgagggcatgggcatttaaatatgaagtatttcttgaaagccacctactggagagtaagtttggtgcaataatttaagaaaagataaaaaagaaacaggaaaattgggacaacggacagcatgatggagccaccgtgcaagccctcaatagtctgcctccaggttgtgtcaaataaagtaaaaagaacaaaatctctggagtacttaagcaatgcttttgcttgtttccactgctagcaactggtgtaattccaagggttttaccagttcaaaaaactggatctgggtttgtggtattgggtttctgacaatcaatataaaatattgattatattttaaggcataagtactctttccagtggtaaagaagacaatgatagtctatggtgtaatacggtaaaaagatttgtaaaatattactactggattcctaatcaaatattcataaatggcaaatctctaggtaatcatgatagcttaaaatattttagtcaaactaataaatgtaatgaggatgactgcttgtaactgtggtagacaaagtaaagaaaaatgatgaactcagggcttgaaattccaagttcaagctccacataaatgatctgaaaccttctatgtcttcctggaggaacgtacttatctcccattgtcatcagcctgaggtttcagaaaatcaaatctggagtctcatcctgagagtggcagaattacagtgcaaattgaattcccaaccaggcaaagtatcttctgctaaactgagggaattgattaggaaggaatgagattctgaaaatcggaatgaaacctgtagggtagatcctgatgaagctgagga

SEQ ID NO: 317753 - DNA, 4001 bp, Homo sapiens
tggcaatctcagtcatatcccctgatacaatgatgactaacaaatctttattccaatgtaggcactctctggagccagatttctcacaaaacatgtgcacttggatgacctacagacactttcagtttaatgttccagagccaaattcattacctatcttccttactctttgcttcaggaaacagcaataccatttacctgggtcattaactgaccattatcctagactcttcctaaccctttacatccaaatagcagctaagtcctatagagtttcactaccttgacacatcccgcatttccattccctcatctccattgccatggatactgactcagcctaggacatggtcacttctcatttccaccattgcaaatgtctcctagttggtttcctgcccctagctttgccctctgtactttgtctttcaaaagactgagcaatctttagaaaatgaaaacatgaacttcatgatatagtttaagaccctttgatggtcccccattgcatacaggtaaaatgaaagttcttagcattgaattcatgcattggcctttcctatgtctccagccatttctagtaattctccatccgttcaaaatctatcctgcatctctactcactcacattccccaaacacaccatagcattctgtatctctgtgcctttgtacatgtagtcacacttgcaggtacaccttctttttcctgttggcccagagaagtcccacccatccttccatgatcatgtggtgaagtccaaatagcattcacattgcaagacaatgtaattcgttttcgaattacttgccctgctagacagactataaggtccttacgaggtagagctgtatcctttgcatttactatcaccatatcatcagggcttagcaggaggctattttattgctattagaatttatcattgtcattgctattgggtaatttttatcagaatataaatacaaatgtatgcctgaaattcaaatctcaatatttaaaactttcaataacaaaatagatttttgtggttgtaggatttgaggaaaaaataagtcaaaaaaaaaaaacaggtaagaatttcatctacttaatatggtttaaatactccccagactgaaggcaatagagatggctgcctgggtcattggtgttgtcctttaatgagaacgtaaaggaccccctcaagtctctgatgaatcaaatcaactatttgatataattttgaacaagccatgtatgtacactttaataagcatcctgatttttattctgattctcagttgtcagtgtatagcagaaatagcataagtttaagtatcagacaaagcaaggtctgaatgaaagttgaaatgttttattgctttgtgacttggaaatgctgaacctccctgaagctcagttttatcagtggtcatcaggatcgttagagcaattcacccaaacccttcacactcaaatacctagtacctaatgactgctcagtaatgtttacttccttcccctttactgaatgaaatttatttttgtgcatttttatctaagcattttttttgcaaagattacaaaaatctttcccagtaccaagctctttcctcttgcactgacagcctagtgatggcttctctagtccaagaactctcaaaagacttttagattttctttttagagagtaacatctactgtcttcttttctcagctaagacataccaagaaaaaaaaaaacattaaatcatagaatagataaaaacattgatttaccttaaatgctaaccttttgccaccagttgcttcgaactgaaactatggacgctgtctcctgcatctaggaaaactggtccctcccaagccaccttagcctcctccctcttacctgtcttcctcaggggccctggtccactctcttagtattaattggaggacctgggatcactgctgcagattcacagcctgattggctcagctcactgtcaatctctactctggttctgccttttctcaagtttacactcctgttgcctaggaaatctcagtgactgtgaaagctcaagccatttgcactgggagagaagccagccagaagttttgctggcaatggtttggtttctagaacagcatcaaaacttgtctcccatgttttgtaaggtagtattcagcacattgtcttctttcttttaggcagcaccttcctgtccttctgtagtccccagaaagcttactgctagggtgcctcattgccaggtgatacttaaaaccacaactcttgggagcaggcaggggtaattataggtgattcaaggttctccctccttctctgcatttgcagaggatgtcatttctgctgttttcatccttggtttcttctcttcttttctctttttgtttctttttacttatgtttttcacatgttccctagcagttactttgccagataagaagaaatctagtggcttatttggaggaaaatatctacactatgctctctttcattgtgtatctatgacatccaccctatccttgtcattcccactcctgcacgtcctgctttcaggagcaggcaggtataattagtggtgattcagaccttacacctctctctttctctctctctctctgacacacacacacacacacacacacacacacacacacacacacacacacatctctgtatataacataatcctggctgtgtgcaacatccttgcagtataagaactcacaaaacggaatagatgccaggcacccagctctgcagactactaggcaagttctttcatggatttgacaagggcttgggtcctttgctatatctgcagggagtatacatagtagctatttcatccttttatctgaattgtctgaagaattgtcccagaattaagcaattagaactgtggttcttccagggcaacctcagatgtctaatgttttcttttcagtggtttaacccacaagatatcacgcatttgaaacttttaagaagaaacttaatttcatctgtgaatgcagaagcaaatatgagggcatgggcatttaaatatgaagtatttcttgaaagccacctactggagagtaagtttggtgcaataatttaagaaaagataaaaaagaaacaggaaaattgggacaacggacagcatgatggagccaccgtgcaagccctcaatagtctgcctccaggttgtgtcaaataaagtaaaaagaacaaaatctctggagtacttaagcaatgcttttgcttgtttccactgctagcaactggtgtaattccaagggttttaccagttcaaaaaactggatctgggtttgtggtattgggtttctgacaatcaatataaaatattgattatattttaaggcataagtactctttccagtggtaaagaagacaatgatagtctatggtgtaatacggtaaaaagatttgtaaaatattactactggattcctaatcaaatattcataaatggcaaatctctaggtaatcatgatagcttaaaatattttagtcaaactaataaatgtaatgaggatgactgcttgtaactgtggtagacaaagtaaagaaaaatgatgaactcagggcttgaaattccaagttcaagctccacataaatgatctgaaaccttctatgtcttcctggaggaacgtacttatctcccattgtcatcagcctgaggtttcagaaaatcaaatctggagtctcatcctgagagtggcagaattacagtgcaaattgaattcccaaccaggcaaagtatcttctgctaaactgagggaattgattaggaaggaatgagattctgaaaatcggaatgaaacctgtagggtagatcctgatgaagctgaggacacttaacctctaaattctcctgcatcttctttgccagtaggagcaaccctgctattcatgtctgagaaggttcatcctgatttttcaaaggaaagtgtactagcacctctgaggtattttaactggaagacactgctgattat

SEQ ID NO: 317754 - DNA, 4001 bp, Homo sapiens
aactcagaggtttccaaatccaagtgttccttctcactgaagaacactgtgatctcaggggcttcaggctgttttattccaggagaaaaagcatcttctgaattactgcttgcccccatagattgaggaggtactgtattctcatgttttaaaacttctgcaaagaaaagaattgtttttcccaattaagaaaaagaagctgtataacagctagagttcctgaggcctcaaagcttcatccctctccttttatttatttatttattttttgagacagagtttcactcttgttgccgaggctggagtgcaatggcacgatctgggctcactgcaacctcaacctcccgggttcaggtgattcccctgcctcagtctcccaagtagctgggattacaggcatgcgccatgatgcccagctaatttttgtatttttagtagagacagtgtttcactatgttggtcaggctggtctcaaactcctgacctcaggtgatccatctgccccggcctcccaaagtgctgggattacaggtgtgagccacagcgcccagccacctcttatttcactggaggacaggaatacctaacacctcctatataacttgcatgtcaacatgtcaactttcagaactttcttttttccactaaaaaaaaaaatcagatcacaccactgtcttgcttaaagtttgagtccttcctagcaaccttacagggtaagtgaataaaacgaaaaatttgaatcatatgaacagtgtttacttgtggacttactgtgactcacaacagactcacgtctcttggggtcattgctaatgaaatctgatcacaaataatttctaatcagtaagcaaatggctctatttggaatagtgtgctttagaaataataaaagaaaaatttctaagcatataaatcttgtcctaaattaggtatcactaacattcacctttttatctgagcctctacctctctaacatcccttaaaataattttgaatttttttttagattcctagaaaaagagctagacctagtcctagtagtaatttacagaattgctaaataactggaagaattgctttttcatggactactagttatctttgaaccatttaagaattagcactggaattgctccagaaaacagctgctgctggcattcttatcaccaaaaaaatgaaactactgatttgccatctatgtgttaaaaattattttccttgtattttcaaaacggctatactaagtgaaagatacagcttgtggtcttggcactgtaaatatccacgaattcatctacttgaaaaacaaaccctggattgtgttattattaaagtattttccttccaactgtgagattttagcatgttactgccagaataatgagcagtttgttagcactaaaacaacttcaagttttgagtacagtctgaaaaacaaattatcgattcagtagaccaataagatgttaaatttcagaaactttttaaattccagtttttccctatttcatatttcaatgaaaattatctccagaaaaagactaacaaaaataaaaggcaacaattttctttcattttgttttctttttcagaaagtctgcccccttcctctcaccccaaaaagtatacaaagtcaacttaccatgccttaagccgcaaatggcagctgactgtggaaaagtactaaataaacacttgagaaaatgctgacaggtcgcctctccctttttctgtaccaaaattaacagcttccgacttttcttcaggagatctgtaacattctccagagtctcatactcttcctcagaaatcagcctccgagaagttaacgtgtctaagatagaatcaggatcatgttgaaggatttcaagcaacttttttctttctctttctatgatctctgagggagtactctcggtagccattgttcctgtttcctctaaaccaggaaatatattatgaaatcatcctaatgaataagtaaaagttaaaaaaagaatgacaaagaacaattctatttggctaagctttaacatgtcaatgatgcctagtgttggagagtgcagatacaagcacagtggggcaacccagctcggagcactctctgatccggggtccttgtggattatttatctgctcttttgaagtcttgataaattctcaccatgactcagacccagggtcacctcctccaagaagtcgctcttgaacttcaggttggactaggtattccctgctcagagaactatactatgatgccaagaatgtaaattattaattgatatttggtgggcaatatggcaatatacagcaataaataaataaagttgaagacagacaaaaataaaacttcatatccttcaacccagcaattccagttctaggaaattatcttaaggaaataattgagcaaatgcccgaagatgtatgtacaagaatctgcattacaacattgtttacaacagtacaaaattgaaaataaccaaagttggggtttagggaataaatattgacatgtcgacagtgaaacaccaaagaactgttaaaaaggataaagtacatctctacatattgacaagtaatgatatccatgatatattgctatggaaacagcaagttatagatctcatttttgttttaaaaaacttaatgtgtatatagtatatgtatataatatgtatatgcagatatgcattatattttaaagaagacaagagatatcccaaattttaacactggttatctctgagaatatgactacagggagatttatacttccactttaaacattactatttaatattttacatttttggttttttattattatttattttaagaaaattacctggttggtctttatttactccttcatagttcacaagaacctgaaagcgatctgcataactagcaacaggatactggatgaataaactgtgatatttcttataacataatattacatggcattcaaaaagaatgaacttcagtgacccacaatatagagaaatcataacaatagtaaggaaaaactgtaaatcccaaaagattatatacagtatgacaacctttttaaaagttgaaaataaacacacccttacatttaagagtatacatgaagtcattaaaattatacaaaacaaaaagcaaagaatgataaatatgaaattcagaatgatggttacctcgcatatggggagcttggggatgggatgggattggggaggagatcatggatgtcctacaatgtaggagttgggcctatcagggctactatattgttaaaggtaaatagctaatatgtaaataaaagcagaacatgcatgaaccaatgctattaggaaccaaggataatgagtaatacaattctggtatctccaaggttaaaaaagaattttaaaatcctggctgggcgaggtggctcatgcctgtaatcccagcactttgggagtctgaggaagatcacttgagaccaggagtttgaggccaacctgagcaacatagcaagaccctgtctctacaaaaaatttaaaaattatctggtcgtgatggtgcgcatctgtagtcccagctgcttgggacaggaggctgaggcaggagagctgcttcggcccagaagtttgaggttgtagtaagttactctagcctaggctcttaaaaaaaaaaatcctcatatgatattaaaaattaatattaggtaagagttttataaaattgaagagttttaaaatttttatttactttgaccaattataatcatatatagttatgggatattcagtaattttatatgtatgcagtatggaatgattcactcaaattaacatatacatcaccttcaatacttataatttattcctcctgtctgtgactttgtatcctttgaccagcacccttcccttccccgcaactcccagcctctctctggtaaccaccattatactctaggtaagagttttaaaatatgtatctcaaaagtatggctttcaagtgatgcatc

SEQ ID NO: 317755 - DNA, 4001 bp, Homo sapiens
gtgccattttcccaataggctgctatttttaaaatatttttctttgaaaacaacagcatgattaatctcaccatttccacttaaattacttatatgaaaacagcagtgcactatgggcaattattaaaaacactttattatgtataatttgtacatgcttcaatttgtgtcacttagggtgatttattttccaggttgtaatgacatctaccgagattagctagatctaattttcattctgccatgccacatacaaaaatacaattttcaaacaaagcttcccttctttacacaaaggtacacaagagtttgtcagacaaataaaataagaatacttcacacacgtatcaacaccatacaaggcattattcttcacacagtaacatctaatgtgttcttttatttttgaaacagcaggaaaagagccctttcccttcagaggaaaataaaaactttatctgttgcttaagccaaactccagggaggaaggtgtggtcctctggggaaagtagagggatggggatgtatggaggagaatggacgccccttcataagcacttcaggaggaaggaattgcaggaggttcctcggggacagtcacacagcttcccgatccttgcccctttcctcactgcacactgctcaccggcgtcacactgaaacaacaaaatgtgtggtcatcgagtatgaacaaacccaggttcccaacaggcaagtctcacagtcaacgcaatttctgtctcttgaaaggggcaattggaccccatcaccatcacaagaggtctacgtacagtcagatctgaaacagggagccttgtgcttataacctcagtgagagtacattttttaaagaaacttacattattagttttatcctagtttcttccacctttaagtggcgagggttggggggcgtgggaaggggagcatcacatttcctggctccttttcttgccctctcagaggggaaaaaaatcagacctttttcctgagcaacaaacaatagacttacactttcttacaacccctgttcctgctttcccatttcctcacccgggaaggaagaaggagcccacagaatcctgcaagcccattacctaagttatttagccacatcctacggagaagactgtgtgtacgattcaaggcggtgtactttctcttggaaaaacacgggaagggagtgaccacaaaccttaccatggggacttggccatacttcttctcatagatgggaacacgtttactcttgagcttcttcaagacttcttgcagcgcttcgatctgcaacacaccgcttcggagcctgaagttgccgccttggctgcgagcccagcccaggtgcgcacttccagccctagttataaggagccccggacccacacgcactctgcggtgggactccgcggacacagggaatggtcgaggggtggaaacttagcggacgctgtcccaggtactgaccgcgggtctctgagccgctggggtccctgttgctcagaggggccgggatgagggattcgctcaacagactgccaggagcccgtgagctcgagacgctcttcggatggcagtgggtgcctgggcgttgcgctcagctccccgcgccctgactctgggaataggagtgggggtggggggaggagggaggcgtgcaagagaagagacaaggcgacagctcaagggggtcgagagcgaggggaataccgaccagctccttctcgtgggaggcatcatccacggcagagtagatgtccagggctcggggctggagctcggcgtcctcctgggcacgggtacccaacagaggtagcatcagcagcagggcggcgcccaggaggggcagcagcctcacgcgggagctctccatcgttctgaaactcgtcgttgctggggcaccacgcgctcccaccttttatagtgagcccgagcccccgtgcaggaaagagggaggaggcgaagaaggaagggggtgtggaggagggcccgggtcaaccgtctgtaggcagcgctccgccggcgcttgacgtcaatgcccgccgggttccaggcgcctgggaacgaggctctgcgcacagatgggctagagcgcagagaacaggaccctgcgcccccaaaggctgtcagtctcacggcaagggatgctccccgaggggcctgagctgaagccgaggggctagaggtgagggacgggaagcgggaggggcctaggaaatggaaaatgccttcgggtcaatgcacaggcaggagagtcgtttcccaacacctagcagtggtgacagctgcaacatccacctcgccagccctgccttgcctcgcaccccaaccccaagtgtggcggtgagaagggggtgttgcctccagacagccacatttgctgagcaccttactctgtggggtaggggaagcaaacatactatacaaaagaaagagaaatagtggccctccacgtgatgggttctatgatggaatctgtgtgacaatagttaaaagaagagagggaaaacagacaaacccggattcagcagtggtgttggaagtgcagagagccaggctctggttcccatcctggctacaccacgtaaaagttgtatgactttgaacaaaatgaagaacctctccaagcctcagctttctcttttgtagatctaggattaaaaagatatacctcacaaagtcatcagtaggatgaaatgagagattaagtatgtcaaactcctggttcttagctaagcttccctgtccctcctttttgaactttgaggctgcccaggcaaatttaaccatccccagaacctccccccacccaccaccaacccttggtatccaagaagcctgtctagaaagagagtaaaagagtgaaaagaaagacagctccatgattatgaaaatatctccagagatcagaagtcaatggtgaaccagctccccaacaacttgggagaacaatgtggcttttttaaaagttgagatccttacagcctgaatgcacaggaaaattcctgtaggaaaagcaatgctttcccgcttagacctgcttgctcacctggcttccttcaccacaccatctttccctcaactgttcctaaattcatccactcttctccatccccattactacaacccagtcctagacagctgccccagtcaacttaatgtctaccacttaatccccaccctatcttctcttgccttcctctactccatagttcaccaccaaccagagtatttttccccttaaaatacactaatgactcctaatcttactaagcactgaatctagattcctcatcctgacttgcaaagcattatatgatcttcacccctctccacctcatgttctaccactctgccccagactcctccactccaacctcacatggccttctttctggtcctctagcaggccaatctcattcatactttgatgtctttgcacttacccctccttgaaaggtcttcctgtatttccaaaaggctcactacttctgttatttaaatctcagtgtaaatatctatgactactcaatccaaaccatctatcaatacttttctcccacaaatttattgcatagcagattatgtgggtcattaagatagtttaatacacaatatatgcctggttacttcaactatcaagtatttaattggtactcaaatactcactgggaagcaattcaagaagtgatatctcttctaatgaatagcacacatattaacagcatcaaaatattttgctgtggggtaaacccaacttgaaaatgtatctaacacctccctcagctctgccttccacacataccttttgattctgcacaagaaaacttcagtggcagcacgttttactgttaaaaccttacagagacatattgacactcactgcaaaaaccatctccagtgatctttaaactattctaagcttcagaagaaaaataatctcaaataagattttagcctattcttcctgaaggatgtagatattgtcaatgcaatactttctc

SEQ ID NO: 317756 - DNA, 4001 bp, Homo sapiens
attgtctgataagtaacagtttctttcttgattcttatacagggtagctagctccaaagaatgtctgattccaacatctttgctttttccaataccacatgccaagagagaaaaagacatacctaattttttaattctcaccataaatcaatgagacataaacattttggctctcactgtcaacaaaactcctgtgtgtgatttttttttttttttttggaaagcaatctaatgttaaatcatgcttcctggttccaaaacactagaagtgccagcttgactggatattacacctaattggcaggacaaacattcaatgcaccaaacaaatggaatgttcttgtccctcatccaaagtaataaagtgcagagaagctcgcttttgtgcgcgctgtctctctctccctccctctctcactttctcgctttctttcctccacccctccaccgctctctccaagggtcttggtctcagatctcagttgcttctgccccttgatgtttgggattttctccttgcctcacattgcagctgcctctcctttgcgtcggcgaatgtacgtccaacaatcgccctctaaaagttttgaactttacttaggggttaaaaaagaactctagatcaaagctcttgcgagctgcgtcctagtgcattcaggaatccacctcctagacagaattcctccagcaacaattccagttccatcccacttgtgagcgccagcagagcatagtgcttgacatcggggcgagagaggtgcatgcgccgcgcacgctcgggcgcgctcatacataccacaagagggtgagtcccctgcctctccccgagcctaacctgaaggtctgcgaggaggtcgcacccggtccgcaccccttccccgccaaaccccggacaacgcttcatccgcacgcccagaagggcaaagcaaacacactcccttccaacacactcccttccgggtcctgcccaggcacaaccgctcctatttaccgtcttgtaccaccagctggcgaatgccatggcaacaaccggctggctccgatccgcacggcgggggagccggcgagggcgcggggtgttgcgttggaggcgccgggctcacactccgcttggccgggaccgggctggcactgagctccgcacatcccaaggcggctgccaggtgggcagaaccctgggggtggggcccggcgcaggccccgcccctcctcgcccgcccaatttggctcgaggctggttagggaagaggctctgcgtctccaggcagccacgccctgcggcccggccttagcgcggaagactacatcccgctgtccagtgaaaccaccccactcactcgggggtcctgagtgaacctcattccccgttcatcctcatcctcattcacccacgtcttaccagccaacttttcttgacgcgtccccccctccactctacccggccaacgccacgcccagcgcactggacccggccggggaaccgaagccacctgcagccacctgcctggcagcggccaagcccctagccctctccctgccccgcgggggcgccggggactgcagacccgccagcctggcaacgcccagggagggcggccacagctccgggacccggtaccccatcgcccagccccgcgacgccgacaggagcgccactcacctcatgggtgcggcgggcggcggctgctcgccggggccgcggggaggcggcgggcttctggccgggctgggacatggcgaggccgctgcggccgctgcctcccggaatgcgccgcggagagtggcggggaggcctggcggggagtcctgccagggagagagggagggagggagggagcggagggcccgggagcgggcgatgaaacagcttttccgaccccaccccaggtctgcgccggggttcccctagccccgatgggccctccccttcctgcccgcggagggacccgggctcctgccctgtaacttaacaccctccgccccggtcctcacccggtgacccgccccggccccagcactgctctggtcccggttggtcagaaagaaggggttggaggttgcagcgttcctccttcgatgcccagatctagcttgcagttgtgcaacgagagagcgggacccgggcgtggccagtctacgcttcgaccctcctcccaacaatccggagaagtagatactctttctacattctgctccgctttagctgcgagagtttaccaactcaaatctggcccaagcctggacagtctagataaggaagcggatcacaaaaacaaattggtctgtgtgtgtgtgcgtgcgtgcacgcgcctgtgtatgttttatatgattttactttgttttttggcagtttcgaattttaataaacttttatggggaggagaacataggttccaatgcaaaacggagaacagtcccaaatttaaacccttatagtctttctagagtctggcgagttttgtttctgaagctagattgctttcttcttgggctcatcttaaacagcgcttcctggtttggggctggaagtgaaatttaacaagccctacgtgcttatgtgagaaactgtcagcctgcagttgctgctggttcacaatcaggcctgacagaaaacctgtttgttaccctgcagtagcatcatcattctgggacttggggtcaccgctttctgcagcgttggggtttagacagttgaagagagagaaggcagagccttttttttttttttttttttttttctggagaggcagtttcgctctgtctggagtgcagtggcgcgatctctgctcgctgcaatctccgcctcccaggttcaagcgattctcctgcctcagtctcctaagtacttgggactacaggcgcgttgtcacacccagctttttttttttttttttttttttaatggtagagacggggtttcaccacgttggtcagactggtctcgaacaacacctgacctcaagtgatctgcccagtgctgcctcccaaagtgctaggattacaggcgtgagccactacagccggccagaaggcagattttaaggagagatttgtcatgctatatggagcctggcagaacagaattctggtttcctttgtacctcctcattttaggaattctgacttcttcttcaaaggataggctagcagcattcttaattttgagggaggggatgcggggagaagaggatttaaatgcatttcctcttaaagtgtcgtacttactgtctgtgtatctagtatttcaacaaacaggtagcactgcaggaatttatacataaaaatgaaacaacttagatattgggactatgtccactcaggaaaaacaaatgattgttggcatcggttacattcagaaaggagggaaactatgccataagtctgaaaacaagatcttcttatgattgtgaccacaccactacagtaatttaaacaaacacaaaagctgtaggggtgaggtgacaggcagctcctccttcctggcctccaccccaggaactagaatgattttcttactggggagcctacatatcccagaatcaaggttttagatccctggagtactttattcaaactctggaatggtttccagtgacttggtggcattagagtttgaggttattttccaacagagtatttaaaaattgagtttaaaccagttatatatttcttgagagtattctatgtaaaacattgtgaaaggactagtagaaggagagatatagagattaaaaagatacattgcctgtcctccagggactgacagtttagctgaagttatatggcatttgtaacacatgatggtgtagggatattgaaagacctaacagtgtgtgagtaagtacaaaggtgttttgggagtttggggttccacaggggttgtatcaacaataggagggaaaggaggaaggagacatgagcaggctggctagctggtgaggtgtgaacagaaggagaaggggtgggggcacctgacgagataaagaggaacccactcacct

SEQ ID NO: 317757 - DNA, 4001 bp, Homo sapiens
acctaattttttaattctcaccataaatcaatgagacataaacattttggctctcactgtcaacaaaactcctgtgtgtgatttttttttttttttttggaaagcaatctaatgttaaatcatgcttcctggttccaaaacactagaagtgccagcttgactggatattacacctaattggcaggacaaacattcaatgcaccaaacaaatggaatgttcttgtccctcatccaaagtaataaagtgcagagaagctcgcttttgtgcgcgctgtctctctctccctccctctctcactttctcgctttctttcctccacccctccaccgctctctccaagggtcttggtctcagatctcagttgcttctgccccttgatgtttgggattttctccttgcctcacattgcagctgcctctcctttgcgtcggcgaatgtacgtccaacaatcgccctctaaaagttttgaactttacttaggggttaaaaaagaactctagatcaaagctcttgcgagctgcgtcctagtgcattcaggaatccacctcctagacagaattcctccagcaacaattccagttccatcccacttgtgagcgccagcagagcatagtgcttgacatcggggcgagagaggtgcatgcgccgcgcacgctcgggcgcgctcatacataccacaagagggtgagtcccctgcctctccccgagcctaacctgaaggtctgcgaggaggtcgcacccggtccgcaccccttccccgccaaaccccggacaacgcttcatccgcacgcccagaagggcaaagcaaacacactcccttccaacacactcccttccgggtcctgcccaggcacaaccgctcctatttaccgtcttgtaccaccagctggcgaatgccatggcaacaaccggctggctccgatccgcacggcgggggagccggcgagggcgcggggtgttgcgttggaggcgccgggctcacactccgcttggccgggaccgggctggcactgagctccgcacatcccaaggcggctgccaggtgggcagaaccctgggggtggggcccggcgcaggccccgcccctcctcgcccgcccaatttggctcgaggctggttagggaagaggctctgcgtctccaggcagccacgccctgcggcccggccttagcgcggaagactacatcccgctgtccagtgaaaccaccccactcactcgggggtcctgagtgaacctcattccccgttcatcctcatcctcattcacccacgtcttaccagccaacttttcttgacgcgtccccccctccactctacccggccaacgccacgcccagcgcactggacccggccggggaaccgaagccacctgcagccacctgcctggcagcggccaagcccctagccctctccctgccccgcgggggcgccggggactgcagacccgccagcctggcaacgcccagggagggcggccacagctccgggacccggtaccccatcgcccagccccgcgacgccgacaggagcgccactcacctcatgggtgcggcgggcggcggctgctcgccggggccgcggggaggcggcgggcttctggccgggctgggacatggcgaggccgctgcggccgctgcctcccggaatgcgccgcggagagtggcggggaggcctggcggggagtcctgccagggagagagggagggagggagggagcggagggcccgggagcgggcgatgaaacagcttttccgaccccaccccaggtctgcgccggggttcccctagccccgatgggccctccccttcctgcccgcggagggacccgggctcctgccctgtaacttaacaccctccgccccggtcctcacccggtgacccgccccggccccagcactgctctggtcccggttggtcagaaagaaggggttggaggttgcagcgttcctccttcgatgcccagatctagcttgcagttgtgcaacgagagagcgggacccgggcgtggccagtctacgcttcgaccctcctcccaacaatccggagaagtagatactctttctacattctgctccgctttagctgcgagagtttaccaactcaaatctggcccaagcctggacagtctagataaggaagcggatcacaaaaacaaattggtctgtgtgtgtgtgcgtgcgtgcacgcgcctgtgtatgttttatatgattttactttgttttttggcagtttcgaattttaataaacttttatggggaggagaacataggttccaatgcaaaacggagaacagtcccaaatttaaacccttatagtctttctagagtctggcgagttttgtttctgaagctagattgctttcttcttgggctcatcttaaacagcgcttcctggtttggggctggaagtgaaatttaacaagccctacgtgcttatgtgagaaactgtcagcctgcagttgctgctggttcacaatcaggcctgacagaaaacctgtttgttaccctgcagtagcatcatcattctgggacttggggtcaccgctttctgcagcgttggggtttagacagttgaagagagagaaggcagagccttttttttttttttttttttttttctggagaggcagtttcgctctgtctggagtgcagtggcgcgatctctgctcgctgcaatctccgcctcccaggttcaagcgattctcctgcctcagtctcctaagtacttgggactacaggcgcgttgtcacacccagctttttttttttttttttttttttaatggtagagacggggtttcaccacgttggtcagactggtctcgaacaacacctgacctcaagtgatctgcccagtgctgcctcccaaagtgctaggattacaggcgtgagccactacagccggccagaaggcagattttaaggagagatttgtcatgctatatggagcctggcagaacagaattctggtttcctttgtacctcctcattttaggaattctgacttcttcttcaaaggataggctagcagcattcttaattttgagggaggggatgcggggagaagaggatttaaatgcatttcctcttaaagtgtcgtacttactgtctgtgtatctagtatttcaacaaacaggtagcactgcaggaatttatacataaaaatgaaacaacttagatattgggactatgtccactcaggaaaaacaaatgattgttggcatcggttacattcagaaaggagggaaactatgccataagtctgaaaacaagatcttcttatgattgtgaccacaccactacagtaatttaaacaaacacaaaagctgtaggggtgaggtgacaggcagctcctccttcctggcctccaccccaggaactagaatgattttcttactggggagcctacatatcccagaatcaaggttttagatccctggagtactttattcaaactctggaatggtttccagtgacttggtggcattagagtttgaggttattttccaacagagtatttaaaaattgagtttaaaccagttatatatttcttgagagtattctatgtaaaacattgtgaaaggactagtagaaggagagatatagagattaaaaagatacattgcctgtcctccagggactgacagtttagctgaagttatatggcatttgtaacacatgatggtgtagggatattgaaagacctaacagtgtgtgagtaagtacaaaggtgttttgggagtttggggttccacaggggttgtatcaacaataggagggaaaggaggaaggagacatgagcaggctggctagctggtgaggtgtgaacagaaggagaaggggtgggggcacctgacgagataaagaggaacccactcacctggctggagcggagggtctatgtaatggagtaagtaatcaatctattcaccagctcattgtttgtggagcagctacactaatacatgatatattaggtatcaaaatctataagaggtaata

SEQ ID NO: 317758 - DNA, 4001 bp, Homo sapiens
gtccatagagaaaaaattaaatgcaatgttcatgaagacctcctgtaattttctagtaagcagattgctaattctatgtatcagaaaaactatgcgatatgttcttatgaggttagacacaccaatgctaaaacagatatcccagattcgtatgatctccaaattgagggaattataaggtataatgaaagaggagatacaaagatatatatgaacatagaagaatatgggttatggagtttttatttgaataggactaattaagacagttcatattttgagaaaaagtaaatgtttccacctaagaagtagtgatcacttaaagttaactgtgattataaacaatgaatagaaacataaatactcagctgattttcagaagttattcaaatgaaaagaaaatgctttctttttctttctggtttcattctttcaaactgttactttacgtactagcttttatgttttcattgcagtacagatgttatacttagtcaattctgccagagaataatcaaggaaccaaaactccccactaattctatataatcaactactctctggcattcggactcttctttcaaagcatctgaactgaaccacagccaatatttatacttgaatgtgctgcttcataaacactgtttcacagtctacaaagcatgctgattcgtaatagacaccaggagtccttgctgcacacacacgggatccctagtcagcctcattgctataggtggcttattccttctccatcagtctacaggtgtggcctttccttgttcagcaagattttgctaaatttcactacttcattttaatcctatactgcctcctagaacccaagcagcacaccctccccagcatattcccaacaactcaatattccttttagatactgaaaaatcagtgcacaaaagtcgaatacattcatcagaaagaagcaatctatattaatataaactctagtgctgattaggaaatagactttccccttttgaacagtagatgccactccttgttgagcttccctgcaatgcagaggtttttcctctgaaaaacatgtgaaacagcaggaactttccagagctgctgattaagcatttctgtcattctgatgcataggtggtttcctagaaaactagagaggccccaaagtcccgatccttagggaagctgtctaaactctctgcctcattttctgaagctgtacaatgggaataaagaacttccccctgcctgtgtgtaagtggagaatgccgggtccctaaccatacagaagagaaagttaaatctctgtgaaaacactttgtattcttaaaagatagacacaaagtaaccctcagtgatgttattctacaaccgtctcaggttgtgtaaaggaaatggaaccgaaacaggttacaacacttgccacgccacacccagcatgtatcaggtacgcagaaaggtcagagtgagctcacgctctaaaacggaggtcatcacagggtggcggcacggctggggaggaggagatctatctccaaccctagagataaaggtgccaaaccaaactgacatagctgctgctttccttcttttgggccacttgtctcgggccacttgtctcgggccacttgtaccgggccacacaaatcccttgttttgtaaccctacgcgtccggtcaccagatacatttcccggcggaaggggcagtaacagtgttaccgacaaggaggaggagtcgccaagaaacacagttaaactcagaacgcacggtatcgccagggtcgcgatagtaggaaaagcgcacgtcccgagcctggggagtccgctgcagggaccaggccccggacacgcagggcaggtagccgggggcacaggccctagacccgggagcacgcgcggcctggagcaaagcggcggaagacagtactcactctgcgtggacaccggaccccgcagtcctcggcttggttttcaggaggtctgcattcctagctgggctcggctcccgcggtttccgcttggagctccagcccagctctctgagtgcgacggggcggggcggtcccgggaaggcgacgcaggatgctccccgcccccctgcccggcggccccgccccgggagcccgggatgcgtggggagggaggtcccgctccgtggactcgtcatgcgcctggcatctggagactggctcactcaataacgcagcctgtgatgcggaccacgtgctgtgtgggctgcgcaccgccggctgattacaggttaccgctccctcggctgtcaccctgtgactaccagaataaggcaacgacggtgggtgcacttcgcaaatatgctcccccgaagacctcttttgaaactataaagtggattagtaatgactacaaccagggatttgcaaatgcagttaaaactgtgtaatggatttctttaaagagtagtttaacagtaagaattctacccgattactttatattatagtatattacaaacttcaaaattagaatagatttgaagctattgaatacaatataaattcatgagtctatactgctgtaaataaatgaatgaataaatagaggggttaagccactctttcatatagaaggccaactaataaatattgaatgataagagttagagaaaataattataaaaaattttaaaataaatgaaaagccgtacaccaaccacattaaaggctctgaaccctgaacttggggtgtgagtgaaggaggtagtgttggtcactgtttgaggaacacagacctcaggacaggttggacagtgctgtgtcgagtcatgacaaatgatggccagtggcatgaaaaaggtgaactcatccatacagctttgtaccccaccaggcagccaaggcagttagggccctctgatgtacctttcaaggtactcctcacagctaccttattttttttgtcttttatttctgtcaaaaatctagtgaaataagagcccttccaactttaagattctaacatttccagagcagaagaccctgtccttataatttttttttttttttgaggtgggattctcgctatgtggcccaggctggagtgcagtcacgtgatctcagctcactgcaacctccacctcccaggttcaagcaatactcctgcctcagcttcccgagtagctgcgattacaggcatgcaccaccacacctagctaatttttgtatttttagtagagacagggtttcaccatgttggccaggctggtctcgaactcctgacctgaagtgatccacccacctcagcctcccaaagtgctgggattacaggcatgagccatgcacccggacttagaattcttcttgatatatagcttatatatccctttttgttgttgttgttgatcattagtattgtcattcctttttaaaaatagactaaaagctcatctaggtttcactgacattaatttctcctgtgacaaaaacagcacagggtgactaatttgggccacaccccatagggatgggccctgggccccacagcttccagagttaggcagctcaatgatgcctatctctgaatgtatttctgtgctcctgatgagtacagatgagtaatcacatggttataaaacaaattttctggccaggcatggtggctcatgcctgtaatcccaccactttgggaggccgaggcaagtggatcacctgagctcaggagttccagaccagcctgggcaacatggtgaaaccctgtctctactaaaaatacaaacattagctgtgtgcggtggtgcttgcctgtaatcccagctactcgggaggcttcaggcaggattatcgcttgaacctggaaggtggaggttgcagtgagctgagatcacaccactgcactcctgcctgggcaatagtgagaccctgtctcaaaaaaaaaaaaaaatttttttcgcaagattcttctgctgtaagtcaggtggaaaaaggctcctttccttagagtgaaggcaaacaatgtagttccactgctgtgctgt

SEQ ID NO: 317759 - DNA, 4001 bp, Homo sapiens
tgaagacctcctgtaattttctagtaagcagattgctaattctatgtatcagaaaaactatgcgatatgttcttatgaggttagacacaccaatgctaaaacagatatcccagattcgtatgatctccaaattgagggaattataaggtataatgaaagaggagatacaaagatatatatgaacatagaagaatatgggttatggagtttttatttgaataggactaattaagacagttcatattttgagaaaaagtaaatgtttccacctaagaagtagtgatcacttaaagttaactgtgattataaacaatgaatagaaacataaatactcagctgattttcagaagttattcaaatgaaaagaaaatgctttctttttctttctggtttcattctttcaaactgttactttacgtactagcttttatgttttcattgcagtacagatgttatacttagtcaattctgccagagaataatcaaggaaccaaaactccccactaattctatataatcaactactctctggcattcggactcttctttcaaagcatctgaactgaaccacagccaatatttatacttgaatgtgctgcttcataaacactgtttcacagtctacaaagcatgctgattcgtaatagacaccaggagtccttgctgcacacacacgggatccctagtcagcctcattgctataggtggcttattccttctccatcagtctacaggtgtggcctttccttgttcagcaagattttgctaaatttcactacttcattttaatcctatactgcctcctagaacccaagcagcacaccctccccagcatattcccaacaactcaatattccttttagatactgaaaaatcagtgcacaaaagtcgaatacattcatcagaaagaagcaatctatattaatataaactctagtgctgattaggaaatagactttccccttttgaacagtagatgccactccttgttgagcttccctgcaatgcagaggtttttcctctgaaaaacatgtgaaacagcaggaactttccagagctgctgattaagcatttctgtcattctgatgcataggtggtttcctagaaaactagagaggccccaaagtcccgatccttagggaagctgtctaaactctctgcctcattttctgaagctgtacaatgggaataaagaacttccccctgcctgtgtgtaagtggagaatgccgggtccctaaccatacagaagagaaagttaaatctctgtgaaaacactttgtattcttaaaagatagacacaaagtaaccctcagtgatgttattctacaaccgtctcaggttgtgtaaaggaaatggaaccgaaacaggttacaacacttgccacgccacacccagcatgtatcaggtacgcagaaaggtcagagtgagctcacgctctaaaacggaggtcatcacagggtggcggcacggctggggaggaggagatctatctccaaccctagagataaaggtgccaaaccaaactgacatagctgctgctttccttcttttgggccacttgtctcgggccacttgtctcgggccacttgtaccgggccacacaaatcccttgttttgtaaccctacgcgtccggtcaccagatacatttcccggcggaaggggcagtaacagtgttaccgacaaggaggaggagtcgccaagaaacacagttaaactcagaacgcacggtatcgccagggtcgcgatagtaggaaaagcgcacgtcccgagcctggggagtccgctgcagggaccaggccccggacacgcagggcaggtagccgggggcacaggccctagacccgggagcacgcgcggcctggagcaaagcggcggaagacagtactcactctgcgtggacaccggaccccgcagtcctcggcttggttttcaggaggtctgcattcctagctgggctcggctcccgcggtttccgcttggagctccagcccagctctctgagtgcgacggggcggggcggtcccgggaaggcgacgcaggatgctccccgcccccctgcccggcggccccgccccgggagcccgggatgcgtggggagggaggtcccgctccgtggactcgtcatgcgcctggcatctggagactggctcactcaataacgcagcctgtgatgcggaccacgtgctgtgtgggctgcgcaccgccggctgattacaggttaccgctccctcggctgtcaccctgtgactaccagaataaggcaacgacggtgggtgcacttcgcaaatatgctcccccgaagacctcttttgaaactataaagtggattagtaatgactacaaccagggatttgcaaatgcagttaaaactgtgtaatggatttctttaaagagtagtttaacagtaagaattctacccgattactttatattatagtatattacaaacttcaaaattagaatagatttgaagctattgaatacaatataaattcatgagtctatactgctgtaaataaatgaatgaataaatagaggggttaagccactctttcatatagaaggccaactaataaatattgaatgataagagttagagaaaataattataaaaaattttaaaataaatgaaaagccgtacaccaaccacattaaaggctctgaaccctgaacttggggtgtgagtgaaggaggtagtgttggtcactgtttgaggaacacagacctcaggacaggttggacagtgctgtgtcgagtcatgacaaatgatggccagtggcatgaaaaaggtgaactcatccatacagctttgtaccccaccaggcagccaaggcagttagggccctctgatgtacctttcaaggtactcctcacagctaccttattttttttgtcttttatttctgtcaaaaatctagtgaaataagagcccttccaactttaagattctaacatttccagagcagaagaccctgtccttataatttttttttttttttgaggtgggattctcgctatgtggcccaggctggagtgcagtcacgtgatctcagctcactgcaacctccacctcccaggttcaagcaatactcctgcctcagcttcccgagtagctgcgattacaggcatgcaccaccacacctagctaatttttgtatttttagtagagacagggtttcaccatgttggccaggctggtctcgaactcctgacctgaagtgatccacccacctcagcctcccaaagtgctgggattacaggcatgagccatgcacccggacttagaattcttcttgatatatagcttatatatccctttttgttgttgttgttgatcattagtattgtcattcctttttaaaaatagactaaaagctcatctaggtttcactgacattaatttctcctgtgacaaaaacagcacagggtgactaatttgggccacaccccatagggatgggccctgggccccacagcttccagagttaggcagctcaatgatgcctatctctgaatgtatttctgtgctcctgatgagtacagatgagtaatcacatggttataaaacaaattttctggccaggcatggtggctcatgcctgtaatcccaccactttgggaggccgaggcaagtggatcacctgagctcaggagttccagaccagcctgggcaacatggtgaaaccctgtctctactaaaaatacaaacattagctgtgtgcggtggtgcttgcctgtaatcccagctactcgggaggcttcaggcaggattatcgcttgaacctggaaggtggaggttgcagtgagctgagatcacaccactgcactcctgcctgggcaatagtgagaccctgtctcaaaaaaaaaaaaaaatttttttcgcaagattcttctgctgtaagtcaggtggaaaaaggctcctttccttagagtgaaggcaaacaatgtagttccactgctgtgctgtggccatcacaatccctgagggtgtccttcctg

SEQ ID NO: 317760 - DNA, 4001 bp, Homo sapiens
tttctagtaagcagattgctaattctatgtatcagaaaaactatgcgatatgttcttatgaggttagacacaccaatgctaaaacagatatcccagattcgtatgatctccaaattgagggaattataaggtataatgaaagaggagatacaaagatatatatgaacatagaagaatatgggttatggagtttttatttgaataggactaattaagacagttcatattttgagaaaaagtaaatgtttccacctaagaagtagtgatcacttaaagttaactgtgattataaacaatgaatagaaacataaatactcagctgattttcagaagttattcaaatgaaaagaaaatgctttctttttctttctggtttcattctttcaaactgttactttacgtactagcttttatgttttcattgcagtacagatgttatacttagtcaattctgccagagaataatcaaggaaccaaaactccccactaattctatataatcaactactctctggcattcggactcttctttcaaagcatctgaactgaaccacagccaatatttatacttgaatgtgctgcttcataaacactgtttcacagtctacaaagcatgctgattcgtaatagacaccaggagtccttgctgcacacacacgggatccctagtcagcctcattgctataggtggcttattccttctccatcagtctacaggtgtggcctttccttgttcagcaagattttgctaaatttcactacttcattttaatcctatactgcctcctagaacccaagcagcacaccctccccagcatattcccaacaactcaatattccttttagatactgaaaaatcagtgcacaaaagtcgaatacattcatcagaaagaagcaatctatattaatataaactctagtgctgattaggaaatagactttccccttttgaacagtagatgccactccttgttgagcttccctgcaatgcagaggtttttcctctgaaaaacatgtgaaacagcaggaactttccagagctgctgattaagcatttctgtcattctgatgcataggtggtttcctagaaaactagagaggccccaaagtcccgatccttagggaagctgtctaaactctctgcctcattttctgaagctgtacaatgggaataaagaacttccccctgcctgtgtgtaagtggagaatgccgggtccctaaccatacagaagagaaagttaaatctctgtgaaaacactttgtattcttaaaagatagacacaaagtaaccctcagtgatgttattctacaaccgtctcaggttgtgtaaaggaaatggaaccgaaacaggttacaacacttgccacgccacacccagcatgtatcaggtacgcagaaaggtcagagtgagctcacgctctaaaacggaggtcatcacagggtggcggcacggctggggaggaggagatctatctccaaccctagagataaaggtgccaaaccaaactgacatagctgctgctttccttcttttgggccacttgtctcgggccacttgtctcgggccacttgtaccgggccacacaaatcccttgttttgtaaccctacgcgtccggtcaccagatacatttcccggcggaaggggcagtaacagtgttaccgacaaggaggaggagtcgccaagaaacacagttaaactcagaacgcacggtatcgccagggtcgcgatagtaggaaaagcgcacgtcccgagcctggggagtccgctgcagggaccaggccccggacacgcagggcaggtagccgggggcacaggccctagacccgggagcacgcgcggcctggagcaaagcggcggaagacagtactcactctgcgtggacaccggaccccgcagtcctcggcttggttttcaggaggtctgcattcctagctgggctcggctcccgcggtttccgcttggagctccagcccagctctctgagtgcgacggggcggggcggtcccgggaaggcgacgcaggatgctccccgcccccctgcccggcggccccgccccgggagcccgggatgcgtggggagggaggtcccgctccgtggactcgtcatgcgcctggcatctggagactggctcactcaataacgcagcctgtgatgcggaccacgtgctgtgtgggctgcgcaccgccggctgattacaggttaccgctccctcggctgtcaccctgtgactaccagaataaggcaacgacggtgggtgcacttcgcaaatatgctcccccgaagacctcttttgaaactataaagtggattagtaatgactacaaccagggatttgcaaatgcagttaaaactgtgtaatggatttctttaaagagtagtttaacagtaagaattctacccgattactttatattatagtatattacaaacttcaaaattagaatagatttgaagctattgaatacaatataaattcatgagtctatactgctgtaaataaatgaatgaataaatagaggggttaagccactctttcatatagaaggccaactaataaatattgaatgataagagttagagaaaataattataaaaaattttaaaataaatgaaaagccgtacaccaaccacattaaaggctctgaaccctgaacttggggtgtgagtgaaggaggtagtgttggtcactgtttgaggaacacagacctcaggacaggttggacagtgctgtgtcgagtcatgacaaatgatggccagtggcatgaaaaaggtgaactcatccatacagctttgtaccccaccaggcagccaaggcagttagggccctctgatgtacctttcaaggtactcctcacagctaccttattttttttgtcttttatttctgtcaaaaatctagtgaaataagagcccttccaactttaagattctaacatttccagagcagaagaccctgtccttataatttttttttttttttgaggtgggattctcgctatgtggcccaggctggagtgcagtcacgtgatctcagctcactgcaacctccacctcccaggttcaagcaatactcctgcctcagcttcccgagtagctgcgattacaggcatgcaccaccacacctagctaatttttgtatttttagtagagacagggtttcaccatgttggccaggctggtctcgaactcctgacctgaagtgatccacccacctcagcctcccaaagtgctgggattacaggcatgagccatgcacccggacttagaattcttcttgatatatagcttatatatccctttttgttgttgttgttgatcattagtattgtcattcctttttaaaaatagactaaaagctcatctaggtttcactgacattaatttctcctgtgacaaaaacagcacagggtgactaatttgggccacaccccatagggatgggccctgggccccacagcttccagagttaggcagctcaatgatgcctatctctgaatgtatttctgtgctcctgatgagtacagatgagtaatcacatggttataaaacaaattttctggccaggcatggtggctcatgcctgtaatcccaccactttgggaggccgaggcaagtggatcacctgagctcaggagttccagaccagcctgggcaacatggtgaaaccctgtctctactaaaaatacaaacattagctgtgtgcggtggtgcttgcctgtaatcccagctactcgggaggcttcaggcaggattatcgcttgaacctggaaggtggaggttgcagtgagctgagatcacaccactgcactcctgcctgggcaatagtgagaccctgtctcaaaaaaaaaaaaaaatttttttcgcaagattcttctgctgtaagtcaggtggaaaaaggctcctttccttagagtgaaggcaaacaatgtagttccactgctgtgctgtggccatcacaatccctgagggtgtccttcctgccagtgtggttctcaaa

SEQ ID NO: 317761 - DNA, 4001 bp, Homo sapiens
agcacaatagagctagatccccataaaatgcatacctttttgtagggacaaggctctgctttctcccttgtgtgaatataaatttacatatacttttaaatagcaatgagatgttgaataaatgaccactgacatatatatgatgatcatggatactctgtcctcactcagttacttagctccctctccctggacctctgaaaaagaatggtcaccactccttctccagcaaaacaaagtgtcatcttcattgactcaacaaatctttattgagtggcaactacatatcaagcaatctagtaggcactgggaacacagtgacagcaagactaaatattgccagtctactaagcaaaactgataatcatcaaataatcacccatacacatgctcacatcagtaataaaaaactgaataccccaagagaaaatgggcacacaatctattcatgaaataaacaccaaagacaaacaaacttctccaaatatgttctacagcaataccaatcagggagatgcaaagtaaaaccattgtttttgtttataaaattagcaatgacttaaatgtgataagatctaatgctggcaacagtgtagtatgattgagcactctcaaaaactgccagaggcataaaaactgaccagctcttttgaaaagcctgagaaccattcattctctgacccaagataatataacctgaaatgaaataacttcaactaaacatgtctatctcagtattttttccagcactgagaagcttgaaaacaacttaaacatctaacaaaaaggactgtgtaagtaaattatggtatgtccatcttgtgaaatacaggcactaaaatatgtctatgcatttttcaggatttagaaaaatgtttatgatccatttttatatcttttgtttttgtgtgcagcaaaacacaaaaaccaaagatacaaaattctctgttcaaaattatctcacctgtgcaaaaatcagcagtagaaaaaatcagcaggaaatatgccaaaattttaacagtgtctgtctatggatggtgaggttataggtgattctttttcctgtttatttccatttatctgtgctttgcaatttttctcagagtacgtattactgtttcccattatatgttacaaatgaaatgaacacattctcataagttaaaaaaatatagaatatatatttttctttttccttttctttttttttttttctgagacagagtctcgttctgtcacccaggctggagtgcagtggtgcaatcttggctcactgcaaccttcgccccccaggttaaagggattctcctgcctcagcatcctgagtagctgggacaacaggtgcacaccatcactccgggctaatctgtgtatttttagtagagatggggtttcgccacgttggccaggctggtctcaaactcctgacctcaagtgatccgccccagcctctcaaagtgcagggattacaggtgtgagccaccgtgcccagccagaatgtatatacttttctaatatatcaagatatgtaattttcattatctgatttgagatggggtctattataaaaaaagagaaaagccttcagattatctaacagtcaaactggtcaaactggtcattcaagtctacagggcacataaaggtaatagcatgccagcctcaccaatcatagaaaccagattgtcaaggacatgcaacttattttggtaagcagacgagtatctgagggaagaggctgagagaacactgacaccctgccctcacacttctactagcacatttcttaacaggcaatggagatagataatatttacttaaatttcttgaatgttgggcaaaatcccaccgatgtagtgtcaactggtgaactagaaatgactctcgagtggcgctggtgacggtgttgagacattttccaaattttcaacttttattccttgcttttagcatccaacagaaaatctctgcttagggattttccttagcgtctggattctgagaggcagcagagaaggggccacgaagggaatccttgctttatgaggtcactcttgggcattctgttgcattaccagtgtgtaggcccctgaagtggggagctcccaagtgggtctatcatggattctctcttcccaaggagactgagtgcctccattcagcaaaaaggctatgggcacccagcaatcatgaggctctgggttaaagctggaagtcactagaaacagaccacacaaaggccctcccttcaagaagtgcccccagctgatagacacaggcccttaataatgtgttagaaaaagttaagggtcatatataagggggaaaagcaagttctctgggctctaagagaaagagagcacatccagggcacagcactggaaaacacctggaaggacaagaaaagattgtgatgggtttgacttagaacaaaagaaaacaagagaagcaaagaaggtaatagtgaggtagggatagtggctcacacttataatcccagcaacttgggaggctaaggtgggaggatcacttgaggccaggagtttgagatcagcctgagcaacatagtgagacccccatctctaaaaaaaaaataagaaataaaaatcagcgacgaggcatagcggctcatgcctgtaatcccagcactttgggaggccaaggcaggcaggtcgcttgaggtcaggagtttaagactagtctggccaacatggtgaaaccccatctcttactaaaaaaaaatacataaattagccgcgcatggtggcagttgcctgtaatctcagctactcaggaggctgaggatggagaatcacttgaacccaggaggtggagactgcagtgagccaagatcgtgccattgcactccagcctgggcgacaagagcgaaactccatctccaaaaaaaaaaaaaaaggaaataaaaattacccatgggaggctgaggcagcaagataacttgagcccaggagttcaggactagcctgagcaagatagtgagactgtctctacaaaaaataaaaataaaaaaaattaggtgggtgtggtggcatgcacctgtagtcccagctaccagagaggccaaggtaggaggatcactttagtccaggcgttggaggttacaatgagctgtgatcacaccactgcactccagtctgcatgatagaatgagaccccatctcttaaaaaaaaaaaaaaaaagaaaaaaagaaaggaggcaatataaaccctgagttggctaactgcaggcataggatgggatgtgcacatataaaccacctaaacagaatataaagagtgagcacatgtggcagagatgttttaagtacaaaagtaatagggatttttgctctgttcaactctcaggattaatatattctccccactcaccttctcctaactcctttggctttcagggcaaatcaggacagtgggatctgggtagccctgtgttgtattaaatgctcagtggctaaattggtcaatctcctggacaccaaagttcttgggctgtaagaaaaggaagtaactaccccaccatctctgctgtccctggtattctacaacaagtatatatgaccattcatggtaggaaaatactttgtgggcaaccaatatactgaactgggaaataacatcttacgtactcattttctccatttaaaatcatcaacagcaaagttttaagaatcactgtgattaatgtccccacaattcaaactttagccccatcttctccgtcttcattgtttccctcagggatcagctcctcctataactcctgctatgtcctttagttatatgcccctaacgtctcagggctcctgcccaacatccatccacaggggcctcctggggcagctgctctaagacagcccgcatcagctctccatctgtttctacctgccctgatatgtcactgtgctcaatcccctagggcacacagaaggccctcagtaagtgtgtgccgtatgaatatacaaaataatggcatcagggat

SEQ ID NO: 317762 - DNA, 4001 bp, Homo sapiens
ggcgcgtgttgtggtccagcaggtagaaggtggacagggagggcatgcggcgcagtggcggccgccgtggcgagaagggccgcgagatgtgatcggcccaaaactgctgcagcgtctgccacaggcggctggcatggctcgtagccgagcactcgaaggttgccagggcgtggaccttgtagggcacgcaggtgctcgaaggggagcctcgggagcgctggcgactcgtgctgcgctcttgtctcgggagcccggatgtccagaatgatgaaggcgagccagggggcgctgctgggagacaagagtccgggtgagcagcgtgcttggtacaggccgcctctcaaaccgcgaggccggcggacatgtcttagccctgcagctacggctgcggctgtgtctcaccagctgctggccaccgaggagcccgtcgttccacgctgcacaggcagcagtctcacctaaaccatcttccccaaagaccactgaggatcaggccctgggatacatatgcagatgaaggacgggaggagggccttgttctgagttgcagctggaagggtgaggggtagggaatggtagcaagacaagtaagtaggtacttaaaggaggagtaggactttgccaggtgggttgaggatggaaaatggagaacttctaggcagagggaagagccgagcagggctttctttttctttttttttgagactgagtctcgctgtcgttgcccgagctggagtgcaattgcgcgatcttggctcactgcaacctccacctcccgggttccagcagttctcctgcctcagcctcttgagtagctgagattacaggcgcctgccatcacccccacctgatttttgtatttttagtgaagacggggtttcaccatgttggccaggctggtctcgaactcctgacctcaggtgatccacccaactcggcctcccaaagtgcccggattacaggcatgagtcactgcgcctggccttttttttttttttttttttttttttgtatttttagtagaaatggggtttcaccttattggccaggctggtctcgaactccggacctcaggtgatctgcccgcctcagcgccaaagtgctgggattacaggtgtgagccactgtacccggcagggcaggactttcatatttcagatgtgaacacgagcttggataggattggtgctgggaagagcagaagaggaagctgggaaggtggaccagtgcactatgtgaaggtgccctacaggcaggctcggaagcttagacttccttttgtgggtaagagggaactgctgaaggattagaaagccggggttagatctggattctgaaagcaatctgggaggatatctagcatagccaacagcattattgccctcatcattcagtcatttgatagacttgaactagcatctgctctgtgccagactctggtcttgggaaggggacctgaaacagcctctgcctgccctcaaggtgctcctaatccagcttggaagacagatgcgtgtatagaccacagtccagtgtgttcactgacatcctggggtgtgtgccatgggctagacctatgcatagggctcaaagtatcagggattgtgcacactaaacatgacttttattccaaacaaactgtgccctcaggaagtccaaagtccagataacagacaagtcccattttgctcacttctctctgcaccccccacccctgcccagtaagtgctgattctattatgtgaaaaagggagctatgtgttgtttctaattcctcttctgcccatgggcagtgagaagagaaagaactagagcagggttccctctgttatgccttcgttaattcataatacacttatccctcacatataggtggacagaggctggatggtacataccatccccaagatctggttcagggagatggtctctggaagcccacatccaggcccacccttgagattgtatcttctcggaggatgtttccccgttagtcctcactgtatgttgtgcctcacctggaagatggggtggagttgctgagctgctgtcccagggctagtcccatctctgacccactcagctcttgtccacctgctatgactcacaatgcctccaggccaggccaccccaggacaagaaggggtgctgaccgctgagctgtcagatagactctgggctctcccctgcatgcattcagtgcatcattgagcacctactgtgttctaggaacagttctagggaagtgaagaacatattccctcactgagctgtcattcttggcaggggaatgaagggagtgatcataagcagagtccaagacaggaatttgttctaggggaactaacaagatagtctctcaggaagctaacagagcgtgtcatgggtcaggttccctagaagcagagcctaagctgagcattcttgttcaagtgaattattggggaaatgctctcaggagaagggggtgagggaagcaagacagggcgagaaaaaggctaaggctgagccagagtgtggtctcacgtggagactagcttccgcttgctctcatggggaactctgagcacaaatggcaccacagttaggcctccttaaagcaagggagcccgtcttttgtaccctccttctacatgtcagttattggccagggcagctgagagttaccagccagctcctacagcacctatgggatgggtgcaccaccagtgatagggatctcagtagggcgccagctgaggagggaggaagataataggatagatgatgaaaatgaaagggcagactagccaacatggcaagaccccatctctacaaaaacaaattagctgggcgtggtggcatgcgactgtagtcccagctactcaagaggctgaggtgggaggatcacctgagcccaagaggtgaaagctgcagtgagcagtgattgtgccactgcactccagcatgggcgatagagaccctgtgtttaaaaaaaaaaaaaaaaaaaagagggccaggcgcgatgtttcatgcctgtaaatcccagcactttgggaggggaaggtgggtggatcacctgaagtcagaagctcgagaactgcctgaccaacatggtgaaactccgtgtctactaaaaatagaaaaaattagccgggtgtggtggcgggtgcctgtaatctcagctactcaggagtctgaggcaggagaattgcttgaacctgggaggcagaggttgcaatgagcgaagattgtgccactgcactccaacctgggcaacaagagcgaaactccatctcaaaaaaaaaaaaaaggaatgattaaattaataagaatatccaggccgggcacggtggctcacgcctgtaatcccagcactttgggaggctgaggcaggcggatcatgaggtcaggagatcgagatcatcctggctaacatggtgaaaccctgtctctaataaaaatacaaaaaattggccgggtgcagtggctcacgcctgtaatcccagcaccttgggaggccgaggcaggcaaatcacctgaggttgggagtttgagaccagcgtgaccaacatggagaaacaccatctcttctcaaaatacaaaattagccgggcatggtggtgtatgcctgtaatcctagctacttgggaggctgaggcaggagaatcgcttgaacccaggaggcagaggttgcagttagccgagatcacaccactgtactccagcctgggtgacagagcgagactctgtctcaaaaaaaaaaaaaaaaaaaccctaattctgatacgtacagtgaagaaaacaaaccagggaaatacagaaagtgattttgggacagggtgaggagtaggaagtaatttagatgtggtgctcggtgaaggcccttgacattcttgctaaaacctgaacaataaggagaccccaatcccttgaagacctgggggtagaggagggaagtggctgggcatgtttgaaggacacgtgccacgtgtgcggacagtggaaggaaatgacgtcag

SEQ ID NO: 317763 - DNA, 4001 bp, Homo sapiens
tgtgtataggtatgtgcgtgtggtatgctgggggaagtacaaaaatggataacatgtaaactcctaaacattatcacaatatagcatgcagtaatgctgcattgttttgttttgtttttttaaaaaagcccaaacacacgtgaagaattctacctaactatgctgaggtagattctcaacaatgaggctctgctttccctactaaagtggtaagacagtatacaccatggttctcaatctcagcactactaacttttggaccagatgatttttgttatgggtggctgttctctggcctgtatccattagatgctagcagcccctcaacacccccctgctccccactctgacagccaaaaatgtctccaaacattgctagatatcctctaggggattgataaaatatctgaaagagctccacaggtgatctgatccaacccctgagaaggcaaacatcacaaaagtgtgcatcaataacaacattaggcaactcgcaagaaatgcagatcagaagacagaacattgctacaagaatttagagaaatgatggagaaagccagcaacatggtgtcacacatttttttgagcatagtacttaaaaatactttacgtattatgtatatttatatattttacattttttcctgagatacttgggacagagttagaataataaagagaattatagaggatgtgtgagaaaatttgccgtaggtggaatttcctgaaggtctacgagtaaagacactgtatttccttaaaggaggaaaaagatggaacctctcctcagctcatgacagccttccttcaggtttatattgatccacaaattatttagtaagtgcatactacgttccaggcactacacaacaggcatagttcttggtgctgggaatacaataaagaataaaatttccaatactttctgccctcatggagcttacattctcatgggggtgcgagggagggtgaggggtgtgaggagaaacataaacaatagaaataaagtatgtaatataatatatggtactaagtgctatggggaaaaataaaaccagaaacagggactgggtgtgccgcgtaaggcgattcattttagggagatcatggaaagtctcgctgagctgataacatctgaacaaagataccttgtcctcaccacctagaaagcggtcctaagccgatcactggaaacacctctgcctccgaccatcccatattgtctttctccttgtgttcccagcgccggtacagtaacagagctgccaccaattactgagcacagagtccccctccaatcaagcactgtgccaggggctccccagacataacgttagtccaaagctcgggaggtgcatgttactattcccaatttttagagaagaaagtgagtcgccgacagcatatgttcttatcacgcggctaggaagcggcagagccgggttcccacccaggtcttcctcgactccgaaaccacatggaggcggctctgcaaaagctgttaaacgcacaagccaacaaagagcaacgcccagcgcgtgccaggccccgagcaggggaggcgaacgccgcgcctcccgccggcgctgcagagggcacctgttcagccagggcctgcagcccctcgcctgccgccagagcagctctcggttctcccggatttacctgttgaggcgctggcgtcgctcccacgccggtcccggtggccgcgcccgcccctgccacagccccggctaccgcggtggccgcagccgctaccacaaccgtcgtcagtgcggccatgtttacccgccgagctactcgggccgcggcggccaccggtgcctggggattcgtggcaggcgcaccctggcctctgcagacagctccctgcgctgcgggcttggccgggatgcagggcggggccgagatgtagggcggggtcgggatgcagggcggggctgagatgcgggggtgcaggggtgcgggggtgcgggaggggcgggactggggtgcagggcggggccgaaatgcgaggcgggggccgggattcaggcggggaggggcggggcgagggaggggcaaggtgccgggcggagccgggatgcaggggaggggcgggtctggggttctggggcgggcgggtgtgggggcggggcggggcggggcgggggctgcgctctgccctgtcgcgggtttatataccctttgggcacttaaccgactgtgccagcccagtcccatacctgtcaagaaaattcattgtcttacatcgtccttaaattttattcgtgttatagtcaatatatacatatttttacctaatatacatccgctttctaggtttctacttagcgctgctgagactgagtctaaatgaaaaaacattatcaatggattctaacaataaatcatattttagatttttaaagaaaaaaacccagcttgctccacagaaccagatatcagaggcaggaatgccacagttacattcctaggacttggtcaatgagaagacagattccaaaaatacagtgctgggaagttggaaaaaagccacagatgacgcttccagtcaagacaacctgtggcaactgagctgatttctgtaggtactaccttttccccctttatagaaatcgattcattcagtcagtcaatatggagctcctagcatatgtcaggcactgttctaggccttgggaattcattgttgaattagacacataggtaaggttccttcacctttaacaagtaaacaaataggtatttattgagcaattcctttatgccagggctgttataagtgctttatatgcacttttgcatttaatcttcacaaataacttcatgaagtaggtactattatcatctccatttcagtgataaagttaaggatcacatggccacacaggtagagggtaggatacctatctagacagcctgactccagagaccatcctggtagaggtattaaacaggcagcgggataaacgcctctggagcccaggagagagagagctaaagatacgaatttgatcttcctatagaaaatatttgaaataagactgaatgagctcacccagggtgagtataaattgaagtctgagaactaagcctaggccactccgagaaggtgaccacggacaagaggagaaggggaccaatatggagagatctgtgagaagggaggaaaaccggaagtctgtggagggaagtttttgcagaagaggccggacgtggtggcttacgcctgtaatcccagcactttgggaggccgaggtgggcggatcacgaggtcaggagatggagaccatcctggccaacatggtgaaaccccatctctactaaaaatacaaaaattagctgggcgtggtggcgcctgtctgtagtcccagctactcgggaggctgaggcaggagaattgcttgaaccagggagtcggaggttgcagtgagccaagatcgtgtcattgcactccagcctggtgacagagtgagacttcgtctcaacaaaaaaaaaaaaaaaaaaaaaaaaaaaaaaaaaaaaaaaaaaaaaaagagaagaagaagaggggagaagaagaagaaggaagaagaatggaggagaagaagaaggcaaagaagaagaaggagaaggagaagagagaagaaggagaagggagaagggagaaggaggaggagaaggaggagcaggaggaggaggagaaggaggagcaggaggaggaggagaaggaggaggaggaggagaaggaggaggaggagaaggaggaggaggaagagaagaagaaggagaagaaataagaagaaaaagaaagaaggaggaggaggagaaaatggtcagctgtgtggttcactgcctagaggctgagtgaaggggtaacaaagaaatgatggttgcatttggcaacagggaggccgtgggtttatggggtaggtagaccaaagcctggctgactgcattgaggagataatggaggtgacgaggtagaaactgtttttcgctatgattttgatcgattt

SEQ ID NO: 317764 - DNA, 4001 bp, Homo sapiens
tggagatggggtctttatgttaaatgaggtcattaaggtggggacctaatttgatagaactagtgttcctataagaagagatgccagagatctctttctctcctcttgtaacagagaaaagactatgtgaggacacagtgagaaggtggctgcctacaggccaggaaaagaggcctcaccagaaaccaaccctaagggcaacttgatcttgaacttctagcttctagaactgtgagaaaataaacttttgttgttttagccaccaagtctgtagcattttgttatagaagccctagctgacaggaactttagatattttggtagacatctctagtatcatgagattgccaccaggaaaattctctcttctcaagaaaatactagttggtttcagtgttaaagtcagtaggaatattcgttcatttaatcatatgacaaatattcaagttcggtgttaggctgtagaatttgtgtgtataggtatgtgcgtgtggtatgctgggggaagtacaaaaatggataacatgtaaactcctaaacattatcacaatatagcatgcagtaatgctgcattgttttgttttgtttttttaaaaaagcccaaacacacgtgaagaattctacctaactatgctgaggtagattctcaacaatgaggctctgctttccctactaaagtggtaagacagtatacaccatggttctcaatctcagcactactaacttttggaccagatgatttttgttatgggtggctgttctctggcctgtatccattagatgctagcagcccctcaacacccccctgctccccactctgacagccaaaaatgtctccaaacattgctagatatcctctaggggattgataaaatatctgaaagagctccacaggtgatctgatccaacccctgagaaggcaaacatcacaaaagtgtgcatcaataacaacattaggcaactcgcaagaaatgcagatcagaagacagaacattgctacaagaatttagagaaatgatggagaaagccagcaacatggtgtcacacatttttttgagcatagtacttaaaaatactttacgtattatgtatatttatatattttacattttttcctgagatacttgggacagagttagaataataaagagaattatagaggatgtgtgagaaaatttgccgtaggtggaatttcctgaaggtctacgagtaaagacactgtatttccttaaaggaggaaaaagatggaacctctcctcagctcatgacagccttccttcaggtttatattgatccacaaattatttagtaagtgcatactacgttccaggcactacacaacaggcatagttcttggtgctgggaatacaataaagaataaaatttccaatactttctgccctcatggagcttacattctcatgggggtgcgagggagggtgaggggtgtgaggagaaacataaacaatagaaataaagtatgtaatataatatatggtactaagtgctatggggaaaaataaaaccagaaacagggactgggtgtgccgcgtaaggcgattcattttagggagatcatggaaagtctcgctgagctgataacatctgaacaaagataccttgtcctcaccacctagaaagcggtcctaagccgatcactggaaacacctctgcctccgaccatcccatattgtctttctccttgtgttcccagcgccggtacagtaacagagctgccaccaattactgagcacagagtccccctccaatcaagcactgtgccaggggctccccagacataacgttagtccaaagctcgggaggtgcatgttactattcccaatttttagagaagaaagtgagtcgccgacagcatatgttcttatcacgcggctaggaagcggcagagccgggttcccacccaggtcttcctcgactccgaaaccacatggaggcggctctgcaaaagctgttaaacgcacaagccaacaaagagcaacgcccagcgcgtgccaggccccgagcaggggaggcgaacgccgcgcctcccgccggcgctgcagagggcacctgttcagccagggcctgcagcccctcgcctgccgccagagcagctctcggttctcccggatttacctgttgaggcgctggcgtcgctcccacgccggtcccggtggccgcgcccgcccctgccacagccccggctaccgcggtggccgcagccgctaccacaaccgtcgtcagtgcggccatgtttacccgccgagctactcgggccgcggcggccaccggtgcctggggattcgtggcaggcgcaccctggcctctgcagacagctccctgcgctgcgggcttggccgggatgcagggcggggccgagatgtagggcggggtcgggatgcagggcggggctgagatgcgggggtgcaggggtgcgggggtgcgggaggggcgggactggggtgcagggcggggccgaaatgcgaggcgggggccgggattcaggcggggaggggcggggcgagggaggggcaaggtgccgggcggagccgggatgcaggggaggggcgggtctggggttctggggcgggcgggtgtgggggcggggcggggcggggcgggggctgcgctctgccctgtcgcgggtttatataccctttgggcacttaaccgactgtgccagcccagtcccatacctgtcaagaaaattcattgtcttacatcgtccttaaattttattcgtgttatagtcaatatatacatatttttacctaatatacatccgctttctaggtttctacttagcgctgctgagactgagtctaaatgaaaaaacattatcaatggattctaacaataaatcatattttagatttttaaagaaaaaaacccagcttgctccacagaaccagatatcagaggcaggaatgccacagttacattcctaggacttggtcaatgagaagacagattccaaaaatacagtgctgggaagttggaaaaaagccacagatgacgcttccagtcaagacaacctgtggcaactgagctgatttctgtaggtactaccttttccccctttatagaaatcgattcattcagtcagtcaatatggagctcctagcatatgtcaggcactgttctaggccttgggaattcattgttgaattagacacataggtaaggttccttcacctttaacaagtaaacaaataggtatttattgagcaattcctttatgccagggctgttataagtgctttatatgcacttttgcatttaatcttcacaaataacttcatgaagtaggtactattatcatctccatttcagtgataaagttaaggatcacatggccacacaggtagagggtaggatacctatctagacagcctgactccagagaccatcctggtagaggtattaaacaggcagcgggataaacgcctctggagcccaggagagagagagctaaagatacgaatttgatcttcctatagaaaatatttgaaataagactgaatgagctcacccagggtgagtataaattgaagtctgagaactaagcctaggccactccgagaaggtgaccacggacaagaggagaaggggaccaatatggagagatctgtgagaagggaggaaaaccggaagtctgtggagggaagtttttgcagaagaggccggacgtggtggcttacgcctgtaatcccagcactttgggaggccgaggtgggcggatcacgaggtcaggagatggagaccatcctggccaacatggtgaaaccccatctctactaaaaatacaaaaattagctgggcgtggtggcgcctgtctgtagtcccagctactcgggaggctgaggcaggagaattgcttgaaccagggagtcggaggttgcagtgagccaagatcgtgtcattgcactccagcctggtgacagagtgagacttcgtctcaacaaaaaaaaaaaaaaaaaaaaaaaaaaaaaaaaaaaaaa

SEQ ID NO: 317765 - DNA, 4001 bp, Homo sapiens
cacattaatttcactgccctggtggaacgtctctttaattccccaaggctagcctgataatttcctaattggtctacttcaagccaacctacatactgctgccaagtcaataatatccaagtgcaaaccgaatgatgtctctctcttgctgtaaaacattccatggctcccatggcatgtataattgtagtcaatgtcaccctgttttcctttttaaaaaaaatgtaggctgggcacagtggctcacacatgtaatccgagcactttgggaggctgaggcgggcagatcacctgaggtcaggagtttgtgaccagcctggccaacatggtgaaaccccgtctctactaaaaatacaaaaattagccaggtatggtggcgggcgcctttaatcccaactacttgggaggctaagcaggagaatcgcttgaacttgggaggtggaggttccagtgagctgagacagcactattgtctgtcacccacgctggagtgcaatggtgcgatctcggctcactgcaacctagacctcctgggttcaagcgattctcctgcctcagcctccccagtagcggagattacaggcgcccaccaccatgcccggctaatatttgtatttttgtagagacggggtttcaccatgttggccaggctggtctagacctccagacctcaggagatctgctcaccggtctcccaaagtgctggaattacaggcgtgagccactgcgcccagccgaaactccgtttcaaaaaaataaaaataaaaataatgtatccaactgaagtgtcaccctgttttctacaacaaagctacagttttcacctccagtttcatctggcagtactccctggatgtactctgcgcttccacgtaagaggaactgcacttgctcccagggctcctccctcagctcagcttggtcacctgcaagcctctattggtgccattcttcaccccaggaatgctgtttcttctcagagccccctcagttcaggacagcactccctccagtagccttcctgactcccttggaccagatgtgatttcttccacatctgagtcttcccagttctgggaggttttactgaatctttttaatagtgcttacttcctacctgacctagactgactgtatattcccttatgcagagactttgtgtgtctcgtttgcttatgcacaacatgtgttccaaagatatttgacagaatcgaaagagaaaaccgattcctgcccggaaacctttggacagaagaatctacattcagtagcctgacaactctgccttagcaaacaagttggtcaaacatgcctaactccatgacaaagaggaactaacttgagccctccctggtgaacaatggcctgctgcactttgctttaggattttgtttcttaacttttcattttagaataattttagatgtacagtaaattgcaaagatagtactaagaattcctgtgtaccttttacccaaattcctctaatgtcaacatttgtgtacaatttgtcgaaattaagaaattaacatgggtacgtgctattaactaaaccacagcctttattattttttccactaatgtctttttctgtttcaggatccaaaccaggatactggcgctatagttttataaggctcaaaattaacagaagagaaaaaaagtaaagcaggtggagaggcagagagagaaatagggtctctgaaatctatttcttatttttttcttatcagacgaggccattaaactggcattcagggaaaaggatttgggcagtttgtccacaacctgcagagtttccacgaatctgcgcatcccgcccctgccctgggtcctccccactcccggttcccacctgccaggtctgaccccgggtaccctctcaaggtccgtggcggggaccggagcccggactccagctcagcgaacagcaccctcctaccgccccggcgccccactcagctcgctcacctggcaagtagcctcctctccgtgcgcgtgcgccgctgccgccgcgcgtcctccgggccaccacgtgaccgcgtgggcgcagtcccagacaggaaacgccggtgaggtcgccctgggccatggaggcagctcgcgctactttttcgcgacctcactgtgttcctgtgtgcaacctgatgttagctctgtccaccttcagctccaaagccaaccacgggtaaccaatatgcaaacaatgacatgagatttagaaaaacaacaagacggggcctgtgtcaatacaggtaaaatttggtggttcaaacattgaggttcagaccggcgcggggtttcacacctgtaatcccagcttttgggaggccaaggcgggaggatcgcttgaggccaggaattcgagaccagcatggccaacatagtgagaccccgctctacaaaaaatttaaaaagtagggctgggcgcggtggctcacgcctgtaatcccagcactttaggtggccgaggcgggtggatcacgaggtcaggagattgagaccatcctggctaacacagtgaaaacccttctctactaaaaatacaagaaattagccgggcgtggtggcgggtgcctgtagtcccagctgcgcaggaggctgaggcagaatggcgtgaacccgggaggcggagcttgcagtgagccaagatcgtgccactgcactccagcctgggcaacagaacgagtctccgtctcaaaaaaaaaaaataattaaaaagtagcgggtgtggtggtgcgtacctgtagtcccagctactcaggaggccgggaggccgtcaggtgggaggatcccgtgagcctgggagatccaggctacagtgaccactgcactccagcctgggcgacggagtggagaccctgtctcaaaaaagaaacaaaccaaaaccaaaatattaagtctctaggaatcctgtaagagaagggtagatcgggccaggtgcggtggctcacgcctgttaacccagcactttgggaggccaaggtgggtggatcacctgaggtcagaagtttgagaccagcctggccaacatggtgaaaccccatctccactaaaatacaaaatttagccggtcgtcacacgtccggaggccgagccgtcgcgtacctaggatgccgcgtggaagccgaagccgcacctcccgcatggcccctccggccagccaggccccctcagatgagagctgcacccaggccagtaccagtcgttcagccaccagcagcggcacccccatctgtagttggctcttctgctgctgcgccccggcagccaggtctgatggcccagatggcaaccactgcagctggcgtggctgtgggctctgctgtgggtcacgccattactggggctttcaggggaggaagtaatgctgagcctgcgaggcctgacatcacttaccaggagcctcagggaacccagccggcacagcagcagcagccttgcttctatgagatcagtttctggagtgtgcccagaaccagggtgacatcaagctctgtgagggtttcaatgaggtgctgaaacagtgccgacttgcaaacggattggcctaatcaagaagttcaacctggagagatggaaaatcagctctcataactaagttaatttagtataaaaatagaattgatagtgagggtataaagtgtaaccatgagttaaacctctcctgtcattcctagcttccttgcttcagaattgaaatggaaggggggtgttcctactctgtagaatctgtgacagggcaaatgtttgtgtggcctccttaaactagctgttatgattttattctttgtgagttaattagaataaagtcattttcttccaaaaaaaaaattagccggtcgtggtggcaggtgcctgtattcccagctgcttggctgaggcaggagaatctcttgaacccggcaagcggagtttgccgtgagccgagatcgcgccactgcactccagcctgggtgacagagcaagactttgtcttaaaaagaggaggtgggggtggg

SEQ ID NO: 317766 - DNA, 4001 bp, Homo sapiens
ctctttggtcttcacatgccttcagttgctaggtcttctagacccaaaaaaatctccccaaactatgtcattctttgcacattaatttcactgccctggtggaacgtctctttaattccccaaggctagcctgataatttcctaattggtctacttcaagccaacctacatactgctgccaagtcaataatatccaagtgcaaaccgaatgatgtctctctcttgctgtaaaacattccatggctcccatggcatgtataattgtagtcaatgtcaccctgttttcctttttaaaaaaaatgtaggctgggcacagtggctcacacatgtaatccgagcactttgggaggctgaggcgggcagatcacctgaggtcaggagtttgtgaccagcctggccaacatggtgaaaccccgtctctactaaaaatacaaaaattagccaggtatggtggcgggcgcctttaatcccaactacttgggaggctaagcaggagaatcgcttgaacttgggaggtggaggttccagtgagctgagacagcactattgtctgtcacccacgctggagtgcaatggtgcgatctcggctcactgcaacctagacctcctgggttcaagcgattctcctgcctcagcctccccagtagcggagattacaggcgcccaccaccatgcccggctaatatttgtatttttgtagagacggggtttcaccatgttggccaggctggtctagacctccagacctcaggagatctgctcaccggtctcccaaagtgctggaattacaggcgtgagccactgcgcccagccgaaactccgtttcaaaaaaataaaaataaaaataatgtatccaactgaagtgtcaccctgttttctacaacaaagctacagttttcacctccagtttcatctggcagtactccctggatgtactctgcgcttccacgtaagaggaactgcacttgctcccagggctcctccctcagctcagcttggtcacctgcaagcctctattggtgccattcttcaccccaggaatgctgtttcttctcagagccccctcagttcaggacagcactccctccagtagccttcctgactcccttggaccagatgtgatttcttccacatctgagtcttcccagttctgggaggttttactgaatctttttaatagtgcttacttcctacctgacctagactgactgtatattcccttatgcagagactttgtgtgtctcgtttgcttatgcacaacatgtgttccaaagatatttgacagaatcgaaagagaaaaccgattcctgcccggaaacctttggacagaagaatctacattcagtagcctgacaactctgccttagcaaacaagttggtcaaacatgcctaactccatgacaaagaggaactaacttgagccctccctggtgaacaatggcctgctgcactttgctttaggattttgtttcttaacttttcattttagaataattttagatgtacagtaaattgcaaagatagtactaagaattcctgtgtaccttttacccaaattcctctaatgtcaacatttgtgtacaatttgtcgaaattaagaaattaacatgggtacgtgctattaactaaaccacagcctttattattttttccactaatgtctttttctgtttcaggatccaaaccaggatactggcgctatagttttataaggctcaaaattaacagaagagaaaaaaagtaaagcaggtggagaggcagagagagaaatagggtctctgaaatctatttcttatttttttcttatcagacgaggccattaaactggcattcagggaaaaggatttgggcagtttgtccacaacctgcagagtttccacgaatctgcgcatcccgcccctgccctgggtcctccccactcccggttcccacctgccaggtctgaccccgggtaccctctcaaggtccgtggcggggaccggagcccggactccagctcagcgaacagcaccctcctaccgccccggcgccccactcagctcgctcacctggcaagtagcctcctctccgtgcgcgtgcgccgctgccgccgcgcgtcctccgggccaccacgtgaccgcgtgggcgcagtcccagacaggaaacgccggtgaggtcgccctgggccatggaggcagctcgcgctactttttcgcgacctcactgtgttcctgtgtgcaacctgatgttagctctgtccaccttcagctccaaagccaaccacgggtaaccaatatgcaaacaatgacatgagatttagaaaaacaacaagacggggcctgtgtcaatacaggtaaaatttggtggttcaaacattgaggttcagaccggcgcggggtttcacacctgtaatcccagcttttgggaggccaaggcgggaggatcgcttgaggccaggaattcgagaccagcatggccaacatagtgagaccccgctctacaaaaaatttaaaaagtagggctgggcgcggtggctcacgcctgtaatcccagcactttaggtggccgaggcgggtggatcacgaggtcaggagattgagaccatcctggctaacacagtgaaaacccttctctactaaaaatacaagaaattagccgggcgtggtggcgggtgcctgtagtcccagctgcgcaggaggctgaggcagaatggcgtgaacccgggaggcggagcttgcagtgagccaagatcgtgccactgcactccagcctgggcaacagaacgagtctccgtctcaaaaaaaaaaaataattaaaaagtagcgggtgtggtggtgcgtacctgtagtcccagctactcaggaggccgggaggccgtcaggtgggaggatcccgtgagcctgggagatccaggctacagtgaccactgcactccagcctgggcgacggagtggagaccctgtctcaaaaaagaaacaaaccaaaaccaaaatattaagtctctaggaatcctgtaagagaagggtagatcgggccaggtgcggtggctcacgcctgttaacccagcactttgggaggccaaggtgggtggatcacctgaggtcagaagtttgagaccagcctggccaacatggtgaaaccccatctccactaaaatacaaaatttagccggtcgtcacacgtccggaggccgagccgtcgcgtacctaggatgccgcgtggaagccgaagccgcacctcccgcatggcccctccggccagccaggccccctcagatgagagctgcacccaggccagtaccagtcgttcagccaccagcagcggcacccccatctgtagttggctcttctgctgctgcgccccggcagccaggtctgatggcccagatggcaaccactgcagctggcgtggctgtgggctctgctgtgggtcacgccattactggggctttcaggggaggaagtaatgctgagcctgcgaggcctgacatcacttaccaggagcctcagggaacccagccggcacagcagcagcagccttgcttctatgagatcagtttctggagtgtgcccagaaccagggtgacatcaagctctgtgagggtttcaatgaggtgctgaaacagtgccgacttgcaaacggattggcctaatcaagaagttcaacctggagagatggaaaatcagctctcataactaagttaatttagtataaaaatagaattgatagtgagggtataaagtgtaaccatgagttaaacctctcctgtcattcctagcttccttgcttcagaattgaaatggaaggggggtgttcctactctgtagaatctgtgacagggcaaatgtttgtgtggcctccttaaactagctgttatgattttattctttgtgagttaattagaataaagtcattttcttccaaaaaaaaaattagccggtcgtggtggcaggtgcctgtattcccagctgcttggctgaggcaggagaatctcttgaacccggcaagcggagtttgccgtg

SEQ ID NO: 317767 - DNA, 4001 bp, Homo sapiens
tgggactacaggtgtgcaccgtcacgacttgctaatttttgtatttttttgtagagacggggttttgctgtgttgctcaggctggtcactcgatctgcccacctgggcctcgcagagtgctggggttacaggtatgagccaccacgcccagcccactggtttcctttacacccgttttgttccccagcagtccttatgagggcacctgaaataaggaacctcctccccgacttgagagcagcaaagccttcagagggaactaagttattaaaacccaccccacacaaaatgcttctaaacgccttggctgacttaatccttgcagtgtgctgaggttaagtatgattatccatctcctgtgaacaggaagactgaggctcagagcttaagtgatttgcccacggttcactgcaggggataaaactcggctgtccctggcaggtcccaaagtcacggccttcaggctcccacaccatgctgcctccctcaccggggctccacactctcagcctggaaaacacgaattttaagaaaaccatgacttacgaaaagcagccaatcccagcattggaaccaacagggcataattccacctgcttccatcaccaccatccgccctggaattaggccggatattccaatttgggggatcatttaggttattcatggagatataccttgaagtaaagaataaaaacgttaactacttttattcaagaaatttttcttcagttttaactatgtgcttgctgcacagcactgaggccctacgggattcaaagaagaaaaaaactagaccagagccgggcatggtggcgggcacctgtagtcccagctactcgggaggctgaggcaggagaatcgcttgaacctgggaggtggaggttgcagtgagtcgaggtcgcgccactgcactccagcctggtgacagaacgagactccgtcccccccaaaaaaaaagaaaaagaaaaaggaaaaaaaaaacaagaacttaagatgaaagcgactcacaatctggttggggaaagtggagaaaacagacatgtcttaagcatctgaagtgcaggtagaatcaggtaagttctctggtacaaatatgtttaaatgtatggctgctgcgatggttaattttgtttgtcaacttgacggcatcatgaggtgctcagatacatggttaagcattatttctgggcgtgtctgtaagggtgtttttggatgagattagcaattgaacctttaaaccaattcctcacgtctcccttctatttgttgtgtctctggagaaccctcatacagttgtatcaaagatacagaatcaactcgataaaagtgggctcacaccggacactttcatatgagctagggtttgaagagtgagcagcattttgacaggcagagaaagaaggaaagggtcttctgatcagaaggaagactgtgaggaaggcagggaggggtgatgtggggaaggtgcaaacagtgctagaagcttctgaggcctcctcgtggtggtgatgaatgcagagattacagagttctctgcttcgggctcagcatgcaccctccatagctaggctgggggctaacgttagtaagaatttactgatttactgagtacctacacgaagtttcacattttcacaaagtagagtcactttaagtttgtttacatgtgacctccacaaacacacacaattacaaaatagtttagttaatcaagggatgtataataaacaagaggtcggaggccccgggccgctcccgcccacctccgcggacgagcgcccccctccgaccccattccctgcggtctgggcgttcaggcccttcggtctgggcgatcccggagaaccacccacggggctttaaaaatgttggtgcccaccacctccccggaacagggcccgctctacctcggtcggggagcgcgggacctcagcgttcccttaacgccaccgtccgcgggtccgctttgcgcaggcgcggcgcccccactcagtacccgctccgggcgtggcatggtgcgcaggcgcgatgtcccccactgcagccccgctcgactccggcgtggtgcgcaggcgcggtatcccccctcccccgccagctcgaccccggtgtggtgcgcaggcgcagtctgcgcagggactggcgggactgcgcggcggcaacagcagacatgtcgggggtccggggcctgtcgcggctgctgagcgctcggcgcctggcgctggccaaggcggtgagtccgtgccgcggaccggggcggggcaggcgggggccgaggcggcggtaggagcgggacggtccccagcgggtccgagcggagcgggcgccgggtccctgcgccctctgtcccgggatcgggaaggggctgagagagccctgggccggtgcgaggggaagccgcggggcggactcggggacccggggagctcggtccttagtagatagtccgcgtccgggtgaaggtcacaaccccgcgggcttgctgggcgtcccctccgccgccttggtccgggcctggggtcctgggaccccgcgggctgaggtagcccctcgcctcagtgcctggcaggtggactcggggaggagtcgtgtctgcccaaggtcacccgggcggatagcggccggtggccgccctggctgggctgggcctctgccgccctctgtgcgggttgtcctgaggagcagcccgcagcccgtgggtggggccggcggggcgggtgagaccgcccgggtgggtgcgaggagtggccgggctcggcccggtgggcgtccggtgggaagcgtggcgcgcccgagcttaggcttgcagttcgcctttccagaaagcgcaaatctgtccatgtccacttcgagaccttgtaagttaagggcttctactttgggtcgtgtttggtggtccttatgccaccaaaaatgtgccagtgtttaaaagcagctgtgccagtttttaaaactcaggcggagagctcagcgcactgaccgggcgaggacgccgggacctgtgcttgcctgtgcgctgagtgcctctagggccgggctcggcttagtccaggatggtggtcagggttatacttccctgagcccttgctctctgagtgtctgaatgtgccctctacgattgcatcttaagaatcggccttctagggttttatttaatcaagctaaattggataggtttagttgtttggttcttttaaatgaacttacccacccacctccttaattacaaagtaattttaaattgcagaataaaaatctcaataggaaccaaggcattcagcaatattgatttgaattatgcctgtaattgtgcaattttctcctttttgaaatacttattaaaaatctcgttgagttaaatgtgaggattagtcatacagccatcctgccaacatcagaaagcgtgtaaaccgttctagtgtgttgctgtggttggtactgactgagcagagacccctgccgcatcttgggcttttaagagctgctaggagggcgtccacaagcaggaaggaaagcccatggtcagtggggctttttaggggaaatggtagcttgtgattggagaaaagctagagctagtgcctttgtcctcaacccagatggtgcccggtgttccttctgcagactaagaccctgccagcggcggaggcacctcagacgggatggcaagatagcaaaattgaaccaaaatttagtcttgggttttgtaaaagtctttttatcttgatgaagttagcttttcctacagaaattctgcctgcaagcagcatatttatcggcatttcagataggctttttttcctgaagaattggagtttacgaaggaacagcataatcaaaaaattagcagaaaaaagaaagaaattcgtgatagccaactgagaaatgtgtttggaaaatagatgctgaggataatttcagtaaagtccagagagaattttttaacctcattttggccagttctgtggtgttttgatcattctgtatttacaactgct

SEQ ID NO: 317768 - DNA, 4001 bp, Homo sapiens
aagatgttaaaaatacttgtttaactatcatgtcacagatgttttctgctgttatgcttatttcttatattttgtttggtaaactggtaaataaaagatgcatggaagttaatgtgctcaaagcaatctctctgcatttctattgtcttgtaattttgtataagggattaacctttggggatagccagctaactgctgaagaataagagtttcagttttagtcctatgaaatcaatcataagaacttcttcagaatcccagaatgtaaatgctggctattttgcaaaagtcaatttatccattctgactggatgagtttacatcttcagatgtaatgtaaacaagtatgagacacttgtctttagatttttctatagcaaagaagaaagggaaaatacaagtttgaaattcagggatgttaggttgaggaaaaaacatgaaccaatgtatggtgtgtgaaagcggtaactagtccaaagtaaaatgtaagtaaaattcctgatgtagttactcaaagcaatttgggggcatattattgtttaaaaggaagttaaccaaaacagatattgcttgacaatatgttatttcatcaagatatctcattttcttcttttgaaatattttgcattagcaattattaatggtttttaaatctcagatttttggctgtatattttgtttcttgaattattatctcgaattattatcttatgtatgacatatgcaagcacaactacatataaaatcccttaaatagttaaaacttgatccttacagcagaaaaatatttgttaatagcctcccatgatacagtaaaattccttttggagtaaaattaaaaataattgctgtttgatagtactgttattctttaatagtgctacatagtaatctgaagtagttaatggaaactccctccacccccaccttttttttttggtacctaaccttttaaataaaaaaggttttactagggttttgtctcagaatctggctcttgaaataaatgcatttaaatttgagcttgattttctctcaactccttcccccaaagaagaccctgttatttccttgtaaaaccatcactaatattccatttgctatcgttgcatgatatcccttttgccataatggcagagccaggcaattcatttctaggtatcttcattgcctgctcttctgatttcttaggtcaagatcctttcagtgaatatggtcttgccctgtgaaattcggtgtcaagctggtgattcagtgcttgtcaaattccttagtgagccgcagagactgatttgtgaccttcaaggctcagcttcaaccgtccccacaggcaagtgaaagtcccatttccttctttgtcttcttgcctgctggcttcaaccatccccacaggagcgtgacagttccgtttccttttgggtcctcctgtctgctggcttgagtcccggggctcgtcctctcccctaccccacacagttggtccttcgccgctcgcctgccccacgctctggtccctcctctttcctcctcacctcccctcaagaattcactctcagtcctgaagcctgggtcccctggctccctctccgtcatcctagtgtccttagggacctagcagaaataaaggatgggggccgaggacccgcggatgtgagagaagtgcctgagacaaaaacctgtatggacccagagcactgtaaggagataagaagaaaagcatctctatggaaaaagcgggagtttcgaatcgctttctagcgtccttagcggcctagcaaaaataaaggatgggggccgaggacccgcggatgtgagagaggtgtctgaaaagaaaagcctgtaatggacccagagcactgtaatgaaatatgaagaaaggaatctctatggagaaagcgggaatttcgaaccgtcaatagaatttggagtgtacctgctgttgctcctagttccccacagtctccctttccgctgcctctggggcctggtacacccctgaatgctgtcccctcctccggaagccgaatcccccaacaatgggcccgcctttctctgggcccgccctgtgcgctatgctggagctcctaccaccagcagttcttaccaacttggcccagctccgctcagcatctgcggctgcttaggtattttcatgtggtttccagaacatgaatcaacaccggatcaataattgtttccccaaccaaagaataaatcacattgggtgttctgaattgtgagtcagctccattgaataaataattatccatatctatttttgtaacttataaaattgccttttaaaattccagagccagttaatagatatggtttcccatctacagagttatatcttggtagcttaatgattaagggcgtgggctcttgcgtggattcaaaccccaactcttctctttttccgtgggtgatagtgggtaagttcttaatttcatgcacctaagcatcttcatctgtataagagattaattataatgcctgcctctgccgggcgctgtggctcacgcctgtaatcccagcactttgggaggccgaggggggtggatcacctgaggtcaggagttggagaccagcctggccaacatggtgaaaccccgtctctactaaaaatacaaaaattagccaggcgtggtggcgggctcctgtaatcttacctacttgggaggctgaggcaggagaattgctggaacccgggaggcggaggttgcagtgagcggagatcgcaccattgcattccagccgagacccgcagcagcaagactcagtcaaaaaaaaaaaaaagaagcctgcctcttaggacggttgtgatgattaaatgaagtgatgcatttataaggtgcttaatggagatccttgcttaaagtaagtgttcagaaatgttaattattagaatttttgaatgttgttcagtaatagtttgaaagcgaatccactgccaactttgctcatctgcttttttttttttttctgagtgggagatgggaggtttatttttgttaatgtgatttttcgatagactccaaaatttggcaagtgaaaaaatataaacagtaatatgataacccatactttactagttgaaaggtagtgtggcataatggcaagaaaattaggttaaagtggaaaatgggggttgtagtcttcactctgctgctcaaataagctttccctaacattagtagcaacacatagaaatattgaaaatgacctgctgaattgcgggttctacccaattagcaaatataaaatgttccatgtaactcatgtcataataacttttgaaacaagcccattttaagaccctaaatgctaaaatgctaccttctccatgagtcattcactgatcgtatcaatcagttgtgatctacctttccttactctatggaacatgctagctttctgtggcatttgttaagactgaattgatgtattacctcttttgctgtatttattattggctccttgggggaagaaactctattttctttatatatatatatatatatatatatatacacacacacacacacacacacacgcgcatgtatgtatgtatgtatgtatgtatgtattaagttccacctaggcccatcctaggcaaatttcaggagtcctttgaaaatatgtggtgactggaatgtgtaaggtggagagggagctccctagatcccctgcctcatctgtacttccaaatcttctggatgttccaacatttgaaatacagaagctttgactatctaatgattttgggatgtagagactaagaaagttggaatattatatatatatatatgtatatatgcaaacacacatatatgtatatatatatacacatatatatgtatatgtatatatttctccatagagcctaccatagagaaaatagaaatgaaccaacacatcaggaataagtcagaaaagtttagcttaatttttctagtttagaatgggttgcaagtttatcttccagtttatagatgtta

SEQ ID NO: 317769 - DNA, 4001 bp, Homo sapiens
ggaggtggagacaaagaacacggagctaggggactagatacctgggttctgctctgtgttgctctgtgacctcagtcatgctccttcccttttctaggccttaacctcctatctgtatagtgggtgcgtcagcccaggtagtacccaaaggccctttccaactcagacaggctgtgccagctttacttgcccttcagagctttggctgtgccagggacaggcaggaacagctggtaagtctctcagaaggagcaggagccaaagaacctgtgcttactgtgacctcctcttccagcttgtggaagggtcaggctcttccccgtttcctccacctctaggtagatggaattcacccttggtccactttgcaagctacaaggttgacacaggtgcagagaacacagactctcagatgcttagggatcatcctgctcatcactccccatacagggagaaactgagacccagggagacacaagggcttgcttggggtcacccagtatgtttatggcaccaccaggacttacacccagggctaatgtctgcctaccacttgctcagttacaagtctcagccaaggctcaggtctctccgccttgtcatccctgtcagccagccccttccttctactgatagagccaagcctcagtttccctgttggagtgagtaaagacatgagggtttctaggtcaggagttggtgagaatttcaatctggtaataaagggagagcaaggaaagccaggaggtgtcagagaagggagtagaatcctccaggctaggactactgttaggcagaaaaacctgtactcagggcacaagcaaagcaggagcagagggaggactaaagttcattgcaaaactattaaacactgtcacagtttggggcctctcaaggtctcaagggggaatgatgataaagtttaagggatcacctagtcccacctggctagggggcaggtagtggtaagaaaaggggccagaatttgagggtccttcttcccctctgcctcacagtgtcccctgaggaggctatctttctagctccaggctctgaccttctgggctcgtcagaccccaaggggcagctggtctcactgcaagaaacctgagaattgtcccctgggccctgacccagctccaaggccccttgggggaaggacaggaagggaggagagggccacagaacgcagtagatctcctccctctttggcccctcccagctaccccaagggcagcccacactcaccagctctggggcctgcaagagccctaagaccagcgcctcaaactttaaagcgtcatcacctgggcatattgttaaaaggcagcttctgtcttggcaagactgggcctgagcctgagattctgcatttctgacaggtccccagggatgctgatactgcgagtctgtggaacactcttcgagcagccctgagattatcagcctttaacccccggggggaggaagccgaaggcccagagaggtcaagtcacttgtccatggccacacagcgaacagccccagaccgaaagcagagggcacctgccacagacacacgacatctccccacccgaggcagcgggaatcagctgcctttccctggcccgggtgccgtgtttgtaaactcggctgcttggtgcggctcgggccggggtaaagggcgcctcccagcagagcctccctcgtctctgagctggcctctccaggttctccgtccggtatcccgggccgaccagagagagcccggggcgccgagtcctctgcggcggagcgattccgcactcccctctcctctgaaagcaaacttctccgccggcgccctttacctttttcgggggtttgcagctgctcagcctgctgtgtctgcagcccatcctcctccgggggctcccggacgccgcttcccaactccggggcccccagaggagcctgcgatccgggccccgctgcccgctccgcgcccgccggctggggctgccggcgagaccctgaaactgaacctggaagcgctgtcttgagcctgagctggggcggccgcccgccgtaaatacccgaagagcggggcctcagtgtagcccgcagggccagcggcgccgccaccagaggcaggtgaccagaatccttctaaataataggaagctctggtcagggcagaagaaaagaaaacctcaaggagcaacagatgcttttccgaaccctcagctaagaaagggccgggggaaaaaataattaaagcaattatttgataaactaacaactatcattcattgagggctgtttttgtcccagttgttttatacattttatttctatttcttgccatatcagtgcaacaaaggtattacttcctccattttacaggtgaggaaaatggtgttcagagatgcaacatgatttgcctaaggtcacatggctagtaagttaccacagcccagatagaatccagttccttttttttttttttttttgccgctatcatagttcactgcagcctcaaactcctgggctcaagcgagcctcccagctcagcctcctgagtagctgggactacagaggctcaccaccatacccaaccaaattcttttcttttttccagtctgattttgaacgaccgccctcaagcgatcctcccaccctggcctcccaaagcgttgggattacaggcatgagccactgcacagaatacagttctaactccagaacctaaactttgactcaatggcctacaaataaatcataatactaagtttattgtatttatttatttttgagacagagtctcgctctattgcccaggctagagtgcagtggcacgatcttggctcactgcaacctctgcctcccaggttcaagtgattctcctgcctcagcctccccagtagctgggattacaggcatgcaccacgacacccaactaatttttgtatttttagtagagacagagtttcaccattttgaccaggctgatctcaaactcccaacctcaggtaatccgcccgcttcggcctcccaaagtcctgggatcccacacctggccaataatactaagtttaattttaatgcctcctcacttctgggctgatagttttttccacctcacaagcatctgtaatatttgactctatccatcttggatagatgttattcatcacaacaacctcttgaggcaggccaggtatggtgactatgggacataaaatgtcagtgtctaggaaaaggagcttttgtttatcttctctttgttattagctgaggtttctgaaatggcaatgcaggaaaaagataaccaattttgaaaatcagtgtgtatgcctatttgcgtgtatattggaatattaaagtcaggcccaaaactcttggaaaggtgtgctgtgaaaacggcttagagtcatgaatggggaaagaatatgagacctcaaaaaaattgctccctccatagggtacaaaaccaattgcaaaagtgtgtaagaaaggaaactaaggaaacgtgttattaggttctcaaaagcaagtataatagagaatggtggctcacaaagtgtgattcccaaatcagcagtgtcagcactaccagccgcctttgttggaaatgcaaattctcgggccccacccctggcctaaactctggggatggggcttaggaatctatggcttcataagcactccactcatgtctggcctgggctaaagtttgagaacccctgccataggacgtgctccacaggtactgaagaaacaggatatacttaaattatactaaaattaacaatgtttattggaacagtgctcatgattaaaaacaaagaacccaaaacaacctaaacagccaagaaaagaaggttggttaaatacattatgctatatccataaaaatagaatgccacataaccagcaaaaatactgatgaagatgaattttttgtgttacaaaacataacaaactcattttcattaaaaaaaaaaattgagtgactaccactgtattggtgagattttgaa

SEQ ID NO: 317770 - DNA, 4001 bp, Homo sapiens
tttggagcttctcaggcaatgtgattttcctgtggcctaaactgccttaggtaaagcatcgagactaacccaaaaggctattgctgggtctctcggctcccttccttattatcaccagcagccgtaccttttcacacacctctgcattttgccgttccaccccaccgtctctaccaggactcagtcccatgtgaaggtgggtcctgggtatggcagagccttcctcattaccctctgcctcctcgacctgctgttccctccctcctttcctgtaggagagctgccgctgtggggacaggtgggagtaggtcaggaagctggatggaggtacacatttcaaagttttatgtaaaaaatttgagttggtggaattaccagaactaggagtgaagccttagcaggtaggcctttcagaaatagtgaaaatgagtccccaaatctcaatggtgaatttttctgagaaatgttacagaaacataaagtgacaaatttttgtctttatattgataagatagatagattagtagaaattgagaagagattgtccaggttttttctgttgcttatttgtataagcccagtacattgacggactatattgggagtccctaagcaaatgcctgcagggaccaggcagttaatacagcaaacttcagaggctcatctgctttagccagttcttgccatggtatggtggaatcattgttgccacatctgatttctcaagagaagctttaaaatccaatttgtatgtgtgtatgtatgagtatgtacatgagaaagctttcagttttaaaatgttggctcagatttttaaaaagcagaccaaagacttatattccacctctgctctagacttagagaatctgttcaggataaagcttaaagaaaagatgacaatggaaaagagtcattggtcaagtattaagtactgacacttagggtttcctgaatatagtagtgagtgctactttagaagagattccctctagttcaaatgcagttacaatctccaaatacatgctagcaactcacgatttaaattctctttgacataatttgtatggttcaatctccctcatcctgcttttcttctttttctttctttcctttcctttcttcctttccttctctttcccctcccctcccctctttttgtttttaacagatggggttttactatgttgcccaagctggagtgcagtggcaattcagagtgcagtggcaattcacagtgtgatcatagctcactgcaatcttgaattcctggcctgaagctatcctccagccgtagcctcccaagtaggtgggaatacaggcatgcaccactgtgctcagctctgccctccctttttaaaggtcagactgaagtttcagttttctgtatccatagagctgactttgctcaggaaatttacaacttacctaatttgaacgcagctggccaagtctgtatttccctccaggaatgtgcacagttgtgttcagaccgtttagcaggttggggtgtggaggaagacagatgaatagtaggggctttactccagcctctagctggggattttctaagatactgtcttcagaaaaggaaacatagctcgaagttgtacctacatggaaggacctcatcctccaggtggcaaaaatttgtagtatgcctgttagaatgaggttccttcctgaaacttctgggagatctagaatttaaagctatgtcattctcttgtaggtaatcagaaatcaattggaaattcctgcttgaagagatagatattcttgccccacctcaatccttccagcacagatttgggagatacccccctttccagtgaaggcctaagtgtccagtgcccccactcaccttctgaggcatgtagggccgcacagacagccaaggccacgatggcgagtcctctctgctgcattcctgcctgccctactggcactgacagcaacacaagtgaggctgttcgatcaggaaatgaggctaaaggtgtccttgggcacagagaaagtgcagaggaaaagtaagccaggtggccccgccctgggaggtgttcagggtatctatttctcatgtttctttccttaagaccaggctcctcctcgacttattaagctcctaacttgtgttcatcctgcctgggggtcaggggatgtcaatggagatctggcagctggcagggtcactgtgaggtggggtgtgcatcagaatcatttggggaacattaaaaaaaatcaatctaaatgactctcccctttccctgatttgtaaaccagaactcccaggtaggagaccagtcatttgaattttgtaaaagctctataggtgattctgatggacacttatgttgagacccattgcataatcagtttttaagtagcttatggaaaccatgagtttctggggacaagggtgacaagtcataaaaaatgtatctttgtggaaagatatggaagtattaaaccccactttagtcttggttcacagccaaattgtttccagtgaagctttttacaatagcttatttaggagaaagacaggaaggggggcaatgccttgtagaaaagagcccaagagcaggtgtgaagaggcatgagcgctagtgcagctttgctgccaatcagctttgtgaataaaagcatggggtagcatgaagataattggattctaattgttcctcatctactaataagttgtataacctcaggcaacgtacttaactttgctgtaaataacaagtcagactagatgacctccaaagtcatgccatgcttcctctagaactgtgttgtcctatgtggtagccgctagcccacatgtggctcttgagcacttgaaatatgagtagtccaaactcagatgtactatgggtataaaattcacactggatttcaaagactgggtacagaaaaaaatataaaatatcttgttaataatgtttatactgtttattgattacatgatagtattttggactttttgggttaaataaaatatattattaaaattaatttcacccatttctttttatgttttcaaattactgctgtggtttgaatatttttttcttctccaaagctcatgttgaaaattaatccctaatagtgctgggagatagggcctaatggacaatgtttaggttatgatggctccaccctcatgaatggatgaatgctactataaaaagggcttgtgggaatgggttggtaccttctgctcttctgccaggtgagtacacaatgctccttctctccaaaagatgcagcaaagtggcatcatcttggaaatagaaactgaaatcactggagccttgatcttggacttcccagcctccataattgtaagagaatacatttctgttatttataaattgctcagtctcgggttgtggtgttatgatatatatattggcttttatccatggttcctggcttataactcccataacccttgttacagtttttttttgttgtttgtttgtttgttttttttttgagacagagtctcgctttgttgcccaggctggagtgagtttcaccatcttggcaagatgctggtcttgaactcctgaccttgtgatccacccgccttggcctcccaaagtgctgggattacagacatgagccactgtgcccagcccagtcttttttttatattataatgttggggcactttaggcttcaggaacaggcctcaggaaacggaatctctctctgaccttctgtttttctttcacctgcccaaggcaggactctaatctgattgtgggtcataagatcctcattccagaaagggttctgtcccatactctagaggaaggaatgctacacaggccaagaaaagcctgaacaggcaggacttgctgggtttagattatgtgctttttgtctaatcacatttctacatggttgttaatcatgcctatgtaatgaagcctttgtaaaaccccaaaagggcagagtttggagagcttctggatagctgaacatgtggaggt

SEQ ID NO: 317771 - DNA, 4001 bp, Homo sapiens
ccacaatttctactttattctcacaaagtgtcatagctttatctcactgtatttgcagtcatggctccttttttaaattcttagtgtttgaagtgaaggttcctgtgcaaagtaatagtttaaaagtttgagccaggtgtggtggctcatacctataatcccagtactttgggagactgaggtgggaggattgcttgaggccaggagttcaggaccagcctgggcaacatagtgagaccctgtctctacaaaaaatttaaaagattagccaggcgttgtggcccacctacttgggaggctaaggcagggggatcacttgaacccaggagttggaggctttgatcctgccattgcgttacaggaaaggggtccccatccagacgccaagagagagttcttggatctcgtgcaagaaagaatttagggccagtccgcagtgcaaagtgaaagcaagtttattaagaaagcaaaggaataaaagaatggctacttcatagagcagccctgagggtggctggttgcccatttttatggttatttcttgatgatatgctaaacaaggagtggactattcatgccttaccccccgccttttttttttttttttttttttttgagacggagtatcgctctgtatcgctctgttgcccagactggagtgcagtggcgagatctctgctcactgcaagctccgcctcccaggttcacgccattctcctgcctcagcctccccagtagctggtactacagacgcccgccaccacacccggctaatttttgtatttttagtagagacggggtttcaccgtgttagccaggatggtctcgatctcctgacctcgtgatccgcccgcctctgcctcccaaagtgctgggattacaggcgtgaaccactgcgtccagcccatgcctccccttttgagaccaaatcgggtaactttctgacgttgccatggcatttgtaaactgtcatggcgctgatgggagtgtagtagtgagggcgaccagaggttacccttgtggccattttggttttggtaggatttagccggcttcttcactgcaacctgttttattagcaaggtcttttatgacctgtattttgtgctgacctatgtcatcctgtgacttagatgggaatgcagcttagtaggtttcagcctcattttacctagctcctattttaagatgggagttgctctggttcactcgcctctgacaattgcattgcagcctgggcgacagagaccttgtctctaataataaataaatgtttggctctaagcttagaaacaaagcattcaactcatgggttaaagaggaaaccacaaaatcttattctggaaaatcgtaaaagtactatttattataatgggtggggtacagttaaatttagccctaaatgcatttatttaaaacacatacacgaaaaaaacgtgtgttcaactaaaaacccggaaaaggaaaatcagaggaaacaaagcacgagaaaaaaagaaagaaagaaagaaagaacgaaaaaagaaaagcacgacgttatggcgctttgaggctgtcgcgctactggtatctgtagtcgtggctgccgtggaccaggagagactgaagtggaaaacagcgggcggtagccgaagcagagagcaaggaagagcgcgggaagtgcagagcgacagcaacaagaaaggggtggcgcgggacgtcgtttacctgggcgacgtccagccgcccttcccgcctctgcgcgtacgcaacctgcttggcgccactgacctggtgaggaggcttctttaaggccgtggacggttcctacccgcgcgcggagaggaccgacgtgaagaagctgccaaagtataacaagtactacgcgaagggtaggtagggtggagtcccaggcagcgcgtgacggccggatgcccagacgcgcacgtcgcccgcaggcgcacgcctggacccgggggagccggctggggcgcccaggaccaggcctagcctaccgcgggctgcccttcacagagctgcaggagaaaacgttgtattgtgcacgcattccctaacccttactagtttttttttttttaattgatcggccagcttttgatgcgggtatgttaaaatctcccactgttattgggattatgccagtttttttttttcttgcatttctgtctacttatgtgatacaacacttggggttatgttttcagacgcccaagtaccctcctggtccacagccagaattaaaatgaggcacgagcctcaggtgcagaatttaagggaccgccaaaagaactccgtaatgaagataagcaatatttggatgcaatatttttaaaaataaaaattaatgcaaaaaagtctatgattagtaaaatgctgcaattttaaataaaaacaaaatctgactgcattttcacgcctcgatcatctctcttgcctcacaggagtctgggccctagagatagcttttctgtgaagtgaacttttttatctttcggttaagattcctctatttctactataactttttgcttaaatcatatttttctgttattgacattgctacactaatcttttggtttgtattcatttattctctcttttttttgcgtttttaaatcctttttctttgctttttattctttctgttggaaaggtattttctgtatttcctttattaatatttttctactaaaaatttaggcagagttgggtcaagaaaaagctcccttgggaaaaatgtctacaatatctagtaccgacatgtttctttttgaatcgtagaagtgtgttattttactaattcaagtgattgtcacatcagtaaaattctagaagcatttatagggtgctgcctgcattgtatcagtctttgtaacagacaccgagtatataagaattaataagtcatagtacctgccctcagggcgcctacaattagcaattagcagacttttttttctttttttccttagataagatcttgctctgtcacccaagctggagtgctggagtgcagtagtacaaacacagctaactgcagccttcacctcctggcgtcaagtgatcctcttgcctcagcctcccgtgttgctgggaccaccggtgcacaccaccatgcctacctaatttctttatttttttgtagagatgggacctcactttgtgcccaggcagagcagacatttttctaacattgtctcattggacctctctgctgtatttaacacttacccattccttccttgaaaatttccatattcctagttactagtctcttctaatattctgaataatgagaaattacagctgggcacagtggctcatgcctgtaatcccagcactttgggaggccaaggcaggaggatcacgaggtcagaagttcaagaccagcctggccaagatggtgaaaccccatctctactaaaaatacaaaaaaattagccgggcatggtggcagacgccagtaattccagttactcaggaggctgagacagagaattgcttgaacccgggaggtggaggttgcagtgagccgagattgtgccactgcactccagcctgggcgacagagagggactccatctcaaaaaaaaagaagagaaattactttctctgcctcttgaatgcgtcctcctttgccctctcctcaatagttagcattctgaaagtgccatccctaacctactgctcttttctttccacatctcatgtttaaaatttttactatgtcagtaacttcaaaatgtgtttttttagctctacccaaatattctgatgtgtatccacctgccattgaatatgcacttggatatcccacaggcaccccaaactcaacagagccgcaactgaagacatcatctcctgccactttaaatctactgttttccttttctcatctcgtttaatcactttgtactgttatccaagtgtaattccatcttctgcactcccatggccagtcaaactcctgtagattgtattttccttaacacttttcagat

SEQ ID NO: 317772 - DNA, 4001 bp, Homo sapiens
gcaatttcatcaaagcagcctcctctacatgacctacctttccttcacaggtaggtctatcatagaatacatttacataccttatatttaataaaaagttattatttttgaggctaagtgttaattcatcttcttaaccactccctgaaaagttgccttcttcctgttttactcctttgcatattccaatgttacaggcttattatttagtagccatatgcagcagtaaaaaaattcaagagaacattctatgtttacgccaataaattctgcagagatggcttgtagttggataacaaagcctttggctcagacagctactacttaatatcattaacgaaggaatataagacagttgacaattaaaagcatagattctgaagccagacagcctgagcttgaatcccatatgggccacttacctgtgtgaccctgacataacctctctaaagccatgatttaaatagtagaggtgacaatacctcagagagtacgtgtaaagattatgtgagttaatgcatgtaaaatgttaggcagagcttgcctcatgctaagcactcaataaatggtattaatattactattcatttgaatgctcttgcatgtatcagtgaaataagggacaagaaataatcaacagactctacaatggtaagaataagtttaccaaaataggctcaggcgaaagtttttcttctttaacaggctcaggttctggctcaggttctggctctggcactggctcagacactggcactggcaccagcataggtaccttttcaagaggttttggtagttttttatcaatgacttttccagtagctgaaggttttgcttcctgtagatgaaacagagagaatgaaatgtttctgcatcaaaggccacagttggaaggcgggctcttacagaagttaggtcaggaagagagttaccttcttcataggcattttggcctgcagttgttcactgactttgttaccaatgtccccaagagctgttcttggcctcagtccgggcttggaggttgcagcaggggccgtaggaacgcgctttgcgcctgccatgttgatcttcgccttattttcagcattaattttcgagttctgaaagaagcaagaccactttaagagctgatccacgaaggctcgagtaagtcaagggttaattaaggtggggcacaaggagaagttcccagaaagaaagccgactaaaaatgggttccgagggaaaacatgggtcccagagtctactctgcggccgtgacaagtcagtttccgccgacctctacatttaccaattgagggattccctgattagtcctggccagccctaaaataccgagaatttacatttgaaaggaaaccgaaaaagcctccaattgcagacaccttctctctgggaagggggttacagagttgctggcgggcccactcagggaccctctatcactttttcaaaaggttcccagtcgactctccacctccccaaaacatttatccaatatccgtccagttctctttctcaccttcctccctccatccatcgtcccccacactctctcaccaggcctgggcccacctcggcgctctcttggtgagtcccctcccaccttcctccccaaatcgctcctgcggccctctcccgctcgggaggctcccgcaggcgaggcagggagagcaggcagcagctaagaaggccgcgttagttcgcagtccgaagcggctcaccctggtgactcggagcgccatggcttcctcttcaccaggcagcagctcagcggggagaagcagaacaccggaggcccgaccagccaaggacctacacccagcagaaaccaacagccgttccgccgcagcacgccgagaagagccagcctagcctcagatttaaaccccgcactgctccctccttattggcctgttcgtggcactcactcccttcccattggcggctgccggtcgcagagaatgcgtttccagggcgatcgcgcgaaggcgttcgagaggggcggggccacagtgaggctaggccggaaggcctggccaggctctcacgtggtctgcctctgcgcctgcgctctcgggcagctgcagcggccacctggagagcagtgaagccagtgcgccgcccacctggaaaggttagccgggcaagagtgtgcgttgccaatgccagctcaggaaaggcctagtggcctttggaaggtgacagaggcgcggccacagtctcagaagtgtcaaaagtagttttggatctagtgttgcacactttccatttctacggtagcagcaataatatagttcatgaaaggctttaatagacattctttcatttgatcgttgcaacaactctctgggttggaggaactgaagctcagcgacttagatgactttgccagggtcacacattagcaacgggggaactgaatttagggtttttttttttgagggggagggagggggtgtatccgtgttgttttcacaacactgattgtcccttaacaatattacttgattacttcaagattgtccagtttcccaaggccaattgttttgtttgttttagctttctatttggaaataatttcatacttagaccagttgccaacaaaaatcttgtaaggaatatttctatgccctttactcagattcaactatccttaacatgtatttgcctctcatgggaaaatcaggaaaaactaaacaaaaagacattttaccccatttgctttgtcatttgctcagattctctctagatccaaagaaaaacaagagggttctttttgccttctactcctcaaaacacaccagcagctcagcaattggaggggaggctgaaggacaaaaacattgctatcccatagagcaacggtataagagccaatagagactcctggcgctggaagtcacggatccgaaagaaggcgcccaatcatttggtttctttggatcgttattgagtcttctgtcatcatagttcaccctcctactcgaatgcctcccgtggggcccttacccttgctctcctctgcctggaatgcccgcctcttcttgcattcaagcccctgggttctattcaggtaactcccattcatccttcagttctgtgttcaacatccattctcactcagtctttctgggtttgatcaatccttcctcgccccatgcaggggcgagaggcaaggggcgaagcaggattacttatcctctgtgttccagtttaaaaatttttttttttacttttttttgagacggagtctcgatctgtcgcccaggctggagtgcagtggtgcgatctcgactcactgcaacctccacctccagggttcactccattctcctgcctcagcctcccgagtagctgggacggcaggcgcccgccacaacggccggctaattttttgtatttttggtagagacggggtttcaccatgttagccaggatggtctcgatctcctgacttggtgatccgcccgcctcggcctcccaaagtgctgcgattacaggcgtgagccaccacgcccggccaaatttttccttttatatgctttattttttagagcagttttaggttcgcagcaaaacttagcagaaagtatagagcatttcacctgccttccccactattgacaccccacattaaagttgtactttaattataatctgttaacctacattgacaccacagtattacccaaagtccatagtttacattaaggttcactctaggtgttgtgtcttctacgggttttgacaaatatataatgacgtataatgtccacccgcctcaacctcccaaagtgctggtattgaaggcgtgagccactgcacctggcggtcagaatggtttcttttactcaaatatgcatttaaggttcttccatgtttttttcatgggttgggatctcattttattttagccctgaataatattgcattgtctggatgtactagtttatttattcagtcacctactaagtgacatcttgattgcgtccaag

SEQ ID NO: 317773 - DNA, 4001 bp, Homo sapiens
catctccaaaacacactgagcaaaattacaaaaatgtagcttcaaacataccttcattttagacaggaatctgtccagtaaattcacagctagagaaaatgtctctgtgtcaaagccaaagaactgagttagactaagaagatcttttacttcaaagtcccttagtcttgcagtcattctgaggccattatcgtgtgcagactcaattagtctcaaaccacagacctttggctgacatctagactcctgttccaacagggcattcagctggtgtagcagtttctgagagtcagttgttgtcagtacctctatcatctatatatagaaaaaaagaccagcaaggagtgtaagagtagtccttcctgctttccttggccatctttgcactgggccaagaaatgatttataagcctcccatcccccaatgcggctagtgcatctaagtcattgcaaagtgccatctgttatttatttcccttctacaagttggtcacatcctaaattgagttcctagagggaaggaaccatgctttttttttttttttttgagaaggagtctcgctctgttgccaggctggagtacagtggcacgatcttggctcactgcaacctccgactccctggttcaagcgattctcctgcctcagcctcccgaggagctgggattacaggcatgcgccaccgcgcccagctaatttttatatttttagtagagacggggtttcaccatgttggccaggatggtctcggtctcctggccttgtgatctgcccgcctcggccttccaaagtgccgggattacaggcgtgagccaccgcgcccggtcggaaccatgctttttagaaaaataaaatgcaaatcttcaagaaatacttgttcaagttattcactgtcaatagataaccacgaataaacaccgtaagacaggataccgaaagtgaaaagcagatggtagttaagtattctgccacatattaacaaaatgaactgttcaagttacttaattgtacttagttccacattgataaagtagggataaggtttatgacctacctcacagatttgtgagttaaaatgaaatcacgtaaagagcttagcacatacagtagacgcttaaaaaacactgaacaataataatgagcttgagcttctttctagatttataaaatgagggtaacaatatctgtcgctgaatgtgaagactgaacaagatgattcaccacttaaagagtatagcacagtgcttggcacacaatactcaatattacttaacttttattgttgttaggaaaggaaacttaaaaggtgacattaggagcacgtattggggcgggggggtgcggtgggttgttgctaacctagtctgaaagatgaacctgggaattccattgatttaagtgtgcataacacaaccatgtcccgggcacaagctaagccctggatacatggaaggtccctcccacaccaactaaagacaggaaggcaggaggtcttcagagctagtcatgtgaggaacctctaactgcaggggttccattcttcctccccaggctagtccctgggactgggtcggcagacacgaaaggcacctcaggaggccggatccggctccgcccctccagcctcggactagcctgggcttgtgctcacaacagcggtagagtttagtgtggaaaagggcgcgggccagacctactcctcgccccgcgcccccaacccagctccccacccgcacctggcggtcaactcccgcgcagtcccactcaccttgacagagactgcagctcctcagcggtaaccaccctccccgggcctgctcacctcaccccacgatatcagatccgagaggcctacgaggagaggggactcgtaggcaagaggagagaggcccggggagggggactgtcctgggtggaggcctcggcagcgccgccgagacaactcggccctgatcagggtcagctcggagccgaaggggccgcgcctgccctaacgaggaatatattggagggcggggctttctcgcgagaagggggcattttcgccgctgattggtgtaattcttttgatggatggcctccgcgatccgtaaacggctgggccgtggagtgagaagtccggccaatcggctcacacttcccgttatctggcctcaaattccccggcccccttccacgcccctacctctaagcgtctctcattggagaatttaacaaagtgtcttcattcagtagggggccaaactaaatactcggtgcagcaaccctcgcctgggtcaggtcaatcggctgccagccggattggccggcgtatcattccagaatgtactgtttgttctgtggggtttaggagttctacagtggttctgccccatctttctaaaaatacagtgagtagttaaaaaaaaaaaagtcaacctttgatttttaattacagataaagaggtggtggaatttatatggtttggtggtttatcaacttccagagtgctctcttcgtgaactttggaagtcagttgattcttgccttagtttgctttttatacaatttatcaaataatggagttggactgtgtaatttcttgaccctctaccaattttctgaatttgcttttaaagcaaatttaaagagaaaagttggtacaatttttcagttgcttaaaatgaaaggtatgtggcagactgttaacaggaataattgtggtgagtgtgaatctcagtctacagacccgagtgtaaagcagtattactctttgtatttaccataatgaatttaatctctgtgagcctctcctatgccagattagtgggaaaataattagcctgaactcttcttagactctcctcactctcactctcccagatcatcacaagtgagaaaagtccatttgtaaaagggcctgaaaaagggtgcacaaggagtcatttctaaactcttatgaattacacagtagttggatgtctctgttctcatggccccagttcggtctctcttactttgaaaaagtgaaaatctgaaagatttgccgtcactctgctatttgccctgccgtgtacttacccaaggcaatgccacagaacaaaactctggaaagggggaaaaggggtggggaggaaggggaaggaaaaacaggagaaaacatcaatacctcacaataataccttagccacataatcaggtcagtttaagaaactggggctcaaatggggaagaggcctttgttccttttgaaaataaaagcttacctagtgaatataaattggcaatttataacctttaacaagtgattttatttaaaaatactttttgctgtaatgtgtgagtttataaatgtagtttctccttttggcttttagttcctattattcctaattcctaaaattaggaatgtatatgcacaatttttaaaaaaaatggctaaaaaatcataaaatctttatggcaggctgggcgcggtggcccacacctataatcccagcactttgggaggcagaggcgggtggattacctgaggtcaggagtttgagaccaacctggccaacatggtgaaaccccgtctctactgaaaatacaaaaattagctgggcatggtggcacgtgcctgtaatcccagctactcgggaggctgaggcaggagaatcgcttgaacctgggaggtagaggttgcagtgagccgagatggtgccactgcactccagcctgggcaacagagcaagacttggtctaaaaaaaaaaaaattctttatagcaatcaaaagcacgaataaattaactaatatttattgaacacatagcataggccagtggagaacaaattagactggtacccgtccttgtagaacatgtaacctgtgggcaatataaacacatagactttagaataaaataaacttatattcatatccaggaatagctcataacttgttatgtgactttcagcaagttatttaatcacattttcttttctcaacaatgagaagtaaaaaatacattattcatgg

SEQ ID NO: 317774 - DNA, 4001 bp, Homo sapiens
gtagtctatgttctagtcccagtcctatggctcattagttgagaacttagaggaaagtaatttattttttttctttctttatgacattacctgacctcaaatttttttctgaccacaaagtgagacttgaaatacttttgaagatatgatacagcaactcatgatttaaggcctgtattgaaaaatatataatgtgccaaaaactaattaattgtaactaaggtgaatttttaagacttgagtggacagggaatttagaagaggtcaaatttcacaagccaactaaaggacattatatttcatcaccactgtaacttaccacaacagatcttggcattgctggcttaaacaccgaacagaattccaataaccttttctcatagtatttgcagagtgtcatttcttcatgaggctcaagaaagactggatcattcggaagaacctttagatcaacaattacaacacaagttcaatgaattcaatgaattaaacaattgtaaaacatttttctctatctagattaaatttagtttatatatccaacgaagggtatatatcacgcctcattttctttatagattcgctaatcattacacaaaatagctgtaggaaaatatttaataaactaaaactgtaccatcatttcacgacttttcggaatgtcagctagacctttgcttcattaaagtataaacaatcatgacaggctgtgtgcacatgctcacagttgtgatatcattatttataaattaaaaagtagacagactttttaaaatatgattggaaagcttccaacatccgtttctcggtcagtcattacgtcacaagttgtaaaaaaacagcaaatgtttcaataaatttctgttattttaagctacccagtttgtggtgatttttttaaggcagcccttaggaaactaattcaggtgctaaaatcagtgatatgaaatagatgtgaattaaaggtagaaagtaaagtaactcagtatcggtaatttggaggcactgaacacttgctggagtggagcttgcaggaaagattaaaccagtccgagagctgtaacagaaggaacttggctagcgggccatagtccaaaccatcttcagtcacttggtttgtacttggtctctggtctccctccctcatccaacccattcaccacgaggttgctagagcgctgtttccagaacggaaatctgataaggttagcttcccattttaaatatttcaaaggttcctcatcctttcagtggaaatgttaaacgcctcacttccacttacaagttcccttcctaccctccccagccattcctgcacaggtactcaacttcggccacatacgaccacaaacacgtccacgcaccatctctgtaacttctgacctccctcccactctgaacggtggttctgactgcctggaacttcctttcccattttctccgcattggctactgggaaaaaccttccccaacatcatctcttgacaagtgaacggctcttgccacgcactaccttagcacactacttactctcttcttcactacgttacaaagactggttacttgtctgccattcgacgacggggatggcgttgttcgtctttgtacccacggaacctggcaaggtgctcgcttattttgatagaaaaacgcactccgcgccgcagaggcagagaaacgacggagcgagattgtcctgggagccagaagagctcccgcagctgctcagaatttagtgaccgggcaactgggcaaccgttgggaaaacctcaccttcccgttggccacggctttgcatctgaatttgcggttggcgtcagcccgcagtcttgccagctgctcctcgctggagaaggtccagtgccgcttctgactactgttgtggtacattatggaatcgtgaccaggtccagagggtctgcagacgagaacccaaacgcatcagcgtcctggcgtaaaacacccgtacccccaccgaagatctcgcggaagcctagggcgtccggctagccggcgctggcgcgctgtcgtcacgattacgcggccagcccgtacgcagttgcatttccggagcggactaggaacagaccgtatcccgggttcgttagggcgcccactgagacgtaagtgggcggagcctagagaacgctcctctcggtgagtctgggacatagctccgccccttccaggcaagatttaaaggagaagcgcccggcaagagtgttcaaggggcataaactgagggtacggagtaggcagatgtaaattcacaggggataatcagaaatgaggaaaggatttcgtagggtgctcatttttaaatagaggcctcactgaagttgacatttgtgaaaaggcttgaaagagttgaaatagtaggttgatcaatcatgtagggagatcacggggcccagaaagaataggtaagatcttcaggcagaagcattcctagcccttttcaggaagagtttggagaccagtattcttgaagcactaccagaaatctcggagaatggaacatggctgaaaaacttgaagcagtggatgcgtattggcccttacagttctgccacttttgttgccttgtctgttctttctctgtgctttttttccttacccttctgttgataactagccaatcctctccctctgttttcatctctgaagccaggatgtatggtagtattcgttttattgagattcccattttcattgcctctagggagccttacagtaagctatcatgaaaattaaggtatttactattttttaaattaataggactttcaaaattgcaggtgaggttcaaaatttacatggattctggtttgtcccatttaggcataccttattctctcatgtatttattatatatccaatccgaaaaatggatttccctatggcaaatagcttttctaaaaaataaataaataaataaaaagaaagagaaagatgatgagacctagagaatttaggtcttgaaaagcccacacaggtaaaaagaagaagtggcaggatgactttaactctgctttctattaaaatgtttttaggggcttaagaaagggaaagccttttctttttcatttttgttgggtacagctgaggttagagtttgccacagttatctgaattcctcaaacttatgccatttgtggtatataattttggagagccacacactcaacatatgtggctaacctggtctcataaattggctaagaaaagagagaaaaagagaagatcaaagggcatggcaaattgattacaatgaattgtgaacaacctaaaatgttgcatgttggggaaagaataatttaaaagagaaaaacataatggtacaaaagataggaaaataagtgatctagataattaaatgtctatataaagtcttagcctcatgactgttatatatatcatataaattcttttcattttgtttttctgaaagatatttgacaactccttagttttatgtaaaggataataaaaataggcatttaaaagagttggcagactgtgatttccacagagatatgagtaaaatttctgaatgtcatttaggaaaaatatatgaaaaacctggcattgctggtgtaattttttttaaaccttgaacaaattttagtccatgaaaattgacattgatcttatttttcagatgtagtaggaattgggctctgtctaaattaactgtctgaggaatacaattgttgctgatgccctaacattaaggctcatgtatggtttttcttactaaggtaagcagactggatgctgtgacagtctcctactcagcctgttgtgcgacagtgtttctttgctattgctaccacaggaggcacactggaatgcagaacttgtgcctttacctatttccatttctagtttcaactaaaaagtagcaagtgtttctcttcacttctattatttttacttatttatttatggagaatttcaaatataaagaatacagagaaacatatttcaaaaattatcaa

SEQ ID NO: 317775 - DNA, 4001 bp, Homo sapiens
aaatacttttgaagatatgatacagcaactcatgatttaaggcctgtattgaaaaatatataatgtgccaaaaactaattaattgtaactaaggtgaatttttaagacttgagtggacagggaatttagaagaggtcaaatttcacaagccaactaaaggacattatatttcatcaccactgtaacttaccacaacagatcttggcattgctggcttaaacaccgaacagaattccaataaccttttctcatagtatttgcagagtgtcatttcttcatgaggctcaagaaagactggatcattcggaagaacctttagatcaacaattacaacacaagttcaatgaattcaatgaattaaacaattgtaaaacatttttctctatctagattaaatttagtttatatatccaacgaagggtatatatcacgcctcattttctttatagattcgctaatcattacacaaaatagctgtaggaaaatatttaataaactaaaactgtaccatcatttcacgacttttcggaatgtcagctagacctttgcttcattaaagtataaacaatcatgacaggctgtgtgcacatgctcacagttgtgatatcattatttataaattaaaaagtagacagactttttaaaatatgattggaaagcttccaacatccgtttctcggtcagtcattacgtcacaagttgtaaaaaaacagcaaatgtttcaataaatttctgttattttaagctacccagtttgtggtgatttttttaaggcagcccttaggaaactaattcaggtgctaaaatcagtgatatgaaatagatgtgaattaaaggtagaaagtaaagtaactcagtatcggtaatttggaggcactgaacacttgctggagtggagcttgcaggaaagattaaaccagtccgagagctgtaacagaaggaacttggctagcgggccatagtccaaaccatcttcagtcacttggtttgtacttggtctctggtctccctccctcatccaacccattcaccacgaggttgctagagcgctgtttccagaacggaaatctgataaggttagcttcccattttaaatatttcaaaggttcctcatcctttcagtggaaatgttaaacgcctcacttccacttacaagttcccttcctaccctccccagccattcctgcacaggtactcaacttcggccacatacgaccacaaacacgtccacgcaccatctctgtaacttctgacctccctcccactctgaacggtggttctgactgcctggaacttcctttcccattttctccgcattggctactgggaaaaaccttccccaacatcatctcttgacaagtgaacggctcttgccacgcactaccttagcacactacttactctcttcttcactacgttacaaagactggttacttgtctgccattcgacgacggggatggcgttgttcgtctttgtacccacggaacctggcaaggtgctcgcttattttgatagaaaaacgcactccgcgccgcagaggcagagaaacgacggagcgagattgtcctgggagccagaagagctcccgcagctgctcagaatttagtgaccgggcaactgggcaaccgttgggaaaacctcaccttcccgttggccacggctttgcatctgaatttgcggttggcgtcagcccgcagtcttgccagctgctcctcgctggagaaggtccagtgccgcttctgactactgttgtggtacattatggaatcgtgaccaggtccagagggtctgcagacgagaacccaaacgcatcagcgtcctggcgtaaaacacccgtacccccaccgaagatctcgcggaagcctagggcgtccggctagccggcgctggcgcgctgtcgtcacgattacgcggccagcccgtacgcagttgcatttccggagcggactaggaacagaccgtatcccgggttcgttagggcgcccactgagacgtaagtgggcggagcctagagaacgctcctctcggtgagtctgggacatagctccgccccttccaggcaagatttaaaggagaagcgcccggcaagagtgttcaaggggcataaactgagggtacggagtaggcagatgtaaattcacaggggataatcagaaatgaggaaaggatttcgtagggtgctcatttttaaatagaggcctcactgaagttgacatttgtgaaaaggcttgaaagagttgaaatagtaggttgatcaatcatgtagggagatcacggggcccagaaagaataggtaagatcttcaggcagaagcattcctagcccttttcaggaagagtttggagaccagtattcttgaagcactaccagaaatctcggagaatggaacatggctgaaaaacttgaagcagtggatgcgtattggcccttacagttctgccacttttgttgccttgtctgttctttctctgtgctttttttccttacccttctgttgataactagccaatcctctccctctgttttcatctctgaagccaggatgtatggtagtattcgttttattgagattcccattttcattgcctctagggagccttacagtaagctatcatgaaaattaaggtatttactattttttaaattaataggactttcaaaattgcaggtgaggttcaaaatttacatggattctggtttgtcccatttaggcataccttattctctcatgtatttattatatatccaatccgaaaaatggatttccctatggcaaatagcttttctaaaaaataaataaataaataaaaagaaagagaaagatgatgagacctagagaatttaggtcttgaaaagcccacacaggtaaaaagaagaagtggcaggatgactttaactctgctttctattaaaatgtttttaggggcttaagaaagggaaagccttttctttttcatttttgttgggtacagctgaggttagagtttgccacagttatctgaattcctcaaacttatgccatttgtggtatataattttggagagccacacactcaacatatgtggctaacctggtctcataaattggctaagaaaagagagaaaaagagaagatcaaagggcatggcaaattgattacaatgaattgtgaacaacctaaaatgttgcatgttggggaaagaataatttaaaagagaaaaacataatggtacaaaagataggaaaataagtgatctagataattaaatgtctatataaagtcttagcctcatgactgttatatatatcatataaattcttttcattttgtttttctgaaagatatttgacaactccttagttttatgtaaaggataataaaaataggcatttaaaagagttggcagactgtgatttccacagagatatgagtaaaatttctgaatgtcatttaggaaaaatatatgaaaaacctggcattgctggtgtaattttttttaaaccttgaacaaattttagtccatgaaaattgacattgatcttatttttcagatgtagtaggaattgggctctgtctaaattaactgtctgaggaatacaattgttgctgatgccctaacattaaggctcatgtatggtttttcttactaaggtaagcagactggatgctgtgacagtctcctactcagcctgttgtgcgacagtgtttctttgctattgctaccacaggaggcacactggaatgcagaacttgtgcctttacctatttccatttctagtttcaactaaaaagtagcaagtgtttctcttcacttctattatttttacttatttatttatggagaatttcaaatataaagaatacagagaaacatatttcaaaaattatcaatacatggccagttcccttctaccctccacccacacctccattaggtttttttcttcttcttcttcttcttttttgagacaaagtcttgctctgtcacccagactggagtgcagtggcacaatcttcgct

SEQ ID NO: 317776 - DNA, 4001 bp, Homo sapiens
tgtggacttccaaggatgcatacctcctcttcttcattaacttttgcagcgagcctcaaggaagtaattgtggcgcaatgcaggtatttctcttttacctgcagtatggaacaaacacatttgagcagaatatgaatgccagaaacaaactgaaaagcatctgtgtttgttttcttttatacacttttttgacatggagtctcactctgttgcccaggctggagtgcagtggcatgatcttggctcactgcaacctccacctcctgattttgagcgattctcctgtcacagcctcctgagtagctaggactataggggcgggccaccacacctggctaatttttgtatttttagtagagacagggtttcaccatgctggccaggatggtctccaactcctgacctcaagtgatccacaccccttggcctcccaaattgctgggattacaggcgtgagccattgcgcccagccgtttgttttaataagcttttttttcccatttttaaaaggctcaatttctccacaagacagaatgttagtgccgtttttagatctgaccaacgaagatgctcctgatttcagaactgcagatgactgggcagtattccttcatttcgggactgactggaggtgggaaatatggcaccttctcagggaacccagtctcatcctagcctcaagctgccctcgacaggtcgagacaagcacatcctacctcattacacaggaagccctttcccagctaggtcctctcacgctccccaagtccaatcctgatgactacatgaccctgagacagccagtgtaggatgtggagaggttccaacaccagctcttccactcggagcaagttagtttatacaccttggttttgagcatctggaaaccctcacctctcaagcaggaatggggagcaaaggttagtttcttctctcaccatctgccaccgtccctcagaggcctccctaccttcactgaaatcaggaggcggccaaagatggtgagggccaggttaaaagtggactgggagaagtaaaaggtgttctgaagccgcaggagccacagcacgacttcctcgaaggcgtcgcagatttcatcctgctaggaagaagagcaggtggggcgaggaaggtcgctagcggccactcctggtcccccagcagcaggagcctcctgcttaaggtgcggggggtggggcagtgagaagtcccttcctctgcatgcccgctgggagtaagcgccccccggcgcagcggctcacccatcacccccacccctcgcgcccacttttcgtcgtaggctgagttccttgattcaaacaggccctcttccgaaggccctgctagcaagacgccctcctagagagaagctggtggatccagcctcgtgcctctcgtgaggggccacacctggggaagggcccggcctccagtttcagaacacccgagcgcgggtgcaggtggaggccacatccgcctgccgtgcacgcgcgaggagggccacgcggcagcgacgggtacctggggtttgccgccccgccacaggcgcgcctcgcggtcctgggccagctgcaagtggcagagcagccggcgctcgtccaggtcgccttccaggttgcgcggcttgcgggactgtggagccggccgcggagcttgctctggggcggcggcggggaccgcgtctgcggttttcccggctggcgccgtaccgcgccggggccgcacggggactgctgcggacgccgcgtggagggaggccgctccgggctggcgggtcccagggcacctgctccggttgcttcggggcagaggggcctcccccggagacggcgggagaggaacgcccagggctgtttcctccagaccggcgccgggacgcccgcctgggctctggacggcgctgacctctgagctcgacggctgcggcgggagctgagcgcccgaggccatgtcgtgagcgggatcctgagtctgagttgccgcttaacccggcattttataacccagctcccggaacactgcagcctggggcgccgccgggggaggtggggaggcgggctcggcgggccccacccacaacgctcgcggtggagctacctctggcgcaccgggccgcgcctcgcctcctgggcactcgccccgcgggtgggcggcgcgcacccaggatgcggcaggactgggcgcgcacaggcgggtggcggaccccctcccttccctccatccccgctgctgcctagcgcacgcctcctcccccctgccggccgtgctccctgagcagagcccccagccaggggtggggcggctggagactgcgcccgccttgggccaggactcccggacacagaccctgggtcttacctcacattacacacttggggacacaagaccaggtaaagaagcagcgagagcgccctcctcagacaggcttgaaatggaattccagacgcgctgtgtgatctcatgcatgtgtcgtgacctctcagagccttggctacctcttctccgaaaaaaaaagtgataatacctccctcacaaggtgattcattcatatacatatatgtttatgtatctatacatacatatatagctataaacgtataataaggaaaatcatacaaatcatatatatgtatacacatacatacataaattttaggggtggatcttgctatgttgcccaagctggagtgcagtggctattctcaggtgtgatcgcagcacactacaacctcaaactcctggactcaagctaccctcaacctcagcttctcaagtagctgagacttacaggtgcacaccaccacacctggctcctaagttatattttgtttaaaaaattcattacattaaatgtatattaaaaatatatgggaataccagaaggacaagaaagagaggaacagaagaaatatttgaaacaataacgactgagaatgaatatttccaaattaatgccaaacaccaaaccacaattctaggaagctctgagaacattaagcaagataaatgccaagaactacacctagacattcctatttaaaccgtagaaaatcaaaagaaactatcaacagagtcagcagacaacctatagagtgggagaaaagtattagcaaagtaagcattcgacaaaggtcttaatatccagaatctgtaaggaatttaattaaacaagcaaaaaacaaccccatcaaaaaacaggcaaaaagacatgaatagacttctcaaagggagatatacaagtggtcaacaaacatgaaaaaatgctccacatcactaatcatcagagtaatgcatctcacaccaatcagaatggctactattaaaaagtcaaaaaccaacagacgctggtgaggctgcagggaaaagggaatgcttatacactgctggtggtaatgtaaattagttcagtcactgttgaaagcagtttagagatttctcaaacaacttaaaacagtactattcaacccagcagtccctttactgggtatatacgcaaaaggaaaataaattgttctaccataaagacacatacatttgcatgttcatcacagtactagtcacagtagcaaagacatggagtcaacctaggtgcccttcagtgatcgactggataaagaaaatgtggtacatatacaatatggaatactatgtagtcattaaaaagaatgaaatcatgtcctttgtagcaaacatggatgaagttggaagctattattccaagcaaatgaacacaggaacagaaaattatatactacatgctctcacttttaagcgagcattgagtacacatggacgtaaagatggcaacagtagacactggaggctaccagagcggggagggaaggaggggacaagggttggataactatggggtactgtgctcagtacctgggtgacaggatcattcataccccaaatatcagcattgcacaatataccagaatctaaaataaaagttgaaaaaagcctgcaggaaatcaagattaaaaaaaaaaaatctc

SEQ ID NO: 317777 - DNA, 4001 bp, Homo sapiens
aggaagaccttttcctccctgtattgggcgcagtagtgtccccccaaatgtcatgttaatctggaacttcagaatgtgaccttacttggaaatggagtcttttcagatgtaattaaattatgatgacatcacattggattagggtgggttctactccaatgatcgggtatccttgtaagaagagaaaacagacagacagatagcaccatgtgacagtggaggcagagactggaatgatgtacctacaagccgaggaatgccaaggatgaccaagcaccagcaaatttaagaaggaagaaggaaagatccttctctagagccttttgagagtcatggccctgctaacaccttgatctgggatcttcagcttccagagctgaaataaatttctgttgctttaagccctccagtttgtgtggtcctttgtaatggcagccctaggaaaccaatccattcactacttcacacctgttccccaagccaccccttgccaatctcagcccagggactggaggcaagacacacaggccatgcctccagcccacctggactcttccaccttcccaatgcccctcagcccttctctccttgaggggaggggtgtgcagggatcacatttcagctgctcccacccaccttctgccacaggaggcaaaccggcaggggagtttttgttttcttccctcagcctccctgttttgtagcctctttcaattatacaggtgttccttaaatttcattcggtcccattctagatatacacatagatacacgtatttggccataaccatgtattccctgtactaccacttatctttatatagagttactacttttacttaaatttgttttaaaataaactgcgacatcattattacaataaatggaaaatcgcaaacgcagagcttgctagatacatacacattcttaaattacacattagaatgaatacacaatattttttaaagaccccttcacgtacggtttaaaataacctagggtggcaatactataggaaacactgccttagaggtacagtggctgtctctgactagttggcccagagttctgagctccttatcagaaaaaccaacttcaatctctcccatctccagtctctaacccccgccccccaattccgctcagacactccgggagaaggtaaagggtaagaggaaaaaaaggcacccgggagttctgagttcccacgcaggcgacctgagaacacgaagtcgagaccgaaggagactgtacccagtcttgagagtgacaagggcagggagggactgaccttctcgcgcagggtgcagtggacgtccgaggcgacgcgcccttcccaccacggctcatccatcatcgcgtacgcagcgccgctatccgaggctacccggctctcagggcgcaccctgcgtggacacgggcaacttcagcggccagagcgtaccccgggctccgacccccggtgtccctatcctctctcgcccctggccccgggccccggcgggcgccccctcctgcgccgctcagaggagctggaggtcgcctctggtccgcggaaggctgcggtgccccctcccctctgctcgccggacacggggcgatatggagctgtgcaacaacttgcagaatttttatcttcccttttgcaaaagttgcagagaaagttgtcaactccgctagctcgctcgaggctggggctctggcggcggccacaggctcgccgtccccaactcctcccccgccgcccagcctttgtcctgctcccacatcctgccctcgagccggggcgaaactcacgcatcctctctgggcgtggggggctgcgagcgccgggcccctcccagtgccgagccagccgtgccctctggtgcctgccggcggttggaccctcgtccgaggcgctccgcactcccgacggccgcctccgcagcccgactagcccccgccgtcgccgcgcccctgcgtgcgctcgggtcccgccgcggctcgcaggctcccggccgccgggggcctccctccctcgctgggggaattgggggccgggcctcgcgcatgcgctgccggcgcccccgcgccccgcggggcggggggctgggaattggagcctttctttgccagctctggctccgcttcctgcccgccctcctccctcgcttcggcggaaagcttctctctcaccttcgctgaggctagtggtagccttctgggcacccctccggcttgcgcagggagcaaagggaccgcggcgccacctgcgcgcaccacgcgtgaaacgtgcggacaggacgcccccagaaagttctgccttccgcgcgcactgctctagccatccttacgtcggttccacctgtttttctttctctctctctttttttttttttcctgtttttgttttttgtttgttctcctcttctttgaaacccgccctgccatggggaggtagatttccaaacggacaattccagtgaaagctgcagaaaaaccacccttgttcacccacgagtccctaattctaaaggagcctaagtcactggtattattgtgctcctgcagaatatgaactatgcctcacattggaggaaaaccagtctttttttgccgggtccggtggatggaaaacattgtctttttaattcaattgcttgcttttggaaagtcatccttttgagtcagcccatctgatggcatagcattgggctatccttcttggctgattgatttttgtgatagttttggagattcacaaatttggaatcaaatccacttaccaactgggtgatttttgtcaagttcctcaaactcagagcctcgtgtgtaaaatggaaataaaagttaaaccaacctgctgaaaattaaaggagataatgcgtgtaaagggataatcactacaccaggtattaagtgaacactcagtaaacaactgtgactgaagagcctttagtttctgactgctttcctgcacataaagacacacctgggaaaaaaaaattaaatcagctttgataagcttcaattggaccttgaagagcagttttaatgtaaaacaaacgaaccattttaaaagtgtaagatacctaaaaataaactgaataaatgtgcaggctcttaatgaagacattacaaaggttgaaacataataaagaaggcttgaaggaatagaggcacaaacaccaacttaacccaaattactctatttaataaaattttaatggttgtgggtagattggaggagggggcacttaacatgttttctaaccttcaaatgggagaatatctgcgagaaaagctaagaaatttatattttaaaaatggggggatggcggggcgcggtggctcacgcctgtaatcccaacactttgggaggccaagggcaggcagatcacctgaggtcaggagtttgagaccaaactggctaacatggtgaaaccctgtttctactaaaaatacaaaaaattagccgagtgtggtggtgcacgcctgtaatcccagctacttggtaggctgaggcaggagagtcacttgcatctgggaggcggaggttgcagtgagccgagatcgtgccactgcactccagcttgggcaacaagagtgaaactccgtctcaacaaacaaacgaacaaaaaaactggggggacagacctgtattatcaaatcttaaagcatattgcaacactatagttaaaacagtgtagtgttcacacaagaatggatggattaagcatcagtggaataactgaaagtctaggaaaatttaatatatttaaaaattcactgtatgataaatgtggcatttcactttgttgggacaagtataaacggctaaattatttaataaattaggttgggggaaaaaagtaaaactaaggacttgtttaaatatcaccaaaataaatataagaactcagagaactacaaacaagcaaatcacaagaggataagaagaaaacatacacgaattatacggaggggaaggcctagatactaagacatgggaagaaacc

SEQ ID NO: 317778 - DNA, 4001 bp, Homo sapiens
aggaagaagctaatggtgggcgcacccagggtgaagtgcagcttgtgcagcacgatgcactcgaggttgcagagctgctgccgggagaaggcgccgcagcagagggccagaagctgcttcacgcgcggcgggtgcacctccacctgcaacacagggcgcactcaaccccgctttgcggcttcccgggccccaggcccaccccagtatgacgcccggactttccccatcccttccagagagacagccggggctctgcctctccactgcttccacgtaagtgacctagagcgtacttccagcgcagttgatctaactactgtccaactaaaaaaaaaaagcttgggaaattttgaaggctttttcggaggctagactagaggtgccaaaagagctatttgggactgattacagctattagtctattaggctatttctttggaagccgagtgacaggatttttcgtttgtggagaaattgtgaagttaaggctaagggatatatgcgtatgcaaatgtctgataaaatgagttctgggaacccagcactgaatcgtgcgcgctggaaagacgggcggccagggagtggcgggggagtttggctgcgtccccagatgccgcgtgtacctgtttgataccccaggtacctgtttgcaagcgatgagcaaggaggtgaccccaagcagctggaagcagtctgcagccaccggcgtggtggtgaggaagcggtccagagtgttcaccgtcaggcacagcgactcgaaggagaggccgaattggcggtgcaccgggatcagccagctgagcagcttacagcgggattccgccgtcacctgccgggaaggaggggggaggcgggcccgctgggcttagggtggagagggactgtggaagggaaggaagggccaagaagaatcggggagcttcccaggagaggggcaagaagatttcagaaagagaaacgcaatggaaactgggaaacgcgtgggccgtgctgagccggaacaccgggattgggacctggcgctgtgcagagagcgtcgtacacgttacctcgcgtaatgggctcagcaattcaaaggaaggggaggggttccattttgcagatgaagaaagaagctcaggggtgttaaataacttgcccgagttcggtaggagtccagactcaacccggaaacgaattcctctctaccgtgccccagtagccagcttgggacggggcaagtccctcaagccgtctacgccccacttttctccatctgtaaaatgaggccggtgacgcccctccacggccccttgtgcttcgactcggggcgggacctgggctgtcgcgggcccgggcgctcggagggccgagccggcaggagaggagagagcctgggaggagaggaagagcggcggcgtggagctggctctaccagcacctcacttgtggctgccgtgccagcgcctcccgcgggtggaagtggctctcctgcgccttgcggaaggcgtagcagctctggccgtagtcgcggaaggtctgtagatctagctgcgccacgggctgggccgggccgggcagggggctaccaccccgcgccgcagaggggctctctgcgccgtctgagccggagctgggggactcgaacaggtcgcaaatgccggagtctcccgggagcgggcacgggttcaggggatgcagcggctgcttcctccggaggcgcggacgcctgctcttcttcaccggggcgcgaaggttctggtcgttgtcccgcctccccgctcgggcggcggggctcgaggggctggtgggacagggggtcaccatgatgcggccgggtggccgctttactaccttcaacgcccgggctgcggcgggcagcaaacgcgcactcgaaagtgcgaaggaggccgggctcagaggctggcgcggtcctaagtacccggccggctccttctctctaccacacccccggcctctcactggctgagcccagagcggcaccggagccgcgattttccggctggagaaccactcgcctcagggcgcaggcagcgcgtcgcctccgcggcccgccggggggagggggagctgcagcgcgcgccaggcacccgcctttcgcgcctgcgtcctgcgttacctgggcaaccggagcccgggtcgctgcgggagcccgggtcactgcggagcccgggtcactgcggagcccggtgcacggagtgggagtagggctgcggcgggcgcagccaagcggctccgctgcgccggttaaaacattctcccagggggcatctctctgtccttggccagatggtctcgacacgtgcgggcacctctaacccaggtcggtaattttgtaaaggtctgatcctgagttccaaacgaaagtcgggctagaattctgtcgacacgggaaaagttttcttcagtgacccaaacaagcaatagtgttaattcggttgcgtttgtcggttttgtttcggtgggtaccggagtagccagtgcccttccttccgccagcctcggggagcagagcctcagaagggccgtttgtgctgcggaatagattggagctccaccagccagccacgctttcgcgctcaaaacaaaacggaaaactgccggatcaacctcagtcggcaagcaagtctgcaggccgtgaagactttctcccacacttttcaccccaagccaagcaagctggggctacagcggtttaagaacattgttggaaagttgcatttcgagtttgatcgaattgctcacagcctgttccgttttaggtcattagcttctggccttctgccccgccggcagcccagtccttggtttttccctgcttcctgcgtccgctccttcagggtgataaactcagggaaattaaagctggaatggggacgcccaggccgaccgggcgtggcagtttcctcaaggcgcctcgggtttagtccacagactcccgtcctggtagaagctggagcccttctgtggcctgagtgaatcttcctgagggtctctgaccctataggagaaggggctgcaggagcacaagtagcccataatcaacctcacaggcacttagcaacggcagaaagctcaggtaccctcaaccctggtgttttccagaggcgaggctactgggtgccaaaccaagagcaggttcagccacctaacctcattccagaagaaagctgataaatgtgtctgctcaaagtacaagtttctgtctatgaaaatttagtagatggtgggatggtgtctcctagagatgcaggtgaaagaaaaggaatggattttgggttctgaccactgttcctcctatttccccataactctgagcaagctctctattctgccctaaataatgtcatttgggccgggcgtggtggctcacgactgtaatcccagcactttggaaggccagggcaggtggatcacatgaggtcaggagtttgagaccagcctgaccaacatggtgaaaccccatctctactaaaaatacaaaaattagctgggggtgatagcacacacctgtaatcccagctacttgggaggctgaggcacgagaatcgagaatcgcctgaacctgggagggggaggttatagtgagccaagatcatgccactgcactccagcctgggcaacacagcaacactccgtctcaaaagaaaaataaataaataatctcatctctaacatgggagacgagctaagaaacactgggagtggtgccaggccttactgtctctcagactattgttgggaggagcaacattatgggaggagcaattgaacctgtggagaggactcagataccagacttcttcctagagaagctttctgggtgagaagaaagaatccaggaattctgattttttcatattggcccaggtggccagtgtggtaaagtgaaaagagcaggaagtcaactcctttttcctttttttttttttaaatctaattatgctttcatctattttttttttctttttgagacagagttttgctcttgtttcccaggc

SEQ ID NO: 317779 - DNA, 4001 bp, Homo sapiens
ttaagagacttaaacacccaggttactgtccaaatgagctcccacagcaaagaatgatccgacctcgaatgtcaatatgccaaacttgagaatgctgctctagaccactggctttgactctgacagcggtggccctgaccatggtaatgctctttagtagcaactgctcttcagaacaatttctcaactgctctgggcccaagtccccagttttgtaaaataaccctgtctcagagtgtgcgacttctgggcacaaatgcatgcagtttgaacaaaatggctgatgcaaaacaacctagttttagttatgttgttacaccaggtgtgtgtattggatgttattttctctgcaggtccctgttaagtggaaaataaaatggaatacataatacaattagcttgaaactttttctttctagaaaggaaacaaatactgagtgcctaccgtggatcaaccactgtgcagcccctctaagtcactccatttaatatcactgtcaagtcttcagcttgacggaggcctatcacctccccctggaaaaggaggttccgcgaggttgtgtaactagcactaagtcaaacaaagagtccataggggaactgtattgtttctaactttgcgtaagtaaacctccaagacactaagtgaacagggacacctgagagacctagtggaatggtctattatgaattcactttataacaaaccctgaaggccctctcggagtgtcccttcctctgcattttctgtcaacgtctggtgctcagatgtttcttacctgcacccctgccctggtttctttaacccctctggtcttccttattcccttcggtctatctcaagctttgctgcctgaagtgcagctctactgaaattctgctcaaaaccccctcaatggctccccttcttccccaaagataacgtcgtattttccatgttgggcattcaatagcttccaccttcgggaactattgtaagttaaagaagtcagtgctccattaaaaccggatggctcttccattctacaacgtgccatgcgcattcttgcccaagcctttacttctaccgtttcctctccctagaatgctacctctcaccccgatctaaagctgtcctccagcaccacgcttatgtgcaccctctccgtagctgtccttctcactgcacaccaccttgtattacggttatgtgcgtccgtttttcactcttcgctatttttcctcaagggtgggcaaaaaagcactcagaaatgaaataccctgttaagtgaccacacctttacgagtgacaaagaaaacggaagggccgttgcgggtggaccagcgaaaggttaagcagcagcgccttaaccgacaggtgacagagcatctccccggcgccctcccactggagcgcagtcccacgcggccgtcaggctggaggagccgggcggggaggcggtcccgctttgctcccgcgggcgaccggactgagcggccccacccagctccgaagggcgctggcggcccagcctggctggcccccacattccgagcccaggattaggcgccggcgtctcccgagctcagtaagcgggctgagcggccggagaccgcagggagacggagattctcgacctttccggggagcacatggcagagccgctcctcaactcgcgcaggcgcagagccacggcctcggccacctccccttagcccaccgcgagcaggtccctgtgccattaccttgagggcctcaagtcccataagacgggacttgcggtcctgatccttgatgatgaggaaagggcgcccatattcatcgaaggcgagggtccccatggacgccatggtgcaacaaccggaattacttccccccaaccggcggagaccgctacggaagcgagaatgcacttccctttctcgggagggcccaaaagcttgcgcacgcgcagcacaagacgcgcgggacttatgtttctactgagactaatttcacgccagacagtatcttctggaatcggcggccttcgggaacttctattatccaggaagccggggagggggaggtttgaagacacttagtggaaatcttaggacacacaagtcaagagcagattgaatttgtcattttttaaaacgttaccactgatagtttctcgatagtgggtcccaaggaggaattcattgacttaaagcactatttctttatttcttcgcactccggctccgagaagatggtaggacccatttccggtttttttttttttttttttttttttttttttttttttaaaaacgctgttggaaatctcgcgatggagggaggaggaggtgaggctggagcggcttggcgggttcctgggggcatgagaaggggtgcgggcgggccgggggctcgcggtcagctgaggtctccactgtcgaggcggtgaccgggtgcgggcggctgctctggcctccagcctggccttcggtgaccagagctcctggtcgccgcgcggtgcccgcgccggttctggcgatccttgtcggcgggcgcgtttccccagagactgttctaggctacttagtgcaagtgactcagcctttggcacgatcttaaggaatagggatagtggaggcacactgatggattggaatcgcagttctgccgctcttcctagctgtggctttgaggaaatcccttaacttctttgtccctcgggttccctgtctgcaaagtgacggtggtaacagtagtgcctactcacagggctgctgtgagattcaaggagaacggtgcctggcaagctgaacacagtgttggtaaataaattaacattttgcacaaatggttcagtaacttgccactggtatacagctagtaagaaacagttacacagcctgatgcaatgggtcccacactctttttttttttttttttttttgagacaagactgtagcccgggctggagtgcagtggcgcggtctcggctcactgcagcctccgcctcccgggttccagtgattctcgtgcctcagcctcccaggcagctgggactacaggcacagaaccaccacgctcgctaatttttgtatttttagtagagacggtgttaacgccgtagtggccaggctggtctcgaacggctgacctcaagtgatgtacccgtctaggtctccccaagtgttgggcctgagccaccgcggtgcccggcaggtctcactcttaagccctgtattatgctgcctcagaaagatcttggcaaccgcagctgtcctctaaatctcttatgctgccttcctccccgccctccaagatcatgacttaatatttgataggtttagatttatttgttgagggtttccatccttgcttctcccctactgccatgggcagggacttaactaataaagttgtattattcccagactttattaggcactcaataagtgctgaaatgaatacatgcactataacatttgaccctgtcctgaaactcaagaacagacttggcgactgtgttcccatctactctggggctgaggcaggaggatgggtggagcccaggagttcagtttacagtgcgctataatcgcgccactgcactccatcctgggcgacagagcgagattctgtctctaaaaacagggaggactgactgtcatgggatggttggtgatctgttaactcttcatgcttggcatacttacgcgctagaccttgaagtgttcttcaaggacattttagattttggagtcaggtcttatttcacgttagctttgccaattcagtgtttcctcattaaaaatggtgacttctgcaattcatttggctccttcgattgttgtgaaaaatagaatgtcctatggcatcctctgtgtagttgattccctgtcaaaacactggggagtgagagaggatttttcctaatatcaatagctcatgtatgtcaaaaggacacaaatgacattagactagtataagaaaggcttcttaaggacataagaatatatgctaaagggacataacatatgct

SEQ ID NO: 317780 - DNA, 4001 bp, Homo sapiens
tttgtatcttccaaatatcatgcaaataccttttaatccagatgccaataatctgctcagaaagccctgactgcacactcattgtttctcccatgcagccctagccaggagtcctttcctggctccttctatccccgcagttcttttcttgaggaggacagatagggtttcttagggagttaggatgaagaaagcctaagtatgatgaattccccatccagcactgtgcccagcacatagcagacatccaataaaggtctgttaaatgaatgacacggacccgttgtttaagattttaataaaggtggggcaaagggttgaattggtcgaaaagtcctcaacgtcctgacgggactcccctgaagccaaggcagtttgagtccattcattattctgtcttggatcttaggcaaagccccgggccccttggagcagcaccagggttcccgacacccccaccgacagggtcgaacgtgcacaggctgggaccacgccggagttcattgagccctcgtgggggagggcagttccagggaccaggaagggattcccgtccagtgtcaggttatccacctcgggcagctcgtcaggctgcggcgccctgttcagtctgttgcagctgagatcgagcactctgagcttggctggcagtcctttaggcacctgttccagcccagcgaacgacagattgagggagttcagggcgctggaccacatgcatctcggagcgctagggtttacggtggcgcgcagcgagttgtggctgaggtctaggctgtggggctgcacacctgccgccgccagtgcggcgcacacgcctgtgggcgtctccattcctgtgttgcgcagcgctagattctggatggccgggaacttgtggggacagagagccgccatcagtccgcgttcgcccagtccaggattgtcagacaggtctaggctggtaagggccgggaaggcgcgaacctgttcgcaggaaaaggcaggcgagtgtgcttgggcaatgctcagtaccttgaggcctggcttgagccactgctgcagctcggcgagccaagaacgccctgtcgcccacgacacgttgcgtaggcgcaagctggaaagtgcaagtcctgtggcttccagaggcagcggaggcatggtgccggttatctttaggtcctcgagcgtcagttccttgaggcgggagtacgctagcacacgcagggcgcctaccagtagctgagcaggaacctgtgcggctcccactgtgagccgccgcacgcggagagccttgaccgtgtcagcatactgccgcgggtcggcgtccgcatcgacgcgctttagaaacggctctaggttgagaccgccggcatggatctccacctctactgcagacacacactggaaggcttcggaccagtcgggctgaggttcggagaagttgcagacgcagcggaaatcttcatcgtccagctcacaaggttctggcgtggtcgcagagacgtgcaccagcggcagcagcagcagcaacaagcaggacgcgcgctcctggggagagagcagaggtctaggaggccccatccaacccctgtggctcccgagtggcacgcgttcgaccccaagaccctacactcaccatggtcgataagtcttccgaacctctgagctccggacaggctctggaagtgctttagcttctttcctacacagcggcacccgccggcttccaggcttcacacttgtgaactcttcggctgcctctgacagtttatgtaatcctgggatgtcattcagttccctcctctgtgaaccctgatcacctccccacctctcttcctccgagccagcccccttcctttcctggaaatattgcaatgaaggatgtttcagggagggggaccgtaacaggaaggattctgcagggcatctagggttctgtgtctcctggcagtgtcctgatgactcaggcgccccaggcggtgaatgccctgttgactcgggagcctaagccttctctggtgggtgtgggaaaaggatgatcctcagtgccttaggccagtaccatactctgcactatccaaccccccaatccccctaccttatatcccagagaatctacttgattcatttctttgacttcttccttgtcttggtttatgttgatctcctgccaccaaatccaagtccctgaatatcctcagatatttaactgcatgttttgtggaagagattgtgaacctcatctgttggcaccaaggggggtagaattaggttcaagaaaaggaagttggtctaaagaaaaattcccccttcctttttttttccttgctcctttgattaagtaataactttctttcttttttttttttttttttgagatagagtcttgctctgttgctcaggctggagtagagtgccatgatctcggctcactgcaacctccgcctcctgggttcaagcaattctctgcctcagcctcccgagtagctgggattacaagtgcccaccaccacacccagctaatttttgtattttttagtagagacaggttttcatcatcttggccaggctggtcttgaactcctgaccttgtgatccacccgcctcggcctcccaaagtgctgggattacaggcgtgagccactgtgcctggcagtactaactttcttaaaagtggatgtatttaacagagacacattggccaagtctctgggtcacttacactatccattttctgtcctgaaattgtgaagcaaggtattttgaatcagttttcccacttgcacgttgctctctcctgccctcccctcagtacaatctctgtgccctaggaaggaagggatgggactatgttgaatgaggattaattagtaactcaccagtttcgcaaaaaacagacaaaaacagaaaacaaaacaaaatgaaaaaaacagcaaacaaaacaaaacaaaaaaacaacaaatgtcccagagaataaggagctacgcatttacaacagccctcacaggtccacatccctagacctctggggaaagaactatatgaaagtctttttttttttttttttttttgagactgagtttggctctgttgcccaggctggagtgcagtggcgtgatcttggctcactgcaacctccgcctcccaagttcaagcaattctcttgcctcagattcctgagtagctgggattacaggagcccaccaccatgcccggctaatttttgtagttttagtagagacagagtttcactatgttgaccaggcactcctgacctcaggtgatccgcccgccttggcctctcaaagtgctgggattacaggcgagagccaccacacccggcctgaaagtcttttttacttttatttatttatttgagacggagttttgttcttgttgcccaggctgggcgcgatctcagctcactgcaatctccgcctcccaggttccagcaattctcctgcctcagcttcccgagcggctgggattacaggcatgtgccactacacccggctaattttgtatttttagtagagatggggtttctccatgttggtcaggctggtctcgaactcccgacctcaggtgattcacctgcctcggcctcccaaagtgctgggattacaggcatgagccaccgtgcccggcagaaagtcttttttaaattcccacttcctctttaattgagaaagaagtagctgcagatttgtccccaatccaaacaagaaggctcatcactgccccctgcgggtcctgttgggcataccccaatgcactgggccatgccctggtgccatgccaggcctctgtgatatccctgaggaccaagatatgattatatctgactcaaagtcagatagccagtcttggaatcccagctttacgactgaggttatgagacttgggcctcccttctgtaaaatggagatgatagtattacctgtttgtgagtaaagtctttggcacagaaacacatctttttagtgtggtcttgatgactagtcttctttctcagagtc

SEQ ID NO: 317781 - DNA, 4001 bp, Homo sapiens
taaaggtctgttaaatgaatgacacggacccgttgtttaagattttaataaaggtggggcaaagggttgaattggtcgaaaagtcctcaacgtcctgacgggactcccctgaagccaaggcagtttgagtccattcattattctgtcttggatcttaggcaaagccccgggccccttggagcagcaccagggttcccgacacccccaccgacagggtcgaacgtgcacaggctgggaccacgccggagttcattgagccctcgtgggggagggcagttccagggaccaggaagggattcccgtccagtgtcaggttatccacctcgggcagctcgtcaggctgcggcgccctgttcagtctgttgcagctgagatcgagcactctgagcttggctggcagtcctttaggcacctgttccagcccagcgaacgacagattgagggagttcagggcgctggaccacatgcatctcggagcgctagggtttacggtggcgcgcagcgagttgtggctgaggtctaggctgtggggctgcacacctgccgccgccagtgcggcgcacacgcctgtgggcgtctccattcctgtgttgcgcagcgctagattctggatggccgggaacttgtggggacagagagccgccatcagtccgcgttcgcccagtccaggattgtcagacaggtctaggctggtaagggccgggaaggcgcgaacctgttcgcaggaaaaggcaggcgagtgtgcttgggcaatgctcagtaccttgaggcctggcttgagccactgctgcagctcggcgagccaagaacgccctgtcgcccacgacacgttgcgtaggcgcaagctggaaagtgcaagtcctgtggcttccagaggcagcggaggcatggtgccggttatctttaggtcctcgagcgtcagttccttgaggcgggagtacgctagcacacgcagggcgcctaccagtagctgagcaggaacctgtgcggctcccactgtgagccgccgcacgcggagagccttgaccgtgtcagcatactgccgcgggtcggcgtccgcatcgacgcgctttagaaacggctctaggttgagaccgccggcatggatctccacctctactgcagacacacactggaaggcttcggaccagtcgggctgaggttcggagaagttgcagacgcagcggaaatcttcatcgtccagctcacaaggttctggcgtggtcgcagagacgtgcaccagcggcagcagcagcagcaacaagcaggacgcgcgctcctggggagagagcagaggtctaggaggccccatccaacccctgtggctcccgagtggcacgcgttcgaccccaagaccctacactcaccatggtcgataagtcttccgaacctctgagctccggacaggctctggaagtgctttagcttctttcctacacagcggcacccgccggcttccaggcttcacacttgtgaactcttcggctgcctctgacagtttatgtaatcctgggatgtcattcagttccctcctctgtgaaccctgatcacctccccacctctcttcctccgagccagcccccttcctttcctggaaatattgcaatgaaggatgtttcagggagggggaccgtaacaggaaggattctgcagggcatctagggttctgtgtctcctggcagtgtcctgatgactcaggcgccccaggcggtgaatgccctgttgactcgggagcctaagccttctctggtgggtgtgggaaaaggatgatcctcagtgccttaggccagtaccatactctgcactatccaaccccccaatccccctaccttatatcccagagaatctacttgattcatttctttgacttcttccttgtcttggtttatgttgatctcctgccaccaaatccaagtccctgaatatcctcagatatttaactgcatgttttgtggaagagattgtgaacctcatctgttggcaccaaggggggtagaattaggttcaagaaaaggaagttggtctaaagaaaaattcccccttcctttttttttccttgctcctttgattaagtaataactttctttcttttttttttttttttttgagatagagtcttgctctgttgctcaggctggagtagagtgccatgatctcggctcactgcaacctccgcctcctgggttcaagcaattctctgcctcagcctcccgagtagctgggattacaagtgcccaccaccacacccagctaatttttgtattttttagtagagacaggttttcatcatcttggccaggctggtcttgaactcctgaccttgtgatccacccgcctcggcctcccaaagtgctgggattacaggcgtgagccactgtgcctggcagtactaactttcttaaaagtggatgtatttaacagagacacattggccaagtctctgggtcacttacactatccattttctgtcctgaaattgtgaagcaaggtattttgaatcagttttcccacttgcacgttgctctctcctgccctcccctcagtacaatctctgtgccctaggaaggaagggatgggactatgttgaatgaggattaattagtaactcaccagtttcgcaaaaaacagacaaaaacagaaaacaaaacaaaatgaaaaaaacagcaaacaaaacaaaacaaaaaaacaacaaatgtcccagagaataaggagctacgcatttacaacagccctcacaggtccacatccctagacctctggggaaagaactatatgaaagtctttttttttttttttttttttgagactgagtttggctctgttgcccaggctggagtgcagtggcgtgatcttggctcactgcaacctccgcctcccaagttcaagcaattctcttgcctcagattcctgagtagctgggattacaggagcccaccaccatgcccggctaatttttgtagttttagtagagacagagtttcactatgttgaccaggcactcctgacctcaggtgatccgcccgccttggcctctcaaagtgctgggattacaggcgagagccaccacacccggcctgaaagtcttttttacttttatttatttatttgagacggagttttgttcttgttgcccaggctgggcgcgatctcagctcactgcaatctccgcctcccaggttccagcaattctcctgcctcagcttcccgagcggctgggattacaggcatgtgccactacacccggctaattttgtatttttagtagagatggggtttctccatgttggtcaggctggtctcgaactcccgacctcaggtgattcacctgcctcggcctcccaaagtgctgggattacaggcatgagccaccgtgcccggcagaaagtcttttttaaattcccacttcctctttaattgagaaagaagtagctgcagatttgtccccaatccaaacaagaaggctcatcactgccccctgcgggtcctgttgggcataccccaatgcactgggccatgccctggtgccatgccaggcctctgtgatatccctgaggaccaagatatgattatatctgactcaaagtcagatagccagtcttggaatcccagctttacgactgaggttatgagacttgggcctcccttctgtaaaatggagatgatagtattacctgtttgtgagtaaagtctttggcacagaaacacatctttttagtgtggtcttgatgactagtcttctttctcagagtctctgctttcagagaactcaggccactgaagtctgacacctcatcatcttaggggaggcactctgggtggggagttccaagttaagaggggcagtgatggttctgcaaagatctccaactcacagcttgattcaacaaatgtctatcatttgtctaccgagtactagggttggtagaaagccctgggacacagacatgacaaagacaagtccctgaagtgctccaggaggtgggtagagcaaacatgaaccc

SEQ ID NO: 317782 - DNA, 4001 bp, Homo sapiens
tctccttctgttatgggctgaattttctctcccccaccaccaaattcatatgttgaagtcctaacccacaggacctcagaatgtgactgtatttagagacagggcctttaaagaggtcattaagggaagctgaggtcatataggtgggccctaatccaatctgactggagtccttaaaagatgaggacatttggacaaacaagaagacaccagtgctcatgcacacaggaaaggccatgagaggacacagagagaagatggccatctgcatgccagggagcgagggtgcagaagcagcaaactctgccaacaccttgatcttaaaattccagcctccagaactgtgagacaatcaatttctcttgtttaagtcacctagtctatggtattcagggtttttttggtttgtttttgttttttggtgtatttttggtttgtttgttttaagacagagtcttgctctgtcgccaaggctggagtgcggtggcacaatcacggctcactgcaacctctgcctcccgggtttgagtgagtctcctgcctcagcctcccgagtagttgggattacaggcatgtgccaccatgcccagctaatatttgtatttttagtacagatggggttttgccatgttgcccagactggtctcgaactcccagtctcaaggcatacacccaccttggcctcccaaagtgctgggattataggcgtgagccaccacgcctggcccagtctgtggcatttgttatgacagcccaagcaaagcaacacacaccttcccagccttcatttctcattggcatgatgcctcctcttggcctgctgctgattccatcctaatgccagaccaacaaggctctgctcacccagctctgagccttaccccagtgctggctttgctctgctcttcctgatcctctgatctccttctagtcctgccccagggcaactccacatctggctattcctggctcttactcttctttttacctcaacccagaccagcagctcaccaagccaccaagactcatggttcctcctgtatgcagcccttgtctgacaggccacgtggtattgatcacttgtggggtcagagaaagtgggaggaagtttgaagcattttagaggatggcaagagacggaggcccttctcctttttctctcattatcccctccaagaacttcccacaggttgataaatattgctatggtccaaaacagaaggtgcaatttggctctattctcagattttcctcctatgggttagtaaaacagatggaaggctgtccaagtccaagagagagccagactcattcagagtgatcttttcaatgctcgaaaacctggcacagcgctgtctttactaattctcaccctgagaggagaccaaaggactcattgggatagaggccatgtgagagtggggatgttaaaccaacagctcccctaggttgaggcaggtttaggggtctgctttgtgcacacagaccctattaatatcttatgacccacttgggattatttgggtggaattgtttgaagaggagaaaaattctctttgcttcctattaagatgccaccagatgatcccctggcagagttctttggctcctttctcacaataatgaaaaaattatatatacaccttatttcctttttaaagacactagatattgggatgccaaggctcagattggactgcgtgctaaatctcaaaattttcagacagtttaatctgcataaagacaaacagtttggactcacctcaatgcacatctgatcccaggaggtgatgactttacagccggcagaaaacagcaccacccaaaagaagcagctgacgtcaaacgccatcacaggctaggattgcttggtgggtttacctaatgcttggagctgagaaatggaatcaaactgtgaaggccctggcaatttggcagccagagaggtactcagaagggtgatcttggaacaagaaatgctgttgactgctcagcattctgtggctctgtgctggaaaaaaaaaaaaaaaaaaaaaaggaagtcccttttgcataccacccatctttgccaaaaataactgaggacccaaccccagaatggcccgttgcatttcctggcactgaacatgaatcagttgtgcagtccttttgggctgatcacacagactctcattgtgatggttccaattgactttatgccaacttcaagcatttggccaactccaacagcttctggtccttttccccgagagaggctgtggaagctctactcaccaaggaggccactttcttagttgtcctaggtgagtgaatagaagaggtgtcagagaacatggaagggcagagcactctgcaggggcagactgaagaactgagcccttcagtggcacctgctgagctgggaactggagcaggagggagcaggcttgagagtgtatctgctccttgagcctcagctgctgccttggccaccttgtccatccccacctctggtcttcgtatagggggaagattacttcatctcttgacctggcggttcaggcttgttaaagcagttggggtggactctcttgttccctcctaacctggcctggggaagtaggggacactgccatagatagagcagcctggctaaaggagagtagagttagggatgccagccttggctctatttcttcttagaaatagctttgaagcaggattacaattacccttattatggagcaagatgtggcaatgattaaagaaagccaaagttcaaacattcctcaataggctgcatttagctacctgttctgtctgttcttcaaccctctggcatacaggatatatttggtgttactgttctcccactccatttccaagagcccagttcttagtatcagagttcacaatgacttaactactgctactactactactaccaccaccaccaccaccaccacctctacagtattactatgatgaatcaaatgactatagtatctgccatttattgagtccttactatgtgtcagacactgggtcaggtttaatgcagttttttgctgcattttcctatcctcgaatatttccatatattctataagagagatattattatttccctcattttatagatgtagaaactgatgcttaagagaaattaaatgatctctccaagccacacaattagagagtggtagattagggcttcagatccagaaaatctcactgcagagactatgctgctactcttcacagtttaagaaaggactttgcctcctgaaggagctgaagagtagatggggcgaagaatgttgttcatctggagatttcagaaaagatgctaaaaagcagaggggattggaggaaatatgtacttggcagtctgctaggcctgctacacatatttgggcttttcctggtcacccttaaaatgccatcttcatcaacaaaatcatctctgaagatgctatcagcaagacacagtctaagcaaacccagaccaatgacggaccaccttgcttcaaataagacatccatcagtgtatattaggaagagctgagaactgggaagagtctagtggtagaccgcagatccttgcttaccaactgagtgaccttgggcaagtcatttcacttctctaagtccgttttcccatctgaaaaacaagaattataattcctcttctgcctacatcacagagtaattatgaggatcaaataggatcatgtatgtgaaaatgcttttcttatcttaaagtcccacataaatatgcagaatgtgaggcaaagactgagtaacgaattccaatgtcgtgtaaatatcactctcaggaaattgtctcctgccccagagatgttgaaaggcatattactttccttcttaaagaaaggtctgatggctcagttaaggccatcagattttgtcattttcttaagctatatcatttgcatatgatttacatgtgtttgcataatgaattcaaaagactcactgcaagtatataagagtaaaa

SEQ ID NO: 317783 - DNA, 4001 bp, Homo sapiens
gggtctcacctccccttcccacaaaatgcacctctgaaagggggccaaatggtggagtgagctaacactttgatgtcagactagtcctggttcaaattctgcctccaaccactcactagctatgattacttgggtaagtcacttaccaatatgacctcaatttcctcttctgtaaaaagggacaacaaaagtacctgattcatagggtgactgtaagaattaaaattgagtttagcctttacgtatgtaaataatcacagtactaactaacagtggctgaggcctggtgacaggtacacagtggatgagaactattatggctattatattattactgagactcagggagaggcagtgatttatccaaggtcacgcgtggcctagacctgaatccattcctcacaaaacagtctccctccttgccatgggattccctggggttttcacaggccacagctctaatggtctgcagcaggttaccttgttccccagaacatagcttgtcataacatctctgcagggttctcccaaacccctttctgcctggcaacagctgacatcacacctagctgtaagtccctgtagatcgcaaattactttttggagactgggggtagcaggggcattggggtaatagccttctagccctttttgagggaaacacatgggtgaggctattttggggctgggaagtgggggcctggtgtcccctggatggctgtgctggcctctggctgcaagggagaggggcacaggcaaggacatgacccccgtcaaccctgagccccctccagaaatttaaccagagcctgtccctcctttcttgcctgcccccaacatctcacaatccctcctgtgatggcagatgtctccatctactctacagacacctgcaactatcattcccttgatccgtggtaattaggagggaactcctctgtgaagaactgcttctaccatcctcttttagaaactctttctccactgggatcttgaacattttcaaaatctggtgcaaggtctttatttatttatttattttttttgagacagagtgtcactgtgtcacccagggtggggtacagttgcacaatcttggctcactgcaacctctgcctcccaggttgaagtgattctcatgtctcaacctcccaagtaggtgggattacaggtgtacaccaccacatctggctaatttttgtatttttagtagagatggggtttcaacatgttggccaggctggtctcgaactcctggcctcagctgatctgcccgcctcagcctcccaaagtgctgggattacaggcgggagccaccaggcacagcctgttccaaggcctttaacctagcattcacagcccagctttagtgggatctcaaagcccctgcatagcatgtgaaactctagggagagaacccatgctctcttctgcttttcagaaggaggcggtgtgatgcaaggaaagttacaaactcctgctcttaaaggaaccccctcatttgacaagagagggagccggagcccagagcaggccaaagacttgctcaaaatcacccaaaaagtcaatgttagagtcagagcctgaatccctctttcctgtgactcctggccggtgcttcttcccagcacatgcgcacggctctgcagtccaggatcggtgtgccctttcctggtgctcacacatacctctccggggccccagggcgccggcccagcatgggcagttgctcattgttggagataaggtcgcgctggtcatccatgactggcttctgatcttcccgacagctcctgcttctcctcctgtgcatctgggaccctgaccccccggctcgcctcttaaagtcggtgctggagaggaatctgattcgtccacagaaggccactccgcccacttggtagatgtggaagtgaaagctacaaaggctggaaataccccactttggtgaagctgccttttgcggggcaggatgtggggcgggggggctccccaggcaggtagaaaggccagcacgatcccattggctgcccagggccctcatcacttgtttctgggcaggcctttggattcataaggctctttgaatgtttcaagaaacaggcaaatgtccactccctagacaggaaagcactttgaaacagaagacacctttgtttgtctccccttctcatccacagatgagtgggtgcagaaaggggctgtgcacccttggtgagctcagacaagtcctcttctctggcctccgttatgtcgtctcaaacacgcaggaggaagtttggacgacgtgcaggggtgaaaacatttcttttctttccctgtttaggttcttagttgacacgctcccctggaaacaaaagtcaacttaacaaaagaaaaatcagccaaagttgattaacacatgctgtacccattatgcagtagaggcctcagttgagaagtatttctctctcaaggcagtggcttaggggccttgcttaaatagtattttaacaaagagccgtaagtcccatagagtgacaggacagagaagaggatatcttcagggttccaaagggctggaaatgtgggaaggtgaatgtatgggaacagtcaagtctgatccaggatcctctgagctctgcttctgagctgatcaagacagagagaaggggcagagggtgcccctgggttttaaccttttacctttaactaaaatccgcaggtttttagagaggaatattttgatttccttcaaacctaagagtccatggttttaaggctctggcactcagacttgcctccacttaccaagctctccttcgtgccaggcacgttgtccatgctttgtttcctgtgatctttacggaggccctttgaggagtgttttatcatctccatttacagatagggacacaggggctcttgtccaggatcacacctccagaaagtagtagcgcctgcatttttaaccactccacccctctgcctccttgtgtggttcagatccaggagaatgggggcctgtgctgggagggaagaggacagcctgggaaagggtgcctgggaggatgggactgtgttggcaaggctcctgtgctgtgacatagtgaaaaacgtctctggtctctgtccctggttcctgacacaaggaccactaagaaccaaagagtctccagagtaagcctgggtgtggtggctcagacctgtaattccagcactttgggaggctgaggcgggaggatcagttgaggtcaggagttcgagacttgcctggccaacatggtgaaaccctgtctctacaaaaaatttaaaaattagccaggcatggtggcacacacttgtaatcccagctacttgggagtctgaggcaggggaattgcttgaacccaggaggcagaggctgcagtgagccaagaacgcaccactgcactccagcctgggtgacagagcaagactctgtctaaaaaaaaaaaaacaagaaaaaaaagaaaaaaagaccaggcacggtggctcacgcttgtaatcccagcactttgggaggtcgaggtgggtgtatcatgaggtcaggagtttgagacaagcctgaccaacatagtgaaaccccgctactaaaaacacaaaaattagccggacatgttgacgtgtgcctgtaatcgcagctactcgagaggctgaggcaggaaaatcgcttgaaccctggaggcggaggtgcgagatcgcaccactgcacttcagcctgggcaacagagtgagactccatctcaaaaaaaaaagtatctccagagtgagaagaatgtctttttttatatattcaggaaatgctggtggctgaaagcccctagagagcttcagatggaggctgggtgccatgtgaggagagggtcgggactttcagacctcacccccacccgccccaccccgacttccagagaggagagaggggttggaggttgagttcaatcagtgatttaaccaaccatgtctacataatggaacttgcataaaaatcccaaacaact

SEQ ID NO: 317784 - DNA, 4001 bp, Homo sapiens
gtggtgctgcctgtaatcccagctactcaggaggctgagacatgagaatcacttgaacccgggagctggagtttgcagtgagccgagattgcaccactgcactccaacctgggcaacaaagtgagactctgtctcaaaaaaataaataaaaagttacttaactatagcttttcaaatcacttctgtttactgatccaaagactacttgtctgtattagacagtaaaatatctaggagtcgtgataatacataagctgtgcacgacacaaaactgcagcagtgtttgggggaaaaaatcaacattaaagtatttaagaaatgtaagggcttaaatgcaattagttttctcctactagaaatgacattagtaatcgagttctgaaaatgcaattatgtattcaatataggatgttaccacttgaatactgaatttttttttttaagaggcagggtctggctctgtcctccaggctggagtgcagttgtgcaatcatagctcactgcagccttgaacgcctgggctcaagcaatcctcctgcctcaggctcccaagtagctgggactacaggcacatgtcatcatgcccagctaatttttgcagtttttttataaagacaaggtctccctgtgttgtccaggctggtcttgaagtcttggcctcaagtgatcctcctgcctcagcatcccaaagtgccgggattacaggcatgagccacagtgcctagttgcaaaatttatataagatctagaaaaatctattaaaatggtggtggatttggaactagaatctctgcgtacaggtcaaaggaagatgaactattgagcctagagagaagcatggtaaatggtgacagagatttaaagcagatgaaggctctttatgaaacacgtttataaaaccatttaaatttgtttccttttacactgattacaggagacactaaagacctttgggtttggtctttcaaggagaacaggtactacattggatcaactttaaattgctcacgttaagaaccatggtttatgccacttctccacattgtccacaagatggcaccatttccatttctttggggggcgtgcttctgaatgcaacagagaggagtgcaactagcaactgttaaaatcattaacagccgctagcaatacactgcctacctgacacatcccagctttatcctttgctgtggaggcagaaactagaaagtacgattcagatgcaaacgattgcattatttgtctgggatcttcagtttcataaagaaattttttttagtatgtaataagatactaaaattctcatattttcagaccagctcaaacttcctacaaatacattatttaccaagaattcgtttgttcaagatcagaattaaaacagagaacaagaacaagccctggactcacgttggcggaatcttgacttctcttctgcttcaagtctttggagagcacacgcatgatactttcctttgaaaacacagataacatattgagggagaaactatttaggaaaatcataatttcaggtgtggaatttttctagatcttgtgcttgtcagattacacttttttttttttttttttttttttttggcaactaggcaccttcagaatataactaaattacatcactcaaatttacgaccagggcttagagtttcgtaccacctcttggtcctaaacagatattatgaacggggccttcggccccgcattagagagttagggagaatgcagaaaagggtgttactcacccacagcatctcctcttccgtgcggaccctccgaggcgcggtgcgctccagtttccactccatctccggctgacttcgccctgcctggcgtttggcctctctgctcgactgcctctggttttcttcccaggtctaagtcagtcttgacgcctaatcgtcaaacccctggagtcccgtcccccaggaccattctatttcaccacctccctccaggtcccccactcctcccaccgccgctgcaaggtgttccccagggtaccatttaaaaagccggcggggcggcagtcggcgcgggaatccccctcgccggcttcttattggccggcgccgcggtgtcgtcagagcccgggtgggattccccggcgcgcgccgcggccccgcccctgccggccctctctgggccccgccccgccaccgcctccggccgaggcgcgcacccgggcgccaagctttgccgcgagccgtggcgggcctgcggctgggcctggcgccgggggctgccaccgcggcaggaggcggaggggttggcgggcgaagaagcgggttctgggagttcacgatctttccattttcagaaacaagaatgtttccttataacggccctgatccctgttcctctgcacccacttctctttctccaaccacaccctgcctttgcaggatccgagcgtgcacagctctccggcctctgtccgttggtaatcgctgtgtcagctatagatgtgaggcgtgttcgtcagctcttcgttttcagaaggcaagaaaacgtggcaagatttctatgccgatcaaaagggagagcgttgacatatttatgcaataaattattccctgctctatacattgggagtagtcaggtcctctcactcgggcttctgagccctgttccttagcagggggtaggtgagagaggtgaagaggtagtgaaagaaccagtgacaggcaggacctcataaggcgtgaagagggggccagaaagctgagcacactggggactccgtgataaagggggagaggaagatattgagggttgaggaagaggtctggcgggaaatgacagggaaccagatgggctgtgcagccttagctgcccatctgagctgccaagagagccgagttgtgccatatggcaggaggggacactgcatctgggaagcctctgacagcctggcagcctgtttgtccctcccttgctaaccccccaaccatttttgacattggattgtattttgctctaaggcaatgtgagtttgtgtgtttttctggggaaacagttcatagatagcagatactcaaaagggtcagtgatccaaaaaaaaaaaaaaaaaaaaacctaaaactcactcccctgctttccttcatactgaaagcaagaaaaaatggcattagaactaagacccaatcttagaccagttttctatgtacaataataatgctgcatagggtaacttaatcttcaaatgacatatatcaaaatgtttgatagtcaaataactagtggattaaaagatctctaagtttcacccacaagaagtctattttccttgcagtggagtactcattccaaattccagtaaatctttcagcaaacattaagactaaataaaagtaaactattattggatgagagtcagatgcattgttaatttaaatgatcagttttgcaaatgccaactaaaactcaaagtatattggaaataatatgaaggacatattatctttgttctatttttaaatatagtttacatttaaccattttgtataaacacagaataaaagcaattcaactaataagctcataaatccatgtaaattgggatttttagaatccaatttcttacaagtactaagaatagtgaatcattcatttagaatgcaattatctgtaaaaatacatttataaattccattatagccattaattccacagcatacatatacacagcctccaaatgtctttttttcccctagtgtgaagtagagaaagtattagtcaaatatctttaggaagtaattatgcagttgaatattcagattaaaacttaacttcagaatgatggaaacagaaactcgccacttggcaaatattacagtaataactgtcaagaatactaaaattaccttgcatatgatgagaatacttccccctataattaaacacaaaaaataaaatcacaacttttcactggccaaaactggcagagaccaccttaaccaagtgatcaaagttaacatcaccat

SEQ ID NO: 317785 - DNA, 4001 bp, Homo sapiens
cagacaccagggactccaagagtggggaaggaggaaagcaaagggtgaaaactatctggccaggtcccagcactttgagaggccaaggtaggtggatcacctgaagtcaggagttccagaccagcctggtaaacagggtgaaaccctgtccctactaaaaatacaaaaagttacccaggcgtggtgacgggtgcctgtaatccgagctactcgggaggttgaggcaggagaattgcttgaacccgggaggcagaggttgcagtgagccatcatgccattgcactccagcctgggcaacaagagcaagactccgtctcaaaaaaaaaaaaaagtaaaataaaataaaactgtctatcaggtattatgttcactatttggatgatgggttcaactgaagcccaacctcagaatcacacaatatatccatgtagcaaatctgcacaagtaacccctgaatctaaaatttaaacaacaaaaacaattatttatcctattcaggaccaacgatgggcctaggcattatgaaagtgggcacaagagtaaaagctaatgagacaaatataaactgcattgactcaaaaaatttacctaagagtataccgtatgctttacccttattgctttatttaatcttcttgaaaatgcagcaattattaacattatctatagatgagaaggctgtcacttagaaatcatttgcccacattggtgctgctaataaagaacttgaccgaaatatagatgcaagcaccaggcacacttctaagcggtctatattattatctcattgacttctctcaatatccccattgagtagatactattactatcgtcactgcacagatgaggaaactggctcagaaggttaagttgccaaaggtcatttgaacccagagtcgtctcaatccagcacccaaacttaaccattatttgctatgctgatcagacaacagtgtaggtattgtaaaaactttatttatttattatttattttgagacagtgtcccgctctgccctcgggctggagtgcaatggcgcgatctcagctcactgcaaccttcgcctcccgggtttaagcgattctcctgtctcagcctcccgagtaactgggattacaggcgcgcgccaccatgtccggctaattttgtatttttactagagacggggtttcaccgtgttggccaagctggtctcgaactcctaacctcgtgatccgcccacctcggcctcctaaagtgttgggattacaggcgtgagccaccgcgccagaccaaaacttttgattcttctcatccttttgggtatttattatgagatatccttataataattccttataataatatttactattatgaggcactcttatgtctaggtttggctataagccctaaaaggctgaaatcataagcagtaattgtttactaattctccccagctttaaataagagcaccaccaagtctttcaaagctcaagaaaactaaatggataaaatcatttaaaacactcagctctttgaatgcctgaattccctctacaaacatttctgctaagcagtttgctctcctccagtgacagggcactcagtggctcttgaggcacacccctgggttgatggggagcgctcactgtaaacatgtccttacctctgtaataggcggaggcggttgcagctcggccagaggcaatgcagggagagagaaagccaactccgccgacctggaacacccacacaaactagatcagctcgacaagccccccaaggccaaggatccaagccccgtcccttcccactccaacatctcaccatttgctactgtgtagtaggccccgctcccgggtaaggcccgcaataagcagcagttgctttttaatttcccgcaaatctgagaaatcgctgtttatggacaggacaggcgccactgccgccgtcacagccaccgggaccatggaggtactcgcagccattttcccgactcgggccactccagccaatcatcggcgataatactggctgcccatctgcaccaaaaatatctgcctgtcattggccggctcttgctccggaaaaaccaatcataggtcttatttctgaaacgtcacgaagaggcgggggaaaagaaacaactacatccccaaatggccaagagctactgaggcgggaaaattagaaaataggcggggcgagggagaagccacgacctctgggcggggcggggaagaggggaatgagtgactgggaaaagtaaactgggaagctaggggtgggagtaggggcaagaaagggtggagaagggagagtgcctttcacgggtgatgtgattggatgaaaaatagaaagggtgtagtttcagggccgactctgtaccagataatgacaaagtgatgtatatgctaggaaagatgcatggtagcctctggattcttccttaaaataggaggatgtatcgccccatgtggaggatttttcctctttgtctaccctttcttaccccgggtagcccggggaggtgggggtgagagcattgttctgtaacatttatttaacaataattgttaacatttcacatttattgagggtttatcctacaacaggttctgctcttttacaactataatctggtttaatcctaaaaacagcactatgatattcgtatcatcccaattttatagaaagaaaaacggaagctcggccaggcgcggtggctcaagcctgtaatccaacactgtgggaggccgaggcgggcggatcacgaggtcaggagatcgagaccatcctggccaacacggtgaaaccccgtctctactaaaaatacataaaaattagccgggcgtggtggcacgtgtctgtagtcccagctactcggcaggctgaggcaggagaatcgcttgaacctgggaggcggaggttgcaatgagccgagatcgtgccattgcactccagcctgggcgacagagcgagactccgtcaaaaaaaaaaaaaaaaaaaaacaaaaccagaaaagaaaaaaaagaaaaaacggaagctcagagaagttctatcactcttccaaggagagagtctagactataaaccagattttactccaaagcccaatgttcttaaacattacatgaacattttcggcgttttttggtttttatcctttcatagtagtatactatcttaccaacccctcgggaattttttttgaaaccattttgtcattcactgggtgttatatagaagttatctatttttaaattgttattttattattttatttattttaagaaagggtctcggccgggcgcggtggctcacgccggtaatcccagcactttgcgaggcgaaggcgggcggatcacgaggtcaggagatcaagaccatcttggctaacacggtgaaacccctgtctctactaaaaatacaaaaaaaaaaaaaattagccgggcgtggtggcaggcacctgtagtcccagctactctggaagctgagacagaatggcgtgaacctgggaggcggagcttgcagtgagcagagatcgcgccactgcactccagcctgggcgacagaacgagactctgtctcaaaaaaaaaaaaaagaaagaaggtctcgttctgtcatccaggctggagtggccgcggcccgatcaaggctcactgcatcctcaaactcctgggctccagtgatcctgccgcctcagcctcccaagtagctgggaccacaggtgtgtgtcacgacacccagctaattttttttttttttgtaattttcgtagggacagaatctccctatgttgcccaggctggtctcaaactcctgggcttaaatgatcctctcgccttgccctcccaaagttctgggattacaagcataagccaccatgcccagcccattttaccctttaaaaaaatcaatttgcgggcctatattcccagtgctttgggaggctgaggcgggaagatcatttgagcccagctgttgaagaccagcctgggcaacataccaagacctcc

SEQ ID NO: 317786 - DNA, 4001 bp, Homo sapiens
ctgccaccacgcccagctaatttttgtatttgtagtagagatggggcttcaccatgtcagccaggctggtcttaaactcctaacctcaggtgatccacccacctcggccttccaaagtgctgggattacaggtgtgagccacaacgcctggccaagcctgttcatttgaaacaccccttaatgactatcagatcatctgaacagtgtccaaataaatctaattgcttttgggaaatatatcagactgggctgagaaaaatctcccactaccataatctgtactttattttctccttaccaacatactgaaacagataatttttttttttttaaatgaggcccagagtttattggccgagggggatcttgactccacattcccggtcctgagcactatgaacacaggcttgatttctccctggggtccctagtttttctcaggtactacttctctttgctagttgagacatggtatgatcagaattcaaagtacaactgcaataacactaatattaatactaataaagtgaccgactcgtaatgcagcggttttcaaagacttttcccagttatcacatcatttgattctcacaagatcctagtaagataggaagcgattattatttctttgtcttttcttttctttttgagatagagtctcactctgtttcccaggctgaagtgcagtgaggcgatcttggctaactgcagcctccacctcccgggctcaagcaatcctcccacctcagcctcccgagttgctgggactataggtgcacaccaccacactcagctaacttttaatattttttgtagagacggcgtcttgccatgttgcccaggctggtcttgaactcctagactcaggcgatccgccctccttggcctcccaaagtgcggagattacaggcatgagccacctcgcctggctgagattatttcttgtcacagaaaagaaggtgagactcaaaagggttacacagtcaagggcagagttgagacttaaagcctgacctttgagccgggataattgaaaacaaaccaacaaacaaacccaactgtttggaaatagcaaaggcaatacagtgtaaaaataaaagtatatttacccagacaaaatgcttaggtttgcagaatcaccaagaaatttgcccactggagttctagggacatctggacagacggtaaaggaagtgtctctctccaggagcaggtttaacattttcctttgattagacctaaaactgggtcctgagccagagcttccttcctctcttgtggatgagaagagttccgtagacatggtcttcgaattctcaccaggagaaaaacaaaacctagctaggaggaaaacgtcatctaaatcggtacatcacagttccctcagctttcctaaactcctccaccctttccagccaggcgaatcaacactggaagaggggcaaccccgaagggtgattcacagcctggcttaaggttagaacctgaattcaccgacgagaggcaaccttaggaccttaaagatggaatgaagagaggattttgacttgttccacgccacacagctcgagactcctgactagaaagaacccgggtctcgtaactcgcgatagtccccattcggccctcccaacctctgtctgtgggggcccgactggaccctaagggggacaatggggtctccgtgattccgtggcggagacggctgcggacttacctcaagcctggagtctgaggcttgcctacaagaggagagaaagtagatagggatcggacacaggcgaagacttgagcagaatgaaaggaaatctaggggaaaggaggtagttaactagattgcagctctgccttccgactgggtaggccaacgtcggactcagagtcttccctgagcagaaggccaaagttacggcctctgagcaagaatatcaacagccgcaggcgttgaccattcaaaccttccgccagcccagtaacctatccccgctcgcctctaagctgcgtcagccaatctccgcgcgcgcgcccagggcctcatggcctatcgttgggctcgcagatcacctgggggcgtgtgcttgctctggaaatggtaagacttgccccgccccatagccagagcaggatagtgtttggcccaccagcgttaggcaggctgcggggtaagctccgcctcacggggagcctggcgcatcattggctctccctctcaccaatctccacaccctttctgttttcctcgttccctcagccccacgaaccccgggagatttaaaccgcgccttactagtgatgtccattcactagggtaatactaggagagattattttgggtggagggtgttgtaagcgtttcattttcttcgcttctttctcgtgccgttttcgcggacgttttcttctaagttttgctggccttccacgggagatggagcgtttgctgccggcgtggcaagtgttggggcgagacgggtgtgtgtgtttatgctgagaggcattagccccttccaagagctttgtttggtgtttcttttagtgtgcagcatctcagagactctagctcacgtgggtaaaaagaaattccgttgcagggaaagtggaggaattaaatcatcttggtataatccttatcgcaatccagaggacctcaaagattggttattaatgaaaatttgaacattgacgaggtgatatttataaattattggccggacgcgttggcccacacctgtaatcccagcactttgggaggccgaggcgggcagattacatgaggtcaggggttcaaaaccagcctggccaacatgatgaaaccccgtctctactaaaaatacaaaatttagccggttgtggtggcacacacctgtaatcccagctacttgggaggctgaggcatgagaactgcttgaactcgggagacagaggttgcgccactgcactccagcctgggcattagagtgaaacaaacaaaaagacattcctaatgttagggatttgcttttaaataatcctgtgctgggggaaggtattgatgatacaagattgaccctgactgttgagtgatgggggcaggagggtccatcatatctgtgcttctcaaggtttaatttgcacactaaccacctgaggacctgctaaatgcagattctgattcgggatgtctgggttgcggttgcggcccaagattctgcccttctaacaagcccccagctgatggtgaggtagctggtcctacgaccatactttgcgtggtaaggtattaccccatacttcttacttcaatgtatatttgaaaatttccataataaaaatgttcaaaataaccttggaagctctttaagatgtaggctccaaaaacgataattcgataggtctaaagtggggtcattatcaaggcccccaggtgctacccatgcagacggcttgcagatcatgctttgagaaacaaaagtcaaaatgcaacttgtgtctgttgtcaggatcttggtggtggtagtggctgagaggcacagtgtagccagctggtttttatcctaatacccttttcatctgcagaacctgcttccccagaaaggagatgtgtgaagattctttgtcctctaggatacagacagtgagtgtaggagttagcacagaaccttgctatgccaggtgagtttgaaaatcaggctggggattaagggagtgtgggatgagttgttatctgctttgacgactacagtataatcacactttgtgggaaattgtatacttccctgcaggtgggaagtagagacaaagttattctctattggtggcaaaagcagatagattatggcaagtgcacacctggctaccagtgctttctgcaccaggtcctcaagtaagtgcagttgtgggtggtcacaacaaaggtgtcagccaagtggctttagttcaatgtcaggtgatggaaatatactaaaatctgagcactctgacaaagttgcagcattcctaaaacaaattctccaaaaatctag

SEQ ID NO: 317787 - DNA, 4001 bp, Homo sapiens
ctcctgacctcaggtgatccgtctgcctcagcctcccaaagtgctaggattacaggtgtgagacaccacgccaatcccagcactttgtgaggccaagatgggaagattgtttgaggccaggagtttgagactaccctgggcaacatagcaagacgcctctctctacaaaaatagaaataaatatgctgggcatggtggcacacccctgtagttctagctattcaggaggctgagatggaaaggattgcttgagcccagaagttcaaggctgcagtgagctgtgatcgcctcagtgcactccagcctgagcaacagcaagaccctgtttttacaaaaaaaaaaaaatgtagcatggtgtctggtacataagagcaattattggaaaccatgtgtcccctacttcatggcccctaactctgctccttttgccaaggggaaataagcagtgcaaggtaaatctttccacccctattttctcagttagtactgtacctcatttttcctctactctttttcagtttgtagacttggtggctcctgcctcctcccctccctggctcagtgaggacgacccccgccactggctctactttccagctgatcacagctatttacctgtcccagtcttgagtaaggcacaaaatatttacagaaaacagatgtctttcagaggacttgctgctaagtgtaatagtgaagattacttgcattactgctactttccaatcaattaaaaaaaagaaatagaaaactttgtattacaaagagatcacaacacgaacgcattgtttaaagcctctcctttatccacttttttgcttgtctccctaaaccatctgtgatgctagctgagactcgaatttacataagagccagaaaccatcaacccaacctcttcacacactaacgtctacattcaatctctttaaaaaagacttaaattttggctcatgtgggaggtggtggtagtggtggagacttaataaaaggtggttttgtcttcctgaagtggaaatatagcgccgtcaacatcttttccccatctgcctgtttcctccttccctttctgtttaaggaaagtctaaccaccgcacttctccccacctccccgcacctccccccaggcaaacgcaagcaactgaaccgcctatgatgtcataatcacaatcccattacctcatcctgctgggggggagggggcggagagagaagagagggagtgaacagccctgggctatcctgagctttacaaagtgttctgggtgagggcaaattacagaaccaagtggaaacgtccccgcaaccattataagtcctgggtttttaaggttcaggccgatccggcagctgcaagaggggctcctgggactccgagcaggccctaatccgcgcttggaccacacttcccagcagccttcacgccgcggacgggtcctttgctgggggaagggggattccttcgaagaggtggtcgtggagggcggggcagcagagcaggtgaggggcactgtggctaattgcgtgacgcggcccgaaccgagtgggaggctgcagttgggccgttggagggagggagggcaggggcgatgcctttgtttaccttcttccgacatggcctcccccgcgggtttcaagatgtgcctccaactggggccgtccactttctgcgatattttggagggggtgactcgttagtgaggaaaccacccccatccctaaatcaaagcgccaggctcgttcccaacagcgctgtccgagagacactttgagagagacacgacacggagctgcgccctccatgggtggcttggggggattctgcgagccggagctgtccccctactctcctcagggactcgttggttcgcgccagcgccttttaagggcaccgtggggcgaaccgagcgctcagagctgctccggccgcggccctgggagctggaggaaccgcggtaggtggtggagggcaggtggcgctggggcctcggggcgggcacctcaaccgtccctccctccttccctctttcccctcccccagcccgaccgcccgcgcggccgggcctcgctggccgcctctgcggggagagcacgggacccggtgggggagggggtggcggagtgctaagtcccagaccctccccatcccctgcgtcctgagttcgcttcccgcggccagatgatggaacctagtgggaagaggcgaacgacagcccccctgagcgagccctggcgcacccccccccccgccccggggaccagcggacgccccatgccccaccccgcggggacaggcagggcaacagagggagaggttgaagattggaggggcctagccttttgcttcttcatgggggtggggggaggggtgttccccacttgtcacccctttccccaccagaaccatatggaagaagagcaggcagatctccacctacctgttcatgcagctccctgccttcctcatgtttttcttcagtctccccaggaggtgtggggctgggacctgaggggaaggtccccaaagggtttgtgactctcctccctgttggcctgacctgatcctaccttgtcttggtacagcacaacctcagcatccctgaaacaggagtgtcaggggttactgccatccaataggagatggggtgggggtctgatctttatttttgggggctgctggtggagggaaagcctggactgagagttaggtctggtggggttgctgagagggcctagcggcctgctgctctgtgaagggctgagccccgtgccagttgttaaactgagaagttttaacttgtttagtgaatattcagggctgtctctacccttcagatacacaaaatggaaggggaaggaaggcggcaagagagggcttcttacacttttttcaatgcctgcttgagaaagaggaggcccctcgcggagctggtttgccttcttttgtgtcctggtttgattccttatggcttccgttctgttccccctcgcagcctggcctgttttaggaaactcaggctgagagtatcagttgcgtggtggtagttgcattgttccaattaccactgtgtgtggccacatcccaacaattaaaatgcagaaaaacacaaattcactgtcttgacttgatcctagaggtggctgggagtttgctgtttgtccaaatgcctcatgaaaagctggagagtttgcttcattccctgctcctcatagctggttagcctgaggcctggggtctctagggtaaaatcctgcacttaggttccctctctggttgatctttgagggcagcagagttaagaaaccaagagcagaagtgatataagctttagcttctcccgtaagaatataggggaagcagctgaagagagctccccggaagctagaattttgttcagggtggtaataattatgcatgaaaatgatagttaactgtaatgatgattgacttctcttgcacctttcttccagagaactccaggtacatccaggtttatctctttgctcttccttgtgccctccttctaaggtgtgagtggggtagagataattcctcttttttgtagagtgatctgcccccaaggtcacagaaggaagagccctcttgggcttttcttagtgtgcaggtgagggaggatggtattcagccagagagatggaccctattgccttcttcatcttattgatttcattacttctgacattctgaggccttgaagattcacaaacgggaacgagaaatggtagtctgtgtggactcctgatttttataggtcagatggtacattttgtacattttaatatgttatattgttcctgtgacaggttaagattattctgcccactttacatatgggtaaactgaggccaaggagtattaaatgatttgtcaaaactcttagcaaattggattaataattagatttcttgatgatttgttctcttgactagctaatgctacacacattctctggtaagctgtcagcttgctgctcatttccggg

SEQ ID NO: 317788 - DNA, 4001 bp, Homo sapiens
aaaataaaattcctgaaatgaagctttattttaaaacatttcttatagaaaaggaatctactgtttatctctggggatttttaaaaacagaaaatgttattacaaagattatttacagaaaacaggaccagaagtacattacccttcaatacactgtaccaaagtctcctaatagggaccagggagataataaaaacactagcttattaaatgtcttcctcccttcattttaaaatgtagacagattctattaaactgacaatataaaagcttaacccaataattttagctgtacaaagttacttattaacctttaaaggctgttatgaatttacacttcctgcagttcacctgccatctttcccaactgaaatagccactaggggtttaagacagtcaccacttgcgacatcaataataaggaaataactttgcattcaagtttaagaaaaggataattgcggattttgcctgtgcccataaacaggtgcttaatgaatatctgttgagtaaatggtgacattttattatattagtgcaacattagcttttccccccctaaatttagagttctcccttgctcaaaaagcagcaagaccataccacagtcccttctcaaaaacacataaactcctttattcataatgaaacagaaagctgggtttcaaaatacaatcccactccctctttatcttctccattatttttaaagattagaaataaggcctgtttttaagaaacagaaaatgtataccaacttctctcaaaccaaaagagaaaatccaaatttgatatatattttctatgttcataatattgagagtaagaacggactgttcatcaacagtatgttatgtgggacaaaaactaaaaaacgtatatcaaaaatacatactgtttgccgacattctttccttaatcataatcaaggagtatgtgcctaaattttactagatgtgagataagctttgtctgatatttcaagattcattcattcaacaaatactttactgagcacgtactataagccaggcccttcaacgaaacatttagattttgtaaactgcacatcaccccccaaaattcccctaaaaaagcttatcatttaaaataattgcaagctaaagaggaatccccaatgttgtttcttacacatagtgaagtcagcggatcggggcgctttttcagctgttaatgcggcatcaaggagccgctacctaccacacccgttgcctaaaatcgcaacttaaagctgcaagcactgggtaaaacaacctgtaagagtagctcagctcccgcgacgaggtagccaagggctttcaagcccggggcccggggcgaaccgcggcaggacccgcggactgaacgcgtcgggcgcctcaggcgaagagtcggagctccggagccaggtgtctttgctccccgaaaccctcacctagagaccccgggccctccccgcccgcccctcgcaccaccctcccgacttccagacgtgaaaagttggggggagggggggggtctgcctttccattttacatcaggcggtcagttggctgcctcagctgtccgcctgccgtgaattctgaactgagcgtgtaaccattcctcagaggaaacagaagaaaaaccaaaggcagggtcctagggcatgaggacctcgcccaaacctgaaatggaagacgcaggctcagcccacagcccgcagcgcgcggctggcaaggccgggccgcgctcaccccagagccctcagggacgagggttcggggcttcgggaccccgcccaagggaccgagagggcgaggcgtggcggccgacgcgcgactggggctggcattgcactcaccgtcgcctttgtctcagccgcccgctccggccgcagcccctctcagcgccggctccgcggctcctgccgccccaacgcctgcagctgcgctccccagcgcgctcgcagcttcctggctccccctccccgcccaggctcgcgcgcgggttgggcggagcgagaggcggcgcgcgcccctagagcggccggaggggcgggcgccgttgcgcagctgcagcgaccgcagtgctggccccgccccccgccaggccccgcccccgccgtacctccggcatgggcgaatcggccggcaggcgatgggacccccgggattcgagccgcgcgggttaggaattggcctctgtagctaacggacgcctgagatccgggactgcagcactcgcgggaaaggacgctccgaaagatggcgaccaaacctgggcgggagcgtgggggagccccttcccaccccggcccgggccgcggacatccgtgcggaggagcgacgtctgcgcacgttgtggggcggtggacgcgcacaggcgagggtgggtgggtgggtgctgagcggttgtgggatgaggggtctctcagtagcggttgagagcccatcctctgaccactgctttttcatgtaaaagtcagaatcgttcaatcagtcattaactggtttaaggctggctaaaccacctggtttgaaatgcgtgaaaattacacatgtactagacttctgtgattcctttgggtgtgtattttacatatctcagaaatcagaaacatgagtgccctatctagcagccagcagtccaccaaaatgcctacaaaactttatcgtaagttcaaaaggatagcgtaatgccactgaagtaagctctcgaacctgtaagtaatgtatggtcttccccattctaggttgatggcgaggatttctagttactcaggccaaaaactttatatcatccataactcctctcatactctcattttcactttcaatctgtcaagaaagcttgttggttgtaccttcaaaatagaacagagtgggcaacatagcgagaccctgtctctacaaaaaaaaaaaaaaaaaattaccctggtgtgttggcgtgtacctatagttccaggtactctggaggctgaggccaggagttacgttacagtgagccatcatcaggccactgcactccagcttgggctggacagagtgacacgtgttccaaaaaaaaaaaaaattctccatctttcctaccttactatttttcctttcatcccatgacacttcccaccttgtaacaatctttataattcagagtcagccctccgcatccatggcttctgcgtttctggattcaaccaaccacagatggaaaatatttgggaaaaaaaacacaacaatttaaaaatacaaataaaaaccaatacaatataacagctatttacatagcacttacattgtattataagtaatctatagataatttatacaggaggatatatgtgggttatgtgcaaatactatatcattttatattagagacctgagaggattttggtactggtcgtggtcctagagccaatccccctcggatactgaggtatgcctgtatttatctgatatgtttagcttttagtgtctgccttccctagtagaagctgggatttttgtctgttttgttcaactgatgtatcccaagtccctagaataaatgaaaaatttaaaaattccctgagattaaaaaaaactaaagcaacaaaaaatgaccaattttttttattttaaattttctcttggtttctgtttcagttaaccataagatctttatctacatcataccataagcattttgattttccagttactgtgagtacagtgatgaccatttacttgacttttaatgcagttttttgaccaatgatacgctacaatcctatttcactgaatgagaataacatgatagagtagaggaaggttacataaagactattaattctaaaaatttcctagaacaaaaaaaaaaaaccagaaaattcccgaacttgatatatgtgcttgtaagcctccctttgaattacaaatgtagtaaccttgtgtgaatgccttaagtagtaaattttctatcatttacctataaagggtagtattcattatgtaaacatttattttcagatttttcatatt

SEQ ID NO: 317789 - DNA, 4001 bp, Homo sapiens
caaaaaaaaaaaaagtgaaagaagtatttctttatatttttatcatcagaatgggtttgcatctgacgtgtccctaaggcacagatccacgctgtttacacctgtgcactctccagtctcttcaccacatccctccccaaataaaccattacttccttatgcattgcacattgaatacatatgtgccacatttagtacactcgggggagcggggtgcagattatctatgcgacttagcatttacctgtgtttctaggacataacctctttctttcttcttcatcacttttaactaaaaatgaacatacggctctgtcaatgacataatgttttcatgaaagttctactaattaaaaatcctcaccataccagacctaaaaaatgagcacactcttgccaagtgttattcaccacagagaagctcttgtagctacgttttaaaggaagatagagagggggatggtatggagggagaaagtctactaacatatgcattgaagtataacagttgtcaacatcagaaggacagattatttttaatacagatccttcaagaaaaaaaaaaagaggagaaaaaataatgtatctccaaagagctgagaagtaatggatgtgcagttttggataatagaagctttcactggaatgaaggaatgaaggaccacaattataggaaacatctgttttttcaaagcaaaagatgataggtcatttttaaaacaatatttgtctttgtacctgtagactccccttttttcataataaggagacagtaggtttttattttagtggcataaaaacaatttcagactactgcttttgcccatagttacagtgctatcaatagttacttgttggggacatgcatttatacttgcaatatgctgcattaatttaacaacacataaaatatggattttattgcagcagaaacaataaatgctgcaactgctgactacatgcatttactctccctctctttacctctctccccccaatacttctgactcagatataaaattgaaaataagaattctgcctattctatttctgatgaatgtcaatctattgtatttatgtagatgcttagtgaccattgacagtttcaaggaatctgtcttctgcctgtcatttctgtttatattgaacgtacaatgaactatgactacgaataagtgcagagtgaatccattcatatggaatgcaaagtaatgttagatgatgttagagttcacagtaacaatgttatctcttgaactgatttttaaaataaaaatgaacaagtctgggcatgacaaattcacttcataacatattttttagcatttgttccaagtgaatgaattcacaaactctaatatcatgacccactgttgagcataatatataatttatccagctttacattgcctatatagatattcgaagcagttgtttctagaattaaatatatagagttgtatgcttatttaagtattaaagataattattttgaaataattgctaaacacaacttaaaaacaaacatttatctcctccctctccccccccacccctcaagtggaggaatatataataccttaacggagttaaaagaaagaggtgaagtcttcctaccttttttatcagcttctggataatggaagttggttccagccaaaataacccaggagaaattgtcactatgtcccctttttgtttgttttcggctgttattttctatcactgattctacttcaatctaactcaagctctttctcagcatcacttttaactctggacagcagggaaccgaagaaaacgggggcgagctctctctgattggctttcattcagtgcttctgattaaggggaaaggaaaaaaaaaaaaaaggaaaggggggaaaaaagctcttcctcacacggagagaaaggttctgctgatagagctgcagcactcgccatgggaaggttagagactgtggaagtgctggcttctgcgagcacacagcgatttgcaagtgaatgcgaggggagggcgcatccgagaggagggctttgcttgaaaggcgtcccctcccccgcagggcagaaagactctctgtttcaaggctaaggtaatcagcccaatctaatccgcctgtgtccgtaatacaatctcaggaacaggactgcttcttgcaattttttttaaaaaaagatagttcttctggaatatatattcctgcaccgtccttacaccagactaccgaaatccaagtattatcagagcgccaagtcaaattgcaaccagatttgatatgttaccagagtgatttttcgttgtgattttaaatgtttattttttgctttcagggaactttctcggcttgattttccaaatcccttctcttgttgcttattgtcacaggagtgcatacctcgctcatcattttggaatgtccgcgagccagtcttctctgcctaatctttgcattttaatactttatagataaaatattttattaaaaatgtaaatatgtaattagtgttattaaaatatttagactttgaacttgacacagtctccttttttttctttttaacgttgttttttctcataaatacgggtttcatacccaaatgagtgtgtggacagatgtaaatacatttggattgttctatctacttaaacatctaactgtctcgctatttatcaatctccacatcaaattgcaatcaaccaaaccttaccaaaggatgtcagtatagctccacaaagtaattaacatctttgcatttttccggctacaggtagattccttttaaagtgccatccataaataaattatatacacatatacatacatatatgcatataaatacatatatgtcaattatagttttaaagctagaggagaaattacgaagatcattttgggctgttattattattatttctttagcagataaaaatgctcagaatgttaaattgtcacaggactaactggaggcggggtcaaagctgtaataccacactcctacttccagtttagtattgtttccggttgccatactgcctcctctgtacctgtttgatcattctaacagtcaacaggccccttacataatcagcacaatgaaaaaggaagaaactcaatctgaggggcaaaaaagaagtgagagggagattcaaaattagattccaaaaaggttttaatgtatcacagtgttattatatgatgaattttaccaattagttttatatttgaaaacaccaaacatttccactgagctgaacagctaaatgacatttagagcagaaatggacttttgaaactcttaattttacagacgatggcattaagatcaggaaaattttatggcccctctaaagtttgataataatagagctagaattctgaattatcaccgtatcatttgcccatagtttttgttatgttttgtatgttttcttcgacagggtgccttaatttcagagtcaagtgaaaatagatattcagttttttacctctgatacgtatatttgtgtgtatttgtgtttgcctggtatatgtgtgtattcaatataatactgttattgacatgttaaattagctatcaagagaaatttataatatttaattaaatgcagcaggttaggtacacacacacacattgttctcttattaaattaactatttccatatgtttgtttagtgctaatttcaaaatgtatgactacataatgtgaagaatttgggggttacatttaaatgggtcgagaaaataaccaaaggctaagatctgaggtaaattgctattttattaattagaatacatgttgaaatgatgtattcccaaaataacattttctgaattatatagtttatgcttctcttacataggtttttggttggtgtgtttattctgccctgtctagtcatcagaaactcagcttccttctgtcttgatgctcaatgtttttaaggaattgaactcatttatatgatccaggagagatcaccacacatctaccttct

SEQ ID NO: 317790 - DNA, 4001 bp, Homo sapiens
gttaaattagttaaagggaagcccctgttttgcatgtggctatccactcaaccactccaaaacaattcgtcaatcacctgttcatggtttgggcaaagtaaccatctgcctttcaattctgaagagacattctgctagaatcatggaattatttataataaaaacttactcggttgaattctcctgttgacataataataaaaatatataagatgatattttaaattgtctaggataatttaatgatgaggcgctgccactgaatgatgaggttcagtatttcttgacagctgtgtgtctggatattattttataaccttacaactgctcaggtatacagtgaagatcaagcaaactaatacctgcttggcatggttgcatttttcctgttttggtcatgtatagtgtaatttaaaactgtaaacacattttcagaatctactctatttgaatttttccccctcagtatgtaaggtaattttctagctgagcagtttgtgaatgagcttcaaaatactcgatgagaaattgagaatcatgaaatggtcgcagaatcagccagaagtatgtcagttccctctccagagagtacagagaaatgtgtataagagatatcaggtactctgaagtacagaggttctaaatacactgtggtcccgatgtagcaaaaaacaaataatgatgttaaaaacataagaaaatacttataaaatgctgaaggtcttttttgaaaaatgatttgccattatgtcctatatcacacatatttcctccttgttaaatgtatcaccaaatgatcaataaccttaaaataatttggaaatgcatattatataacccacagcagatctggtaatctatctctttcatttgtcccagattagttttgtggtaggaaactcaaatggctgtaccatgagaggcaggccattaaaacatttaaatggttttacagtggtatttttcaaatgaagaatgaagttcataaatttcagcgtcagtggagaaatgagtgaggggggtcggcatctctggaagctctttgaaaataaagcattcattattttgttgtaaaaatcagatatctataaagccatttataaaataactagttggacatctagcacacctacttattttcatttgaaaatttagccatgctaagatgcatttgaggttaaaacatttctttccttcctcttttcacgtaacctctcacggtctgaggaccagagacttgtttagaacttaccgaagtttcccaaagcaaaaccacgcacaagctcctaattcagctgccagatctgtgtgcagcttcgttcagcttctcactacgctaggcatcactttattaatcatgtatgaatttctgtgcatgcaccctgaagcgatcacacacacgcggtgcaatcccaatcaaaaacggaagccttacctgatggcagaaaaggcagctgcaggagcagcagcaccgacggccgcagcagggtgccaacagctcagccttgcgcggaaggtgagacccttctcttctgtttcccctttccaaatcactgtgccaacacactgctttgcattttgtccgttttcattcaaagaaggttctccaggccgggcagccagtagacaccactttcttcctggaagaggctgcctctcttctcagaaaagcctggacccctctctgtggctccctccacatttacccttcagatcaataatgctctcggagcggctggagctcaactgcagcggcgagcggcgagccaatgggggcccaggattccctcctgtcatctccccgccctcaaaacaaaacacagcgtgcctttgacacatcattgagtagtgaaaagtaattgaatcctatatttgaaatgtattttgtttgttctttttcccccctagcgttcattgtagaatgctttgaatgaatccgaggactccttagctctcagaagactcattaaacgagcctagcagcgggtgaagattaggcgctgagaaagtgatagcacctgggttagcacccgaagctttgctttttaaatgcttgagatctattgcatatcagagaactgtcacctgggaggaaaaaatcttgggttctattagtctttcctccactaagtcgcttgagtcttttttgtgaatcaagacaattaattacgtttacctggaagctgtctcaatgtttaattgtctaaacgagaatcagatgcttattggtgacaataaccatgctcaagcaatttctcctaattcacttacttgtttctaggctgatttaacttggttcagagtctatgaagaactcaagattgctaagactatatacattagtctggtctgttttaattttgtcatgtttaaatattgtaagattttaaaaattaatgttaatttctctttatatgagagaatttattaataattacctaaaactttatagaatattataatggcaataaaatattacaatgaaaagtgttattgttgaaaacctattcctccaaaagccacaaaacaactttgcattctttaaccatgattatctttctttgtgtttcactattaaagtgctaactattgaataaacatttgcttaaatatattcaccaagaatcgtgtattttctaagactctaagtcattttattattcagacatcaagaatgccacaatatttcagataatcatttaattttgttctataaaaaatctcaagagtacagagtctcaatacagttttaaaaatatgtctccctacaggaggactgtacacaaataacaatgtcttttcaatgctagtgttgaaaaagaataaaattattgggactgtctgaaatctttttgtttcactgaatacaaatgtgttgatgtaggtggtgtagccaagctttgtgtatcgtgacaaattgaaatggcttggggagactttacaaacaaaacaatttcgtgacctgtctatcacgtgaagggaggcacggaaaaatgtaatatttacacactgtatgctgtgtcactataacaaggtgaatgctaactttattgtaactcatttatgtagccaataaatatttcattcagggcagtctctggctaagtttggtcacttggattttgtgaagaaaagaatatgctgatgaaaaaatgaatcataaacattgcttttccctcaattgtatagtatatttttcatttatttaaattccttttttgatcacaaataataggtcattgactacagaacattgtctttgtactacaggtcgagagttctcaatgtgtggtccccagaccaatagcaaaaacatcacctggaacttgttgaaaagacaagttctcaagcccttccccaagcctatcaaatcagaaactttaagagaatgggacactgcgatctatgttttaatatccctccagatgcttccaatgcacattcaggttggacagtcattgctctagctaaggggtctacaaattacaacagaagaccagccacctgcttttgtaaataaagacttattgaaacccagtggtgccgatttctttatgtattgtccatgaccgctttcgcattacaatggcagagtcaagtagtagccacagagacttacaatatgaatcctaaaatgtttactatctgtcatttaaaaaataaatgttttgacccctcctagcgcattgtaagatgtgcaatattattagtacaaacggcaaaagttgaagaaaaaagagcatctgaaggtggagtggagaagatcaaattaatgaaatcattgagatttgaaagagattgaaaatgatcatgtaataaattacattggtgtgtgtgttttgcagatttttgctgctctccctgtaggagggatgcacttctccccagtcttggcatcttagtatgaaacatgaatggaaaagaatattgccatttccaaacagaatattgaagaacaaatataaatttgtgcgcactctatcagcatgggttgttgaaag

SEQ ID NO: 317791 - DNA, 4001 bp, Homo sapiens
attctagcaccgggtgctattgctcatacttgtgactgctatagctaattataatcagtctgcactggatacagttacagctagagtttcctgccactcactgtccttctactattatattctcctttgctattgggttatcttcagctgggcatttctgttgcatgtataatagccaatgctcattttctacctcccattgttttcagagaggcaatcaatcttgaccattggtatcagttcctttttgtttgtttggttggttttttaagttggctatctctgagaaaaagcatcagaagtatagttcataaaatactcaccaaggtgcactaagtgaatgtcttctaggggaagtgcatcagttgacctataccaggtcaatttattattaagatatccagaattaaataaacaacaggaggcttgagggcaactgcaatcataataggtgatagcaccagagtgttacacaatggaactcattatctacgagtatcacatcctatcttcttcctcccacatcccaacaaggtatatgtaagatctaggctggacctcaaactcctgatttagaattaagcattttctctggtaagacaaatacactaaaataaaaaagaacaattattgcaggagcaaagtcccctgctttgaaaaatctgtgggtgatcccagagtgaaaaataaaggtttgaaaacacagtcagagcctgtagttagtttttttggctgcataacaaaatcttcctctgatctgtctctcggctcaaagcagtgatgccatcacctgagcaaaccgaaaaccataatacttttagctaagatttttattttattttttcttgacttccaacaggaaaaaagcaaggaacatttattcttgactacaacattaaatgcaatgagacattgaaataaaaatattttaatagccctagctaataaaattctattttttcacctgttacatatgagaggtttgcctagagccacatctgtacagacaacacacacacacacacacacacacacacacacacacgcataaggcataatttaccttgttttgcagacataaaaatcaagacaaaataatagttacttccacactaaaacaagaagttaagaaaaagaaatgaatgagagttaacaaacataaataaagtgtgttgctgatcacaggagcctacctaatttcttttcatgcatcatttataagtgccctttaaaagaagcaaaagtttcatcttaagctttaataagcatttaaggcagggattcgtgggaagaaaaaaaaaaagaatgaaagaatataaatgaggcttgtcctgctgcagtttcagtgctcagaaatcacgtaattttagaggatactggaaaggcaataattaaaaaaagcactatcgaaaattcaatttcagtgcccctgtttctattctgaccatgcgtcccctcacttttacagatagacataaatgacagcttatactgatgccatcattattgcaatgtgccttgcagagtattcttccaacttcttcagggaagacaacagcacaggcacagataaacataaacagacacgcagctggattctgagactcgcattcgataggctctatggcagcattcctgcataagaaaattcaaatgtataccagcgataaggcagcctgcattagctacaactttcccctcagccctcgatcctgtgaaacccatcggagatgaagatttcacccaatattgctttgactcagaactgggtaaagcagccccgctgtacacaaaaatattcatgtcactagagagtaaagtgtcatttattgaagccttaccttggcggacttgccctaactggtggaaaggaacttaatttataagaagcaaagagaggggactttcccagagctctgggcacagctgctcgccgtcctcggaaagcccagactcaggctccgcgcacctcgagccctgggctccgaggctgggtctctgcagctcccgagcgcgcctctgattggctggcggcgcctgtctgcctgatgctgcgctctcccggtctctcctccttcctcttctccctggctctcctctccgcggctcctttcccttctgcctccttctcccccccaaccccccaccgtgcatacttttggggctgcacaaattccacagcaagcaaaacggacaccctttaaccccctcagcaaggtcatgtagaaaacaattcagcgcatactactactcctaaataaaatccctgatccaacggcatcatcttgggtaccagatttcttgaaaaatgacggccaggactccgtgacagtttagaccatcaattctctgcgggggaggggaaactggggagcgagaggggtttgactgtcagatggagtgggagtagccaccgggagggacccaggaaataaggcagggcaggcgctgatgtggcaagctggtaataaattttcatattcccgtgcaaagtcgtcacagcctgctaaacattcaactgctggctcattcatcagtgatccatagtccagtggtagccatgagatttcgcttgagtgatgtcctttaacgccttcacccaaagtactcaaggtatggagggtttatatcagacagagcttccccttggaggtcagcatttatatttgtgaagacgaatagaagctgtgatgcttttccaaccccctttgattgtgccaggaaacctacacacacacaaacttctcacctcttatcactccagaataaattaaatcgatttgcaatgtacatagcttttgataacagggatttaaggtctgatgggctgcattcaaaattgatctggacagctgaaataactttagtactttctccccgcacgaagtcacccacactcacccattgagcacatcaagcatccttatttaaagtaaacaagtgtaggagtttatctaaattgaatgactagtctaagggccccttggcagatataataagaattgtacaagaccctccatcattgcaaacactaagagaaagatattactttttctgcttagttgataaaactacaaatgcccaggttcagaatgttaaaggaacaaggacttaagactaagagaggtagagtgatagggtgtacaagctctaaaggcaagaagacgtggattcaaatcacggctgggacatacctttacatgtgaacctgtgtaagcttttacccttctctgagcctcaggaggccactctaaaacctggaaggcaatcctcactttagcaggtctctgtgaagatttaaaaaatctgtatccttgtacaaacttatgataaacttttgttaaaggttgtataatttctaattactcccctcttttcttcttccctgagaaagatcaaagaggttgaaaagataaggtaagttgtatttcttggaagtttcttgggtctgagagtgaatgtttgaatcggctaaagttatatttgactattttgcttgagtgatgtgaaatgtggaaggatttaatttgatttagctttcggaaagactaaacaaaccaacaggagcaatgaggtagaacaggaattgaattatttctaattgggaaggaattgcacatttcagtgttctgttgctcttaaggaagatgttagaagtcaattagaatttggaaatttccaaaatttaaacttttagaaaaaagtggaacggaaacagcagcatcaagataatatgccagtattatattgcgcattatatattctttattatgcagctactgttttaaatgagggattctccttgtgtagtgtccagacacaaattcttaatttatttttgtttattgaaagaggtatgagagaatacatttccaatctttctatgttgatgaagccctgagtgcccaaagaaagaaatagctatgaaaaataaaagggatagaaaaagaaactttaagtctgtaagaggtcctatagtttaattgttaaaattcacgtta

SEQ ID NO: 317792 - DNA, 4001 bp, Homo sapiens
gtatttatatatataaaagaaatatatatatgtatttatatatataaaagaaatatatatatatttcttttaagtattttatatatatatactttttttaaacaaatgactcaatttaaaaacaaaaacatcactattctctaatacatatctctctacttcctaagaccaactgtactttccaaaattcatatcaacaattcagttattcacttctgatacgattatatcaatagaataccaaggtagctgtaataatacttgcattattaggaagcatctaaatatcatctcgcatttagaagacaaaatgaacgtcataaaatagtgtttttttaaatatgcatttttaattaaaatataaataagggtgaataaaacacacaaaaacaactatttagagtatgtaataattctaaattcagacatgtgggctactactaaggttggcaatcatgttcttttttgaaacgttgaacaacatattaaaaagttttgctgacttatcacagatggcagtttgttctttgattagaagagtgactcagggaacttcactcaaaaggacagtcagagcaattctcggggtaaaatatctcttaattaatccaaaagcaaacaaattgacataaaaatgtcacacaccattagagttccagtaagcattaaataaattctttctgtcacaatgttttatccttagcagttaatatctgtgacctataaaactaaggtcaatcaaatacatcaggactgcattgccccagctcattatttctagtccaacccatcaatttcagatatcattttaaaaaactctattcttcccagcagaggatttaatatgcgcgaagttcccatatattcacagatgcttaacccgcacgtagcatcactgacatgcaaaacattaattgatgctactgcaggtaagcaatgaactctaaaatagctaaacatctccagagtcacatttctttgccttagctcaatactttcttaagcacaaatgctgaccatcaataagagggcagtctaatgtcacatcatttaacaaatattgtgtttgtattgaagagttaaaactgcaatctaaagacagatttagaaaaaaaaaaaccactagcaatcactgaaaagcatatgatagcatctacgtctgcataaaatataataactgatagttaacacagcaatggtcctttcttgatatgctattatttaccaaagtagtttaacagctaaaaacaatatttatgaacatattgtaaggttgtcacaaaaaaatgtactttgtattataaacttggcttatttttcttctttacgtggagtatctgctacagaaacttacaatgtagtgaccttatttttgaaaaaaaaatctgtacctggagatattttttaaatgcaaatatattaatataaacacagtgtgcatttccatatttctaaatcaacatacttgtgtatagaatttactttaatgcatcatggaaaactcagttttaaaaacatgcaaagctatgatgtattttgctgtgaataattaaaaagaaatccagagataaaaattgcatttccttacctggagcgtgaaactgttcctgttcaatgctggaagaaagtggaactggaaaggggacttgatttttgttttcttttgaaaatccgctttaatgatgcaggagtaagatgagctattccaaggtgaagtctgttatttcttgctggagctcagagctgacatcctcttgtaaaaagaaaggcacctcagtaagttgttcactgagggagctgcagagcaagattatcgggtacaagcagtcacagtagtgatgctatggaacgtgcactggcttcctccccaccttgtgttcctctctctctctctctccccgcttttttttctctctctctctctttctctctttccttttcaccctgacgctcgctcagctctgagactcagctcatgctgctgctgtataatcaatctagcctgtctgaagctaatagtcccctatttaaccagccaatcaatagcaaggattccactgctagtcccaagagtcttttccaagagtggtacaaacaataagagttttgccagcagtttagccaagtgtttttcattattttatctcccttagagataaggcttgagagggcagaggctcaaagcaagcttagtgttactgctgatttttgcattttaaaaatttaccccttcttaaccagctgatacttataatgatcctcacctgctatctattgcaatataaacattgctgcagagtagcaatgtatgatagggtctttctcattcaaacatgtaagaatatattcagtaacaaaactatatacactgacaaatgctttgctaaaaacagtaatgcctccagtagcccgtatcactaggatcaattaaagaacacctcattatactgatttattttaaatgttatctattttattttagaaaatcatggtaaataattttgtttctcctaaagaacaagaggtaatgtttgtagatatttttgaaccagggtctgagtcagacttcagtgtataaaactttttttttcaattttaaggcattaatctacaaaagtttccctctgaatgtatcaaatagagcatttcacacctgattcatcccttccaggttaagaagattttcttcttaaagtgacacattcattgctcaactgctgtgactgaccataataaagaagcacaaagcaaaccattgaagaccaggctggtttctcatttcccacatgcttccaggggggcaaaaaagcaaaagaaaaaagagaagagcatatgggatcgcattagccataccctagaaatgcagtctttctcaatttctaattaggaggtggttgcttatctcaatttcacaccggttggtcaactaaacttttagttactttttctttgtaatactgcatttctgcattcattaaagcaaattgtataagaatctttaactgcttcaattcccagttggcattcaattccaggcagtagtcattgcagctccaaccttcagcatcatataatacaaataaaaatttataatatgtgccaaagcatcttgtaaatgaagactgaaaatgtcataaggtaggtgtgatcatgaagttacactcaattaaaatctaaattgtgaagtgttgtaacacctgagacacacttctttgatttaattgactcagttcagcagatatttattgagcaactctttgcatcagaccgtacatttaattaagtaaaggaaagaacaggctactttgcgtttttggtattttcagtgtagtgcagtttgggtagtcaatcacccaggagtttacaatctggtaggtaaatgaggagttcttaagtaagcacctgctttcgtcaataattcaaagagtgacaagtcgtcaagatagatcatagctcctctgaacaacagaaagacctatctataaaaaaaaaaaaaggctatcttttttacagataaccttgtagtgatccttatcaaagagaataaaaagcaatttatagggaggagatggcaatgatggtagtgagggggaggaacaacagaagcaaaaggaaagtgttaaaggaggtgggtgatgggagaggggtgtggtggaagagccaagtgagatgggtggctgaacacttagggtccaggaaggtaaatgaaaaaaagggaaatgctcataatatgtaagacttttaatgccaagctgacagtaataggggattgagagcatttcagttttatattttcaaacagaaatgtggtaaacttgtaagtatgctttgtgagcctctatataacaaaatagtgtcacttaagtactagaatgggaccccagtgaaagacaacaatcactagggagggtctcccttaggagtaataatgagtagaactagtgtgcctatgttggaaattagcagaacaaattaatattaaaaagcattctgaaatgagg

SEQ ID NO: 317793 - DNA, 4001 bp, Homo sapiens
aactttgatgattttggcagttgattctctgaggtaaacttaagacctattaatggaacagaatgagaacaataaaaggagaactaaacagtcctgaaataaattagaaatatagaaaagttattaaatactgcctaacagagcattattttacctttgaggctaatttctattttaagttgaaatctatcatttcatttcttactgaaaagagttcctatacaaaacattaaaattataaaaaatacataagtcatccaaaatagtatataagtatattgtacaatattattaaattataaaagatacatagattaaaagaaatatgggaaataaataatataaatgttttacatacttatgacaactctgtgttttaaaataatataaacgttttaaatacttgtaacaatcctgtgtttttaaaaaaagtattggtgtgaatcatcttttatgttattttatcattttattgttgcttgaaaggacaggattatttctagaagcttaagtaagaaatttaaatctttacaaaaattttttaaacagtcactctttctctttccactaaactagtatgatatgtagtacagcaaggttatcaaataatagcatttataaataacagaacaaaagcaaactagggacattataattaatggattataattaatttttcacactatcaagacattatacatttttgcaaagtgatattggtagtttgagatgttacggcagttcaaaaaaataataatgtatcactaatcaacatacatttatcccacctcctgcttcctttttccactgccttccatattatgggcgaaaaattatttcaaaattagataactttgtggttaagggaatgaactctggtgccaacatatcaaagttcaaaatctagctctatctttgactatctctctggctgaggccaagtgacttaatctctaaaaccttcatcttaacttgtacaatgtatattaaaacagcatgtactttggaaggttggtgtgaccgttaagttataatgacatccagtttattttaaatgctgtcaagagtactagctgttatcaagcaaatcagatttgcatacagcatttggcatgatgtctaaaaagggacagtaaatctgtaatgtgatttcatacatctaagaataattcattaggttttatattagtgtaaaatacatcggttaaaaaatgcattaacatttgttgtttacatcttaaattgccaaacaaagataacaaactgtacttaagagcaagagatctggctttagaaaacaagagttctacagggtcttgatctgtttgctcaggctggagtacagtggtgcgatcatagctcactgcagcctagagcttccgggctcaagtaatcctcctgtttcagcctcctgagcaagctaggactacaggcatgcaccatgacactcagctaatctttatttgcaaaaatgtaaaacaatgcagctcttctattatttttaaatacagctatttttcataacaacagatgacatgctaatatgcaatgagttgttattgttattttagaaaattaaaaggaatgtgtttacaatttcttagttttaatttcttatatggtgagcgttgatagatcttatctacagaaacaaaatctctttatggtcctcaataaatttgagagtgtgtgagaccaaaaagtttgagaacttctgtatcatgccattttatttccatgaccatagcggtagcaaggaatttcaatgagtttttcacaatcacaggtttcttcttaaagcaaaaaagtaaaacaagaataaaactgattaactcacatactttggttgaagcatctctaattatcacaccactcaatctttattacttgatactgggctcagaattggaccctgaataaagccagctgacaataatctttcttggatctagaatttagattctgctggtgaagtacattagatgactgcagtacttaaaatgaaaatgcacccagtacctgatttagctttcgtgacatggtgagtcaaagccacatgcaagctaaaagctatgcagtagaggagattgcatgagtaagcgaagaaagctagctggcaaaaagaatcaaaatcacagagaggacagaaacagagacaagaggcaattatttcagttgccaaatatgaagaagcaaccctaaattctgacatccagtccgagtttctacaagccagttaaatttttattttctgacttaggatgttcctgagatttgctgtgtttcctcgcaatcaatctttctcttttgagtatgtgtgttactccggtaatgtatcttttattgtaataagctttcatagaaatatatgacatatataggagggtggccacacttgtttcaatatacacttcagtgatgtttgtaaagtgaaagcacctgtgtaatcacatccagctcaagaattacatcaccagtatccagatgtctacacgtgtcccctttgttcactggttttcaacaaaggtaacctacctctgctgtcaattaacttgaaataattatgtcatatgatatactattctttttgtgtggattcattcattcatcattgtgtgtgtcggatgtatccatttcataaaacatagcagtagcttgatctttacattgctatatattattgcatatgacaaattaccaatatttatttatgcatactgttattgatgtatattgggttgatttagttgggtaccataataaataaggtcagtataaatacacatatacttggcttcaggtgcccacatgtatatgcattatttatgtgatacatacacagagctaagagaagaatggctaaaaatttgtttttttgttttttgttttttttttttgctacccttggccatttactttttcacatacaacttataattagcttataccaaaaacgtaacagcgcatactcactaccagtttattcccaaacagctttccaatgtagctatttctccttatctcattggtttctatgagttatattctgagataaccgcattgcctaatatatattttatatatatgtgtgcgtttgatatatctcctgtgctttatccctctcctcatgatctgttttgatgaatagatttttaaaatagatttattaacttttctttaatagtgatttacgttctatttaagaaacaaaatcatgatgttattctcatgtgtctttttccccaaaagttgtattgttttaatattcacctttagctctacaatccatctgggacttgctttttttttcctctagagacagtgtctaactctgtcttcagtgtggagtgcagtggcatgatcatatttcactgtagccttaaccccctggggtcaagtgatcttcttgcctcagcctcccaatgtggctgtgaccacaggtgcacaccaccatgtgttttttttttttttaatttttttgtaaagactgggtctcaccttgctccccagactagtcttgaactcctggactcaagcaagcctcctgcctcagccacccaaagtgttgagatttacagatgtgaaccaccacacccagggtcttacttttgtatatggtgtgagacaaaggtcatggttcaatttttttgaattgaatattcagttgattcagaaacatatgtcaaaaaggccatgcatacacaattgcatggtgtggccaccacctatatcacaaattatatggcagtatttgtataggtaggttctaatctctccattctattcccttattctatttgtctcttctgagatttctatcacactgctttaccatgttgcattataattagctttgatgtaaaatagtgctagccctctacccttttcttcttcaagattatttttgctatctttggccatttgcattttcacgtacatcttacaattagcttgcacacaaaaacatacatgtgcacacacaccgacagtttatttttatt

SEQ ID NO: 317794 - DNA, 4001 bp, Homo sapiens
taccctcctggttatgacataatgaagacatctgctcaagcatacccctttcttcacacaactggttttacggttctctaaaatgcaagcatagagccgtgcaagtactattacacacgggatgatgctcaagtctcaggtgaaactggaagagattttttttctctctctcaaagtaaaatcctaagggttttccttttcaggtaaagctttcagcaagaaaagaaaggaaataagcaacccttggcactattcatataagcatatttgttagtccttcttggaagagttgtacattaactaggcatatccctgggttcctttttccaacacagggaggagtttgcaaccccctggataattaaccactcagaaagcccacattttgatctgcacccctccagagcagccatatatgtacacaacagccactcctgcaacattcttgcagggaaaacctcttccttctttcccactgtgtgctttacgaagtgaaagtgaagattcgcagagacacggtctgatacacctctatagtatgactatcatcatttaaattttttttttttttaatgggagtaggagacagaaatgtgtggctattccagatgattaaacttcttggttcttgaatgttctgagtcatagttaactcaggtggccagccctttgcactgacagagacctgcatttaactccccataaaatatggattttattgcagcagtgacacttcttagcaccacgctgacctctccagcatctcccatctcgagatctacggtaactcatgacagaatatctaactacggaagaagtaatctcagctctgcaactgctgcagtccacaacattgcagcgtccctttttattaaattctgggattaacgcattgggggctccaattttccagcatctggcaccgaaaaccaagcgcactccaaccactctccaatcagtccggggaaggctttatcccccagatttgagcctggccagccgtggaggagcacgagcgaactgcgccttccatatgacttttccctggacagtgtgctccattttcggagtccagtgttggactttccttgcaacctaagcatttctgtcctagatgagccggcaggcgttgcccggaacgtgcaagctaacagttttctttagctccttctaccagccaaatcgtctctttagtttaagttttccttactgggagcattccagagttttcagactacctgattttctgctttaccccaaaagctaagaaatgtaactcagcccaagcagtcaccacgcagacccttatgatgcgggcaggtggagataaatcaagccccaaacggctcggcgggacctgcacgcaccagcgccctttggtaattgaccagccaactttgcaaatgccagagctcccctggcagcctctgccggcgtagagaaaggcagcgggttcttctgcggcggcccgcttcccggtgcccccacccagccccacggcggatcggtcttaccaggaggcggaggagcggtgcccaggctccccgggaagcggcgtcggtcctgagcagcggcagcagcgccgcccgcgcagccggacccgcgcgcccgccccgacccgggctcgcaggctgagagcatccctcccaactccggcgcggcacccaccgggcggagagggctctctctctgattggcttctatcaacgctacagaattaaaaaaaaaaaaagggagatgtatgcatagccaacggagcccgaacccacctctgctcgccttcctgcgcccgcggagaccctgcgacccgcccaggctgctcctgcctccgccgccgccgccgccgcggtcgccggctctgccgttcttgctgtcgcggctgaaactgcagctcttgggatgcgaaggttacgggctcgggagagctggctcttgtgggcacacactgatttgcaagtgaatgaagtgggagggagcaaagagaggaggactttgttaaagaggcccagtgcctgcccccgcccgccccctccccttgacagaatgactcccagtgtttgaagtcctgagcaattcgctccctggaacactccttcagccccaggctttcccttgctttctttctttctttctttctttcttttttttgttggagggggtttaagatatactcagaacttgtatgactccgtctgtttcctcttttgtactatcaaaatgcaccttgtgctattatcagcaatggtctgatgttctttttttttcaccgaccaagcaattacaattcccagggacacagtacctcgtcactctatcagttggccagcttcgtgtgatagcacgtataacatgcacacacataaaacaagccggtctcctgagatgacaataccgatggcttttctttacaacataaacaggcgttctccagatgcaagcagacatggatagattcatacatgtctttccttctctcctcccaggaagacacgctttcacgtagccccatgatctctgttactcttttggagtgaccccaggatgtcgtagcatgaagccatgcttccctgggcttgcagaaacactgaaaacccaaacccttcaggcttgccaatgacttatgactgatgccatcgttctaaatgaattgatacaagcatacaaaagacttgcagaagaggggtgtacaatgatattcaaggtctgcttaacgttcgaagatccttctggaaagttgccgaagttggataaccttcaaattaaactctttagtacacatagctgtttgaatggctagattgatagttacaaagaggtaatatctaatgttaaggtactaagccacaaaaatgtgaaacatgtcaaagtaccattaaatgagagtaatgattttctacataggagacataggcatgatggagtcagccactgttggattaggaaaattaaatctaattaccacagtgattgcacccagggtcactagcctcccaaaccagctgttcgcctgtgctgcaagttctcagggagatttccattgcacagagctctaagaaatgccaggctgcttggcctctgagtagttaaactggctggaggttggtcctgttcccaactgagctcttactagaaaaccttttgtttctccaatagaagttcaggcatttaaataaagcccaaatcaaaagtattcctttaggcagccagtgcttcaaagaagtgtgcatggaatggttttagcacagatgttctgcacatggaagatggaaagatttgagtttctttctggaaaagaccttccccaaatgaagaattgctaccaatttgtgagaagaggctgaacattttctttttatagagctctttaaacacgtatgaagtaagaatgggggagaagaaagctgctttagattcatagtccattcgtcagattatgaatttcttatacatttaattggaaatattagctctgtgtgtctgtgtagtcctttactgtttacaaagtacttttgtagactattttatttaattcatccttcaataagtggtgtcatattttcccaattaagacagagaaaacagactgatgaagagacaacagaagttacataacatgtccaaggcagtgaaactggaacacacaagaagcagaaatattattggtaaaagggtgtgcaggtgtgtatgcagacatagagacccacagattatatgtacaggtataatttattagcatatgtggtagtaggataatacatgaatacataatacgtaaatatgtcaataaaataagtcatattttaagaccacctttagcagaaaaaatgtgcaaattggctgatttttatggtagaagagggttgatagtgaagttgattttctgtctgttgaaccagttaatatctcacaaaggaaacctctaattgtttgcaatatactattcttcaaaccccattaagctacatgtcaaaggtgtttagaacaacaactgtatgagtgga

SEQ ID NO: 317795 - DNA, 4001 bp, Homo sapiens
aggactattgtttttattagtactaccaaatctgtctgactttagtgaattattcttaaattcatactactctctgctttctctaaatcattttttctatttatttccagaattggatttgctcataatatgtacttatcttacattttttttcatttttcaaaacacatatagagatgttggtatttcaacatgttggcatatatctattaagtgcatataattatttatctactcctcatttggaaaaactttagtcaaacccataacatatttggtgacaagactacaaacacatgctatttatgttatgttcaagttctttggtgctatgtgctgtaatagcatgttatttcattttcctcatctttcaaaagatctatgtttcaaacctggattagccagttttatagttgcaaaaatgtatttcacaatggacacacattgcctaggcaatgatgtagtgtctgaatgtggaaaataggattcttcttctgcagaatgtaggaggaggttttttacaaaattgagaatcttgaataatcaaattcattcttaacggctgtgcctgaagatgggtaactcttccaaattcatagataaagcaaagggagtcgaaggaagattcccttctgtcttgcaaaagttaccactttttttgatgtcacaaagtcattcattcttcatgctaaaaagatttagaaaccttgtgaaaaaatccctattaggaatctcatctacctataatacaaaatataaaatgacaacacatctccagagaagaccaccaatttctcctccaatctgtagtccattatatcttcatcaaaagttgatgatacaaataaatgtaaacttatctactacagttaataactttctttttattacacctttgttatttaaaacagattatgagaatttcaccctggtaacagtctctaactgtcaatactaaagaattttgatgaccttatagctaaaatccaagcctttattgagacgagcctacctgcaaaaatttatttgatgtgaatggtgatcttgagcatgcgatggaaaacacaataaaacaatgctccaccaaatcaatgcatttcccacatcacttcaaattttttaaatgccaattttggcttagaaacactctccctttcttgtggctttcatctatctagtcatcattacattaagacatatttgcctacaataatagaaagcaattatagctcacagatgtatacattcagagtgtcgacctgagtgggagccacaaatacgtgaagaaacctcttttaccaggtaaagtgatcaccttaatcctgacatccaatatgcatctgtggcatttttactattcatatattgtttcatttataatattgaaaataaagaaagcatttcttattcaattattaataaagatgcccttatttttgacaattttgactcaagtgatttaaacaaaagttatgagaagaccaggagtccatttcaaattaatataataatcacatacatgaacacataaatatgtgaataattgaaagccaccacaatcaactgatacaattttaagtttagttttatttttacgacaatattccatatgcaaatatgaggactataaaaagagcttgagtaggtatcagctttgcaaaagtaaaataagaagcaaatgttgcaagttttgtcactgagcatgtaaacattttactcaaatactactaaaatgtattcttatgtgcttccaagtgttgagagagagagagagagagcaaaatatagcaactaggagaaaagcaatatttgtactacttcgttataagaaagcaaaaactgaatagcttacattgtcaagcaaagtaaataacacttaccttgcttaacaatggaactgagtttagccctactccgcactgacagttccgttgttgcttctgtctcggtccttctcttccctttttatagtatcttcacagctgaatcttcatgcatctcagtgtggctttctcttcgagcatcacttttaactcagacaggcaggaagctgaaggcaaaggaactctctatctgattggtttccattcagcgtttctgattaataagagacgtccctcaaataggaagatattgccgctgatggcgctgcagggcgccaggtttgggcttgggggagtaaggacttctttgggcacaatgatttgcaagcgaatgaagtgggaggactcagaaaggagggctttgtcaaagacccccataagagaaaacgacccagtgtttttagtctcggttaatcagctctccttaatctgtttgcaattgggagagaaaggtcacagcatgtctgtaacctgtaaatcatctgtagaaaatatatatcacagggagagtgctgttgctcaaaagaaattttgtttatggttcctgcagaatttactactacctatttcaattcagtgtcaaaatgtcaactttaagaaaaagaggagaaaaaaatacagataatatatatcattgataacgatgaatttttttacttgtgcctctacgagtttataatctaaaatagtcttttagaaacattgttaaacatctaaaaattaatgattgacatatctgttttcagtaattgacatatctgttttcagtaaagataatggttttaagaataattttaaatttctagaacgactttgctttttaccagataatgcaattgaatgagtttcatcttccctggaaataaccaaaaataatggtgaccatagccacatcacaaaaactacatgatccacctgttagagtccctgttgcacattgtacacctcttagagcgggtggaccaaagctaaagttaaaccctgcttcagaaagaagtctgtttagtatttctggaaatggcacaataagaaagatattgattagtagataaatccttctgaaaagaagttctagtaatagttgtatgaaatgcacggtggggatatggctcactttataacggctcgttaagtcacagtaagtaaatagcttaagtgcgaaaaaatatcaatatcctatttgatgcttcaaaggaaaactgacaatacaaaaaaaaattcaacttcttttttttcccccaatggtaaagcttatccatgaaatgtagataatagaggtgcccatcggaggcttgtgcattatggaaattcgtttctttaaaaggaaaacaaatgtttttaaaaaaaaacacaattttacatatccccaaataaaatgtgacactactaaaacgtggtgattgaacatggagtgaatggcttttaaatacttctgtgtttgaagtgtaggaggtggacaaaaaaaagggaacttcattttgttcatctataaataaagaaaaagaaggaagaaataaagccttatgcgtattcccagggctagatagattcaagtggttaagacagcttgatgaattcttcatggaggctaagactgttttcttgaggcaaagacacttaatttaaaattcacaggctcctttagacttatgtcttctgggtctacttgctcctataaataaagctacatattatagaagcctctttattaatactgagataaagtaatgtatgtaaagtggaaaaaagaaaccaaacaaaatattttatcatagtttaaggtagacattcagaaataaaagctttaaatccctaatgttgcatacattttatttcccactgaaatccaactgtgggaaaaggctgttttgtgtgaaatccacaattcaacagagcagcctaaatcccgatttgaagttatttttactactctgagaaaaaaaagaaaaaaaaaaggggttgccaaatgaaaggtcttctacctttctcttgtttgatatggaaccagcatttgaaaacaaaggacttaaaccctggaattgtcaaaaattcttttatatcatgtgtatagctacttgtaagttttcaaatgtgagtagcattctgtatcacatgaaa

SEQ ID NO: 317796 - DNA, 4001 bp, Homo sapiens
accgagatcgcgccactgcactccagcctgggcgacaaagtaagactccgtcaaaaaaaggaaagagagaaagaaagaaagaaaataaaggaaaagaagaaaggaaatagaagaaagaaaaaaaggaagaaaaaaaggaaagaaagaaagaaaagaaaagaaaaaagaaaggaaggaaggaaaagaaagaaagaaagaaattggggacccatgagaccaacttctccccaccccagagcctccttccagggcactcattccctctaaagctctcctttaggtggctgttctgtcaacaaacggcagctttaaaaactaagtagacccggaggcagccgctccaccgtctcatcagccctccgcagaggagctaaacctgggctaagcagacgacctggttgtgcagcttgtgggaggcgcggtctgcagggactaccaccacctgcatgccagccagagcgcggcccgcggcggggtgcagccttcgctggcctaatgcgcccaggaggcggggacggtggggctaccctccggcgccgggacccgcggcctgagctggtgccggccatgccctggtccaggttggctctagcgatggggacacaggggttgcggggaacgtaatccctcccgatgtctcggccggccgcctcgttttgttgtcactggagtctcccatcctcctcctgaagaaggtatcatcaattccattccgcagacttgaaaagtgagggtcagagaatggcccaaagcggggaaccaagatctgctgaccccagacagctattagctacctccgcgcccaccggggctgggggaggggacacactctccgggaagcgaagattctctgaacgaccatggggtcgtattgtttcccttttcacaggcgagaaaacgaagtcactcctccaaggtcacggaggctgccaggccccaggcgccgcgcccttacgcacccctggccgactgacgctgggcgggcgcggccgaaagaggctccgccccgcacgcgtggtgcggtccaggcagctccattcgcgcggggccggggcgggggtcctggaagctgcgcagccggtgtgggccccgcgcgcccgggtggtgaggtccgcggacggttcccctgcaccgggccggagaggggccgcggcaggcggcgcgcgggccgcagccgcaccgcgagcctgggctgcagcgggagcgacgcgccggccgccgggtgggggtggagccccgccgcggccccaggtaacgccgggcccggaccctgcgccgagcgccccgggcgcagggccggcgagcacgcggcggtagggggcggccgcgggccggcggaggaacgcacgcggggtcttcccgccaggcctctgccggcgcccgcacggcgggagctcgcagtcccgggcccggcagcgggagctgcgccgctcttctccccgtccgctaggtccaaacgccccaactcggggagccccggggaactccgagcccccgcgtgccctgcgccccgcgcacgtcccgaccgccacccccggcgagtcccagctgcggctgggacccaggcgtccggcaccgcgagccggagacgcgctgcagttctttggcctcgccatgtccgtcctaaacatttccccgacgccccctgtgccggccgccggggagccagagcggcctaagccctgccctggagcggctgcaggtccggggaacagaccgctgcacttcagcgccgtccttactgcattctggatgtcggaacgctgcggggtccggagagagtccgtgtcttgcccaaggtcacacagcttccgttgcctgaaagccactaagctcgagtcgagctggtgccgggggctgggaagtgagggaaggaggacgagtaagatggagggacagtgggggattcgggtagacttgtcttcctcgatcttccagggtccgcactcctgcagccctcggttttcatcactgaacaatgtgacggttcctgccccctttgcagaacctgggggttccagcagtgagaactgcgggttggggaggaggagtcagaaaggggaacgcccccacgccacacccacacagcgcacacctccaaatgcggacccagacccgaaaagttggccggcacacacacacagaaccactgttgacccaccgagaaggatgctttcacccagcttcacacctggacaaacagcctcacagaccttactgacttccccaaggtcacaggctaaccagaggcagggcaggctggcctcaggggctctgtctcacccctcagtgtagtcctttcgccccagtggcctagttattatcgatcacccgattttacagacgagagattgagaaggagaggagccatagaactcacccaaggtctcaaaactggagcccgagtgctgagggccagagccccagacggggagcacctctccagacgccctgccctcaccgccatctgcacgcacagccacttaagggagccagaactcggggctcagggctgttgaggccagccctgagtggaaaggacttagcagggctttgtctactccctccctggtgtgtgaggctctgggccctgctctgatgctctggtgtctgggaggtgtgaaccctgagctggctctgccaggctgtgctgtgtccctggctggtaccccagcctctgtgtcccgccagctccatcctgggaaggtgactgggccctgcctctttggagggaggtttgaggggccttggaagaaagaaatggggtactttctgactccgagggagagaggcagccagttgtccaggctctggggtaggtgagaaccctagtcgggcagggccccagcaggaaacatggccacgccctcctcttcctgcctctgcttgcccaagcccttccccactgcagaggaggcctgggggaggaagccggaatgtggcatcaagtgctttgtgctggaaggatcaaactttggatccctctcaggctcctgtccactctgatctggagccatccactagtccctgagcctctgtgttctcccctttccctggggacatctgcatttggttgttcagcaaccacggggcccctgtgttggcattcatggttcacaaaccacacttaatgtgagatgagaatgggatcccaggtttgccccttgatggctgcatgacactgggtgagtcctgtcacctctcacctcatctgtaaaatggggccaatgctggtggccagctcttagaacatgatgaggagaggatcaggataggacttgcccagagcttgtagaagactctaggacccccatttcccccatagaacctcacagcagatgccagagcagaggtgggccactcccatctgaggtttcacacttctgggctctgtggcgagggtctgcccctccatggctctgaaccgctttcctctgtgcgatgaaagtaaacgacgtctccctttgagggcttggggtacggggagaacaaggctcgcacagtaggtgtgcaggccacgtccccacagcagggttccaaagcctaagatccatcagtgaccctgaggagggattcgaagaaaagttcagatttcagatttctggcttcatttgaaaaactggaaaattctgggaaaattgtgcctcccttcccacttgctccagagtgatttcacatccacgcgtgaaggtttttcaggttggtggagatgtgttattggtctctggcgctgaggggaaactcaaatgactggggatttactgagggtttcctggggcagggacagggcagcggtttcctggtcctgcaggagaagaggcagatccagagccccattcctgggcatccgccacccagcgtgagccaggtcctggactgggtgttgtgggccctgctgggagcaggggcagcagtcacatggagatggtcttctgctctcatgatgcaatgtgatggtaatcctaacactgaggaagccagcgcaagccggcagggcaggg

SEQ ID NO: 317797 - DNA, 4001 bp, Homo sapiens
tacaaaaattagccaggcatggtggcgcacacctgtaatcccagctattcgggaggctgaggcaggagaatcacttgaaccaaggaggcagaggttgtggtgaactgagatcgcaccactgcactggagcctgggcgacaagcaagactccatctcacaaaaaaaaattagccagacgtggtggcgtgcacctgtaatcctagctagtcaggaggctgaggcaggagaatcgtttgaaccagggaggcacaggttgcagtgagccgagatagcgccttgcactccagcctgggcaacagagtgagaatccgtctcaaaaagaaagtgcttagggaaggaccaaaaaggacacagagaagaatcagggagactctggcccccacgccatgagatgtgtagtctccaggaatcctcactggtcccacctggcccaggaggtgccagctcttcagccttggctgagaggaggcttcagccgcatctcagagcagtccacggtgccaagattttctagaatttggaaccactgggagtgaggatacccggactgcccaggacctccaggagggtcagggtggggaggtgggtcctccttcagtgtggggagcccccggggtgcactcagccacgatgctacagagctcccccagcaccgccaccgctacacggccagctcgccatgcactttcacttctgctttttcatttacttctcacagctgttcccaagcaggaattatcctatcctattattccaaggaaaccgaggctcatagatgcccagagatgggtgagccaggggcagcaggttagacccaggctgcctccaaatccaggggtccctgggcaagccttggtctgggctccgttgatccaggaggccgtgcctgcacccacagagcggactccagccgagcctgggtgcccggagcaaggatgtgggacctgagcacgcagctccccgccacgggccctcccagtgcctatggcccaggccacctggcccagcagacacatacagactcaaacagccctgggttcagatggcagcatttcacatatttgttgtgcaaccccaggcaagccctctcccctctccaggcctcagtttcccctgctgagaagcagagtgaggataaaaatcaaggggtctacacacgggccatgacttgtttccatctgccggacctcggtgctcactgggaccctgccttgtgcctggtgcccaacccagcacaggcctgcctgagtgacgcagcatggccccgactctcagctgggtcaccacctcctctaccagggcagagagatgtgcaaggcccggactgggcagagctggggccagcctgggtcagtccctgcctgacacttcctagcactggctgaggtggcactgggctcggtcataggccacatgctcacctttgcctcagggcttttcaggccctttctggaactcttctcatccccatttgataaatgaggaaacggaggcccagaagagttaagtagcccaccaaggtcagggtggagctgggatgtgaaccgagcagctggggtaagagcccaggtcagcttccccgtcctcaacccctgagcatcctatgaaggggtcaggccagttacctcgtttccctggggtgcctgcctcccttccatcctctgaagaatcatcccttgaggacttggatgggaagggggccatcagcccccagggaaggaggtattattatcccatgtttaccaaagaaacaggcctcacagcaggctgggacctgacccggctctgccccatctagcgtgtgacttcccctgcccagcttcaggggagacttttaaagacccccaagcttgccttggctctagggatccccccaacccccacatttctctggcccagagacccccgatgagctggatagtccctacctgtgtccccttcgccacggaggcggcaggcaggcgccggacaggcgctggcacacaggtgggcaccctctgcggcctgcagctatgtggccagcagactttggcaccatctccacctccactgagcaatcattaaccctgccagagaccacacctcccaggaggggtcgactcctaatgaggcagagtacagctgggggcgccggacaggaggaagggaccaaggcgccagagctcctggcgctcctggggctggaggcccacaccacaggagaaggggcctggccgaccctgagcccagaggacctgggaacaaggcccaacactggggcaggctggaggcggggacggtgacagtcagaaggtgatgccagagcccccgtcccctccctgctacgagtcttcagtgacaggggatctgtggacaagtgggggattgagtcaggagagggaagtggtaaaacagtgtaacaatcaaacactgtgtggccagaccagcccctgtgaggttctcgtggaggactgggggctagctgagcctggacaacccactttcgagcctgttgacactgatctcaccccgcattgagaccctcaaaaggcatctgcccgtccccaggggcttcatccactcccaagttgccttttttttttaattatttatttatttttgagtcagagtcttgctctgtcacccaggctggagtgaagtggcacaatcttggctcactgcaatctctgcttcctgggttcaagcaattctcctacctcagcctctcgagtaactgggattacaggcgtgggcctccacacccggctaattttttttgtatttttagtagaaacagggtttcaccatgttggccaggctggtctcgaactcctaacctcaggcgatccgcctgcctcggccttccaaaatgctgggattacagggatgagccacggagctcggcccccaggctggctttaagcgctgcccgatgtggtggcctcccgaaggggctcagccacaagtccttcttatcctcactttggcccagccatcacagttgacacagaaaggggaccctgggcacaactttcttaaggcacaccactgagtcgtcaccattgggtggccctcttcttgtgggcagaggacatgtctaattcacaatagatatatagtcatgcaccatatatctgtgttttggtcaacaacgaaccacacatataatagcggtcccataagagtataatatcatctttcatggcaccctttctgtgtttacatgcacaaatacttacccctgtgttacagttgcctgcagcgtgcggtacagtcccaggctgcataggttagcagcccaggagcacaggcggtggtatagagactgggtgtgtagtaggtggtaccgcctaggtttgtgtaagtcactgtgtgatgttcacacaatgacgaaattgcctgatgacacatttcccagaaggtgtccccgttgttaagggttgtgttgactgtatatcaggcagttgctatagtcaggcattttaatagtttgcttcccaactctccaaatgtaaaacatagtaacaaaatttatacgccaccagcataaaaagaagaaacccagatgaagggaagtcaagtgagaaaaataagggtaatctacgcctgaattgaggccataaaatacttgtcttgagctgggggcactgctgtgcacctgtagtcccagctacttgggaggctgcagcagtaggatggcttgaggccaggatttctgtgctgtagggcactatgctgatggggtgtccacactaaattcagcactaatatggtgaaccccaaggagcagaggaccactaggttgcctcagaaaggctgaaccagcccaggtcagaaacagagcaggtcaaacttcaggtgctgatcagtagtgagactgtgcctatgaatagctactgcactccagcctagacaacaagagcttctctctcaaaaaataaacaaattatatatatatatatatttgccttcaagttctgggtaattgtagagatgggtcatgaatcaggttctgagcttcc

SEQ ID NO: 317798 - DNA, 4001 bp, Homo sapiens
cctgtagtcccagctactggagaggctgagacaggagaagtgcttgaacccgggaggcagaggttccagtgagccgaaatcgcacaattgcactccagcctgggcaacaagcaaaattctgtctcaaaaaaaataaaaaataaaataaaataaaaaataaaaaaattatggcaggaataattgagaagaagtagtcagtcaggttttaaatgaatgcaagacagtacttggaggctggaagatgaccaaaaaaagggggaattaatgttaaatatggataacttccaaggagttagggtttttgaagcaggagaagcagattcaaagtagcaacggtaacaaaagcaacatcaggacacctggatttaaatcccagcttcagcaatcactagctgtgtgatcttgacaagtcacctagtcactcagtctcaggtacctcaagtataaaatagggttacttttaaccactttatagattgttttgaaggttaaaagaaacaatgtaggtgaacgtgagttatgtaattatgacccaaatctttttttttttttttttaagatggagtctccctctgtcaccaggctggagcacagtggcaccatctcggctcattacaacctccacctcccaggttcaagtgattctcctgcctcagcctcccgagtagctgggattacagacaggtgccaccacacccagctaatatttgtatttttagtagagacagggtttcaccatgttggccaggatggtctggatctcttgaccccaagtgatccgcccacctcggcctcccaaagtgctgggattacaggcgtgagccaccgcggctggcccgacccaagtcttttgaatgaatataagaagctactgaatccgacccaggtcttttgaatgaatataagaagctactgaactcattttagacctcacatcaatgttgttcatgctagtgaaagtctttcatggtaaatccgtacacagaaaatacagatacgacacactgagtggatgcaggtgaggtataaacagtgacctagaaagatcatggtatccaatagttctgaggaccgaaaagatgggcagtacttgcccacaacatatgaatttatgcagtaaaaataacatacagcttcttcttcatttcaatagaaattaaaacgggttcaaccctagagttccgtttgggaacacaaagcactaattaattattttgtctctgaaaatgacatgagtaactcattatcagagtatggtcaagactaataaaatggctatcagtcaattaataatacagacatcttcaaggagacttaaaaacaacataaaaaggtaactcactttcttaatggcgacaatttggttggtgttcttatctctggccttgtaaacggtggcaaactagaaagaaaaatagaaataacataagtttatgggagtttttgtgtttgcctttttgcatttttacatttcgcgaagcaaagagcccagagttcctgagcagactcgcggcggctggaaacgtggcgggtcagtctccgtccagctccaggctactcttcagcaaggagaggcccctcagggattcacccccaggatgtaaagaatgggcagcaagtgcgtctggacggtttcccccaacgagaacgagcagccaagccagacctctggcctccacgggaaaacccgcaaaggtggaggcggcgcggggctgtccgcttggggccctccccgtccttccagagagcctcacctgtccctccccaaggaagtccagcttctcataacgctttgcccgagacttcacgtccagagccatccggcgccgtaaagcccgactccagccgaaaagggcgagctcccaggacaacacgaatttaaagctaccttaaagcctccaacacccacttccgtccaccgggctccgtcgctttagtatccccgcctcacttccgtggtgggcggaggaagctgcgctaggcccaggcggttggcgttccccacccgtcacgtgacgcctgtcggtgcctgaagtggggcatcttcaatggctgctgtgtcactctgttgccgttttaacttgggtgttttctacattaccaggaactggtcagcgttctaatttggtgttccatgttcggggtttggtaggtgtctgtgaatgtagaaagtttggccttgtacctgttctcgctttttggttcttgctcgagcgcgtcctgtcgccgtggttgctatggacgccaaaccctgctatctcagattactgagacgagtgccaagttcttacgggctggtcaagagtattcttagtccagtccctttatgaagaagcaggcccaggaaaacaaaatccaactcaactgaaacgtgctgtgggaatcagcttctagtcctcagttttctactcggtaaaatggaaaaaataatgaactacatcacaggagattgtgggtattaaatgaaacatgcagaaagcttagacattaactcaattaattgagacagtgctcaattaacttagcagtaatgagtacccaaccccttgattatcataaattgtcataacaaacacactaattcatttattcaaaaacatattgagtgcttttcctttttcatttttctctctcttaggatgctgatattgagtgttatctatgtgccaagcaccattgtagaatctgagatagcagggagcaaagatccctgccttccaatgggaggagataaaaaaacaagtcaaatatgtgttatgatacataggtgataagtgctatagagataataaagcagataaaggataacaaatcagggcaggggcagggatggaggttttaaatagggtggtacaagaaagtcatcactgaaaacccactggagggattggagcagacaagtgatatgacctgactcacttttaaaaggttcactcttgctgttgggagactatattatagattttgagggacaagaaaaagaaagaaggcctattagagaactattgcagtaatccagatggctctactagtggataattaaaagtttctgagccagagcagctgtcaacatggaaatgtgcccccctccccctgcctttgtttgtttgtttgtttttgagacagtctcactctgttgctcaggctggagtacgctggcccgatctgagctcactgcaacctctgcctcctgggttcaagcgattctcctgcctcagcttcccgattagctgggattactggcctgctccaccacacccagctaatttttgtatttttagtagagacggggtttcaccttgttggccaggctggtctcaatctcctgacctcaggtgatccaccctcctcggcctcccaaagtgctggtatttgtaagtgtaagccactgcgcccagcctatatttgttatttctaagagttgaaaatcctaagtttcagagatatgttgaagaaagtagcaaaataccaaggccaataatttagttattttttttaactctggaatcagactgcttgcatttgaatagtggccctatcagtattcagccactagatacaactagggcaaattacttactttgtttccagtttcttcatccctaataggatctactcaaaggattgttccaaggcttaaatgacctcacacctgcaaagcccttagaataatgtttgacagttaagtgtttactatatgttagccattatctttcagtcccttgtcattacttgggtctaggcaaaactcacacattgcagaaaagacaccatctctcttgaggcaagtcatacctagtgatgctgttgtcatagtttcttctgacaggtatcattgaaataataatttaacctcacttgtagaaataagctagtgagcggcaggtgcagtggctcacacctgtaatccagcactttgggatgccgaggcaggtggatcaccttaagtcaggagttccaaaccagcctggccaacatggtgaaaccccatctccactaaa

SEQ ID NO: 317799 - DNA, 4001 bp, Homo sapiens
cgggttcacgccattctcctgcctcagcctccgcagtagctgggaccacaagcacccgccacctcgcccggctaattttttgtattttttagtaaagacggggtttcaccgcgttagccaggatggtctcgatctcctgacctcgtgatccacccgcctcagcctcccaaagcgctgggagcgtgagccaccgcacccggccttaattttttttgtttaatttttagtagagacggggtttcactatgttgtccaggacggtcttgaacccctgacctcaggtgatccacccgcctcggcctctcaaagtgctgggattacaagcgtgagccaccgcacccggcctcatgtcttttttttttgttttttacaatacagcatgttctaactttacttttcattcacattgctgcattttagcaagggtcctcagacattttccaaaattccttaattgaactcctaacagacctatttttactcttagtcctccaatctattctgcacaatagtggtagattaaaatttacatttctttacactgaattcaaaaccttcacgactttccacctcttacaaaatcaagttttgactccttagcctaaaagactttaaaatctacctccaatttactgttctaatatacctctttccaattctgctcagaaaactctacaggcacatgtctttgctctttgtcctttccactttgccctttatcctttgtccttctttagtctcttttgagtttatgttgttcctctaacctagaacacaacagtttctccctcttatctaaaccctccacatccttcaaagccaaattcatgtcccatttcctcaaaaaaactttccctaccagggaaaggactttgtgttgattccttggcatttattatgagccactttttattcagtatgattttcatatactctcctttctgattaaattatagaagtctttaagggcaggaactatcttttacctccttatagtctcagtacctagcaccatgccttgcacatagcagaaatttttattaagtattatacttgaatatttctgaataattattaaacaatattggtgtagcttttgttacataccccaaaacacatatatcttgtatcactataaaattacaaaatgtagataagatagagtattacacttgtttctccataatatgaatcagtacgtgtgaactaaaatattttatgcaattttttattccataacaattttttcttttgacttagatgattaaggcaaaagaagcaaacctttagaaactttatttctctcatcgcaattttgttgacagattgttctggtctctcataaaatatcttaatggccactatctgcccagtattcttatgtttacatttcatgactgttccgtaacttccctctcccacttttccaagggtttcatacatctccattttcaagctgggcttttactactttatagaaataaagaaagaaaatggaaaatgttaaacgtttatacttttatttattaaaactagataatgcatatccacaataaacccacagtctcaaatatagagacattaaaaaaaaaaaaggaatcttttccactgagcctttttgtctttgggaactaaagacagcttgagtaaggtgtccttctgaggctccacctctcaccagaacttaggggtactcctgctgtctcggtcatgcccatcaacactgagactaccacactataagtcaccatccatcaagcatggggtccctacacttcctgtcatgttcctgtcaaataataggttcccgcactactgcagtcgcccacttatcaggcccaaggtcctaaaaaaagcctggtctcgcccgcaactcaaaccacacgtcttaggatgccggaccggcgtcacgccccacgtcccgctgttgactttatccaaacagccgccgccgcctcagcccattctgtggtcccgctggtctggctctgcgtagttccagtggagccaccgaacactgatactactttgttgctcagccccgcaaggaaccggccacttgccaccatggaaacgccggcggagttgctgcgttctagactcgtgcgcaagaccggaacatgggcagggtcccgacccggaaggggaagtgggaagaaacggaaacctactctgggtaggcgcaaggtggaagagtgctgtgcttgggaatgggggaggggagtacagattgctgtcgcagctgagcctcctcacaaggttgcttttgaatgtggataggaaggatctgcatcttttttttttttttttttttttttgagatagtctagctctgtcgcccaggctggactgcagtgtcgctgatcttggctcactgcaacctcctccttccaggtttaagtgattttcctgcctcagcctcccgagtagctgggattacaggcgtgtgccaccacgcccggataattttgtatttttagtagagacggggtttctaccatgttggccaggctggtctcgaactcccaacatcaggtgatccgcctgcctcggcctcccaaagtgctgggattacaggcgtaagccaccgcccccggtcaagatggttcttaaatcaaaaacttttcttgaacacttgccatatgccttttaattttttccaactgctagtaatcttttttaaagaaaaaaaacctccctcaccacatgtcaaactctaggaaagcaagtaattcgaagagttccaccatatacgaaatgatgtacaagagcacggaaataaagaggccagtgtctaactgcttaagtagacatagagttcaactggaatgacagtccctaatgaataaccaccatatcactagaccaagtgcctagggagtgctttctttattgaatagggctttctttgctttcttctataaaatgagttaaatgtaaaaaagcgaaatctcgctatgcttccgctaaataagaggaaaggcattatttaataaatctagtctggtgggtcccacccagcatgcatatttaaatcacacctggagagcttttagaaagcatcccaacccccacctccacacccctgccccaatgccagagcacctgatttaattgggatagcgtaaataaattagtatttttgaagcttctcaagttttttctatgctgctagggtttatattgagagaaaggagaagtggtcatcgttttcattgatcacctaaaatattcagaattgtcttttctttgaaggttattcagacgggcgcagtggctaacgcctgtaatcccagcactttgggaggcccaggcgggcggatcacgaggtcaggagatcgagaccatcctggctaacacggtgaaaccccatttctactaaaaaatagaaaaaattagctgggcgtggtggcgggcgcctgtagtcccagctactcgggaggcggaggcaggagaatggcgtgaatccgggaggcggagcttgcagtgagcggagatcgcaccactacattccagcctgggtggcagagcgagactccatctcaaaaaaaaaaaaaaaaaaaaaaagaaagttattcaaccacaatataaaataccttctataaataagaatgtcatagtaaatcttatagtgggctcaaacttggtgtaagcatattatttgttgtgggctaaatatttgcaaggaggctgcgcacagtggctcacacctgtaatcccagggaggccaaggtgggcagatcacttgagcccaggagttccagaccagcctgggcaagagggcaaaactccatctctacaaaaaattagccgggcatggtggtgcacacctgtggtcccagctacttgggcgtctgaaggagaattactggagcccagaaggtcaaggctgcagtgagccctgttcacaccactgcactccaacctgggtgacagagcaaaactctgtctcaaaaaataaaaaaatttgcccaggacaaagatgaaccaaactgagtccc

SEQ ID NO: 317800 - DNA, 4001 bp, Homo sapiens
aggacaaagatgaaccaaactgagtccctgccctcaatgaactcataatccagagctacagaactgataacagcatacagttaatagctttaaaattattccttctacaagtaggttatggcaggcctggttaacaaggacagccagtgattcttgctaatacacagctgtaagactttatgatgcacattcactgaatcagttaaaagtgttatatcattttggaaaataataaactgtttccaaaacaattataaatccctgtagtctctgaattccttacctctattgcctccagttcccatcttcaggacttcgttggtgggtcaggaggactctgagcacttttgtatccattcgtcagctcaacagggaaagagggggtaggaggaggacctcagcattgccctaatcttgcccatagttccatggaaccagaaagggttaacttttcccactttccttgtacctccctttcttcaaaccctgaattctgtctctgctttcagtgactgccttgactgataaattacaagggtttttttggttgttgcgggatttttttgaggcagggtctcagtggcatgatgatggctcactgcagcttcaacttcctcgtctcaagcgattcttctgcctcagcctcctgagttgctgggactattggtgtgcgccaccatgcctggctaattttactttttgtagagacaggatctcctatgttgcccaggctggtcttcaactcctggcctcccaaagtattaggattacaggcatgagctaatgccccagctcatgagggatatttttaagatatagtttctctttaccatttttctccatgtaaccctacctgtgtgtcttcctcctttgctattggaagggttaggactgcaatggcagaaaggcaaaaaaattaagaatattcagcttttaacttaaaaaacacattgcgaatgtctaacaggacctatcaagagttaggcctggctaacctgatcaccaaggcagtcactggaagcagagagggaattcagggtttgaagaaagaggtacaaggaaagtcagaaaagttaactctgcttccatggaatcaggggcaaggctgaggcaatgttaaggtcctcattccaccctccctttacctgttgaactgaacagttccccaaatggatacaaaagtactcagagtccttagtataacaaagtcctgaaggtaggaattggaagcaatagagggaaggacggtgaccacagaaaatattcaaggtctttgggaggtcaacacctctgaaccccctggtggtggggggcccttctggcccatttgcacctttcttgctagtgtagaaaacctgaagttatctcaggctagatatataaccctcactcatgtctgccggagctctcccccagaatatgaatcatatttgtaggtttctttgacaaccaaccactcattgatatgcttggaagactgcacccccacattccttaaaaatacaatggtactcccccaccataggcaagtccccggactctgacacatatcttcaattgaaagcagacccagaaaggaaaaactgcataatacaccatcctttaatatttgcccagaatttccaatactagaaaccccactgcaaagcagaaagactatctggtagcttcaaggaaccatttcaggagattgttgtgtgggcctcagtattcaaggctgccttagaagatcgtgcgatcctctcactcttcttgccccaagtaccagagttaataagccactgaaccaaccagaggggaattatttttggtcccggtttaaagaaaacaaaacaagctgttgattctgccatgacctcttgggtaatgttgtctctatacctgtgataaacagaaaacaactaataaaggtttatcccgccctcaccctcttaaacccgcttcacagacctggctgaaactcacatccaggcgaggcgctcacgtgacccgttctaaacgcgtcatagggacacgtggttctagatacttctccccctcccactcaggggtggattgttgacaaggccgcgggcagtcacgtgatcttacatcatcccacctcctttccctgaaatctctggcccggatgcgtccctctttctccaccccgccgagcctaaactagtgacggggagggagacgggatagtgtttctgtttcgtggtctttgaatccacaacctctagtctgaacacagagaacacaaatttgtctattacttcaggaagcccagggggaaccgcgccccgctgaagggctcggggaaggcgcgctcccgcgtcccgccccctcctcccccagcactcacactgtggtagcggcggagggcggagggatccggaggcggcggagggagacgtcattgcagggttgtttgtcagtctcggcggcggcggcggcggcggcggcggcggcgatccacagtgattcggccgccgcgccggggggtgggggggctgcgcgggactttttttttttcagactgaccgcggggcagctgcggagcatgtcgaccccggcccggaggaggctcatgcgggatttcaagcggtaagggccttcaccttcgcctagatgacggcccctcaaagctgcggggctgcagggcgtggatcccagacaccttcccctttgtgaccctcagagggccggctgtgggcccagcgggactggcggaagccgggtcctagcctcggccctactcccataagctttgccgctcgttctggcgcccgaagaaattttgatactgcttcccctccccacaaaaagtaaaacggtgtcgatcgactggtctagggttccctgctgcccatttcggccagctgcccggcgtctcgcccaggcgatcagacattatccgcccgcccctgcaccctgcggcgcccccttcttgtcccctcaaagtgagctcctgcgggagcttgttcctctccggcagcaccagtcagctttgtttcacggccccgccgtcttctccgaggagccgtgttggggcgaacccctctcccgactcctgccaatcctttccatttgtgccctgagggtggggtccagtgcgtgaggcccggaggttaacccatcccccgaaacccgactctgtccccgcccgcctgaaaggaccttgggaactgacttagagatctgggaccttagagctggccaccccggctgccagtgctttctggaactcagctctggctggtgaagaaagcccctatctatagcctcccgagtctggaaaaatgccttcccttagactggcgctaatctgatactccctgggcctcctttggtaaataaaatagggttttgttaggaggtattggggttgtgagatagaaaatgattattccgttgtttaccttttattggatacttagagacatagaaaaaataagtgagaaaacatcattttgatactctgcacatttttcttaacattttttctggggacacctgccctaattgaacaaaatatctagcataaaaacttagatttgtcgctcaggaagtcacctctcagctattataaagcctatgtgaggcacttggatttggccaacttatttaattcattcgtagcttctcttagccatttaaaggtaggcgtcaagcagtgcagttcttctaaggcttctgttcgtggtggcctaatttgcttgagattgactaaaaaccatttttttaatgtggactagttgcaaattatgatgccccatgaaaaacaactgcatatgtatttgtgtgtgtatataatgtagcatttttaattgaggttacagtctctgaaaggagatgccctttttggtgcaaaagtcatctttctaaagcttgaaatcagcgtatttgattagcactcatgacaaattcagatagtaaactagttcatgtcattgtcgccctggctccttactgtaatgctctgcttaattctgagttgaatgcatggcaccttt

SEQ ID NO: 317801 - DNA, 4001 bp, Homo sapiens
tcattaattcacttctggtagtaaattgtggcaggtcttccacttcaatcccatcggccatttccatcaccttgtctaaaaggtctttattgtaactgcacaataaaaagtagtaaggtaaaaaccttggaacaattgtcactgtggattaataagaaactgcaggttgctcaactataaaatcagctctcagagaactgacctgatactgcagggcaaacctatacatgttccccacaaggttttgagatggagtcttgctctgtcccccaggttggagtgcagtggtgtgatctcggctcactgcaacctccacctcccaggttcaagcaattctcctgcctcagcctcccgagtagctgggattacaggcgtgtgccaccacgcctggctaattttttatttttagtagagacagggtttcaccatgttggccaggctggtctccaactcctgacctcaagtgatcctcctcccaaagtgctaggattactggcgtgagacaccgtgcctggccctgtgaacacttcttgcttgtagatacagaagtggacttcagaaataccagtacagcagatgtttcaagatttagaagaacagaggcactgtacatccagcaacagatattctcagatacaggatgaggaccaaaatatttttattttttaaatacatggaatgttagtctaacaaaaacattatttatttccccaattctctgacatttgcctaaccatggaaaaccaggatttcccaggagcacctagaaggcagggaaaagggacgggtgcctctggcattgcttccctacgtactgttctaataaaccccaatatgtgaagcaaaaccaagtggcttaggcctgcaggggccaaatgaccagagtcaggcagccataataggtatagaaaccaagatcaaaccaagtcaccctattttcctaacacaatttcaggaaaatcgaagctctctaatagggagtctcaagatttgccaccttcctcatggaggggtgaaaggaatgccttatcaggcacttcaaaagcgggcctttgtccttttggtgctgcagccaggatgaagtgggctttgagaccttcacaaaaaggcatcggccattttcataagagggaaagcagagaggtgaagctggttcctacttaggaccccgtgggctgtggagtgaggagaaaaagccataggatacagattacatcctctcattagtgattaaaatccatcaatcctgccagaagctgcatggccccaggtatatcacttctctccctaagctttttcatctgtaaaatggggatctccgtttctctctctgcacgtttgccatgtaggtgacaggggctaacggacttcgaatgcatactgcaaaggtgatggtttgagctaataataatagtaatacaaataacaatagcaacctttgaacccgccatgtatttagctcttcaccctttaattattacagccatcataaccacccttttaccagaagagaaaactgaggctcaaagataaggatctttccaaggggcctccagggtgggaatcagtcttcgggccgaccaatgcggatggaggttgggcccgggttcagtctggggcagaggttcgggtcaggggtgagccctgggagaggccttgagggtcggaagataggggacaggatcagccggccggcaggggtccgcacctgcagcctaggaagagatggttggcccagaccatggagagggagagcagctggtccaggcggccactgccgtcgggcgggtcgcggtagtcgggcaggtggcgcaggatgaattccatgcgggccttccattgcttctcgctctctgagtaggagcggaactgctccgcgaagtcggccgcctgccgcacccccgaaaccagctcctccactgcggcagccgcctcgccaccgaccatggtgcccgccgcagccgaggaccggatagcccgccgccttcccgacgcgcactgcgccaccgcctgccggccagaggggccccatcagcgcacgactgctccagaagaccaacctggagcgccctcgcccggagcggcggcctgcgggggcacagagcggctcctggctcctcagaccgccgcagcccgtggctcctgccctgggtctacccagggctacaagggtcttttgcggtcgaccctgcggggaaccggtgggaaaactgaggtccctaaacacagattcggagcgccctcttccagttggcagctggatgccagccagagctatgctgtgcccttgccctgagagtttcccgggcaccgcctcatcctgagcgacatcagggggcccgggtcacggtcgacttccaggggtctccacagccacgaaggttggggcccgccttcctggagcgagtaatccatccatcccgtgaatacttgccaggcacattgctaggtgctggagaggcaatgagagcacattcggagccctgctcgcctgaactttaccatggagtggaggagtggacattagtgacataattgctcaagtaaatggagaatttcagcgttgacaagtattagtaaagagaagttcagcgtgctacaaccatgaataagcaagggacccaatctagtcttggggtcagggaagtgatcctggagaagtgaagaatgagcagttttctgagtaaaggggagtcggtcaaagcaagagagagcatggcctggtaagagaattgcaagatagggggtaggaggggttggggggcggggcagggcaggtagagaatggagaagatgaagttgcagaggtcagcaaggccagtaggccaggcagggatcctggctagatcccaagaatggggagccgctgaaggattttaaccagaacagtgacacctgtgtttacaaaagatgctggaaggagccagaaacaatgtgtccagaggaaatgagcaagtttggacttggttttaaatagagacagggtttcgccatgttgcccaggctggtctcgaactcctgagctcaagtgatccgtctccctcagcctcccaaaatgctgggattacaggtatgagccatcgtaactggctggacctgaaagtttttatttagctggcatgactctgctgtctgttcgagtctcaggtagcagacacactgagagaaaaaagagcttccttttaagtggtgaattttccatccctggaagcattcaactacagtaactgggtgttggggctcagaaaccaacaccccaaaatgtattttgacatgctgaactgatgaagaagcctcaaggtctctgtgacctccgccaccaacacacactcctgtctgtcaattctttgttcctcccaaagcacaagatgaagttgttcccttatctgcctaaatttagtccagaacgccaaaggaaacaattatctctggttccctccctgagttttcattaagtgaatttgttttgcaggaggaaagactgaagtatggtcaacacactaggacagacttttgtcacaaacccttgtctcctctgcaggcccaacagactttgtcccaggccattgcatgttcttcaagcccattgaattaccctaaaaatcatttactacccatctaaaatattcacactctggatgatggggtaatcactctgtgattaactatgcacattaataaacttgtatgtcttttctcttttttttttttttttgagagcaaatttcactctttttgcccaggctggagtgcaatggtgtgatctctgctcaccgcaacttctgcctcccaggttcaagtgattctcctgcctcagcctcctgagtagctgggattacaggcacctgacatcacgcccggctaattttgtatctttagtagaaacggggtttcaccatgttgaccaggctggtctcgaacccctgatctcaggtggtccaagctcctcggcctcccaaaatgatgggattataggcgtgagccacagtgcctggctgcct

SEQ ID NO: 317802 - DNA, 4001 bp, Homo sapiens
aaactgttacaacctgtcctggtttaacagtggtttagagtgtaggctctggaacaacaatgctaaccccgggagcctggagccgctatcgatagaagacctagtgcaagtcattcaacttcttcattgcctgccattcctcatatgtgtcaagtgtctggaagagtacctgtcccataacaagtcttcaattacctggagcaaatgcaagaaaatttaaaagctagactctctgctagctttcacggctacagaagggctctaccatgaactaagctgataggagccaaaggaatttcctcaagtcacttgtatatgaaaaatgggatccttagtggtcttcactttttctatttcaaatcctaaaatacagttgaaaccgcccatgccaacaaaactttacgaaacatcccacatgttgaagagtgactaaaagaacctgctcccaagaaaaacaaacttacttctttccttattcttttctttcacttacccctttctcctaaccctaaacccaaaaaaccacaaagactgacgcactaactgctcagaaaaagtagaacctctcacacttcggggtgattaaattttacctctggccccggaggattggtagagagattcgacttaatcaccaagccggggctgcaaaaaagccagcttaccagggcacctcactcaagtacatctgggaagtaggggtctttaatttacattacagatcgtcagaagcaaggataagataaatcagatcatttgggggctgaaaaaaacgacggtcgaatatttaatctgcgaaacttggcagtggatttgaataaacccacagtcggggaagttagttaaattggtttgggaaagggaacagcagaaattccgtagtggcagctgacggccacaagacgctattttacatgagtaaaaatgcttgctataaggtgcccggttgcaggcgaccgaaggcgcagtgatggagaactgacgcgggtgacttgtcttcttcaacatcacacacttctcccgatggctgatgtagtgctcccctgggagcaccctctgctagtccggccagacggttccttaaggtgtcaggagggcccgaacctgagtgcggtctctccgcatctccgcgcccggggttaacgatggcttgggagtgtgggcattgctcccgaggccaggggcaggaggactggtggtttagaagcagaggggtttgcgggagagaagagaacagaaaatctcgcagacgcgcggtggcctcccttcccggcgcctgtccgccgttcccggccggaggtcagcaaggccagtaggatccaccttccgcctgcgctgtggccgcggagccccaagcgagtcgtgccagccccgcggctggccagcgagggggcgagcggcggacgcagcgcggcccgagcttcccgagccagtcactttgggctgcgtcccccacgtccattcctcctcagacggggcgagtgggcgccgcctggcattgaagctgcagcgcgctcacctgtactggtcgaacttggcgtacattgcccactcggtggggtcgctctcgtaggcttccatgatggcctgcacctcctctacattgacctcatcgccggcaaagagctggtgcaggatgcggatcagatcagccagggtccgtggcttcagcacttcggtctgttccatctcgtggggagctggctgcgcgcgcgtctcactgctgggctgcggtggaggagctgagcgagccaaggagctgggggcgagggagcctaacagcccgctagaccgctaagcagacacacacgcacaaacccagcattagagtgccgaaacgtaaggatgtcgtcgcagagacagcaagagacccacccccaggcccctggcagcgcagtggatccgggatcgctggagacgcggtgcacacacaaatcaggttcagatctgtggggttcatcctcccgggccccttttaagcgcttggagtcactaggaatgtaccaacggccctcggagggaggacgaggcggagagccacccaagaaaggtggcggaggcggggagaccctgcgggcacggctcacgcgcacatccccggcttccccgggctccgcgccttcccaagagccccgttgtctccggcgtcccagggatcgcgtgggctccgcgcaatctctcccccactttaacggcgcgttttagccgcccggcctaacgcctctccccgctccacctccgccgctgtggttcgcgacgctgggacgtagacaaaaagggtcggaggagatggctgcggggactgacgctgagtaaaggaggaaaagaaaagggaaggagagggacacttcttccaaatagagaattgtgaggagcctgcgaaaattgaggatggattccactcctaggccagagagtgcctgttttgtcgattgaaactatccacgatatgccccaggctaggtgaaaataagtccaagactttatatatatatatatttaagtatacacacacacatattttttaaaatgcgtactgaaatatattttgacaaaggagactcgggtctctagtaagacaattagtgaaatgatggaaaaccaagaactctttgattttaaaatcaaatattttcttttaaaaaatatccagtgcaaataacctgatatttcatttgatggtgtaaaagggggctttttctgaggggatagggcgggctctgacgcaataatttaagaggctataattatatttgaatctttcaaccttaggcatgtgcttgaaggagcctgctagtacatacatataaggaaacacgtttctacgtcatgcatagcacctagtacgttgggaacaacacaaatcaagtacagtaggatttaaatgagaaagatgtgaaaggtggaagaaatgcaagtgtagatttcttccttctcattatggatggacgcagggaataatttggatttaaggttattaaagttctagacttctgaagacctgtttttttctagactatgatcaccctccctcgtgtatatacatgtatacaatgaaatttacttgtgccaggtagtcttaaacatctctggtaaaactcgctacattatattctaacagtgttgttaaaagcggaatcacctattgttcaaaaatggctacaagtagaaagcattccagaagccagccttggtgatgtgtgttgctgcggggtagtgaattaacaaagtattttgtgacagagtaacctgtaaacttttcatggtttcctcaaattattttttattcttggcaatgttttctattgagtctcttaattacttcatttcagctagtctaatccataaatgtttggaatgaacaacaaaaatgaaatgcaagcacaatttatcttttctgcatttcagttgataaaacttctaaatttttctgacaattcattttctttctctgactcctctttttctttttacatttttatgaaagtaatatattcacgtagttaaaaaaaatcaatagtactggaaggtcaatgaaaagcagcaggcccttttaaccattcctgaccatctgtcctgtgcttaaagagtcagtctcttaactcttctaactattccttgtggtagttacttcctttttccaaaaataggcttatatttttttttgtttcagcaattttagatattatctagtcattttacattatgatagctccattcgtttattattcattcattaatttattcaacaaatgttttttcgggtgaatagaaattttcatttcacctgagtaaatacctaggagtgagattgctgggccatttagtcagtgcatgtttaaatttgcaagaaattgacatactaatttgcaaagggtctgtgccatttcacattctcaacagtgatgtatgagttctagttgccccgcatcctcgccaggtattgtcagttttaccaattttggccaaatagaggtgtgctgatattgcattgtgttctt

SEQ ID NO: 317803 - DNA, 4001 bp, Homo sapiens
cccagaaaagatgactgatttaagaggagctgttgtgtagagaattagagcacagacttagtggttagtccacctgggttcaaatcccagccccactagttacaggttatatggccttgggcaagtacttaaactctctatgccatagtttcttcatcttaaaatgggggtgataatagtacctacgatgatgttttaagagttaaaggagttaatgcatgcaagatcttacttaggtcatgcctggtccgttagttaagtgttccaaaacattagctgttatttaatcaaggccacagaagcaagtggcagagtctggttccctgcatctccctggaggcagataggaggttatgtatccccgggacttccaaaaaggggatatgattatggccagaacccgtagctcctgatcaaggccaacccagcatctgccccgaggcaagctgggtgtgtgtggggagatgggggtgaagagtgcgaggaggtgggagaagtcccaggattattcgcagctggggtaaggggaggaggggctggacatcaaagggtgggcaggccagcttcccgcccccaaggctaggtggcctttgtcaggacaggccggacacagtccggacaatggaacgtcgtgttcactttccggccaacaggagtcactaccgagccaaggcagagccagttgcatgacaaaggggggacccataacggaggtcaagccgcccctcattaaagttgggccctttgtcctgccccctaccctgcctttgaagagggcggatcagagaggcctgcctgggggcaggaggttcacaggctcaggagccaaacagtagccccccttcccactgctcccgcttcccctcccccggggtcaagagttcagggaggaccctgagaaggtaaggtacagaccccttgccccagtctggccaaagagggctctttttcagcctgaaggatatgacccagcaatgtcttgactgtgtgatggggagacccagccctggccaggaaagtcacctgccctgttcacacagttagttaatcgtcccttctggggcgaacctgccgcctttgcctagggctgggttaggagtggaagaagcagatgaagagcacggagtcggtgttgctaaatgagtgtgggacacgagtctgggagcctgcgttctagttcgggtcttgctccgcggccgcaggcgcatttccgcacttcgcagggggtctcggtttccctatctgtacagagagagggttaggctgtgctgctgaaggctccgatagcctgagactgaggagagggagccaaagagcagccccccagggcgagagtggacaggagggccacactcccgggaacccgagcagggccggagcagaggtcagacagggggcggcctgggccgcgcccgagcacctgcaggtccagaggcgcagggcgagggaagggtccttaccgctgccaccgccgcctccggccgccacgctgcgccgcatccactcgtagggcgtcggcctctgcgctccgggcgaggacggtgtgcccgggcccccgaggggctgcgccaggaggcccgggccgggcccagggggcgccggcaccgggctaaagtctggagggggcccgaatgccagcgaagctgggctggcggcaggggccgcggggcccgggccgtaggcggcggcccagtcgtccttgggcgcagggaagggcgccccccaggccgtcgggggcgcgggggccggctccacgtgagagtagctggagaagtcggggtactgcgggggcgccgggggcggggccggggggccgtaggcttgcgggcccaggccgaggctggctggcctggctgggccggggtacacgggcgaatccttgtccagcacatagcccacatacatggtggccgcggggtcccccgcgcatgctgggccctggagccgccgctgccggccgccccgacgacgagcaaccgctcacctgaactcggctgtcctgccgccgcgcccgccccacccaggccttttatagctccgggccgcccgcggccccagccgaggcgggtttgcatttcaaagcggggggaagcctccgggccgcgaatcaaagggggaaacccgtcgggggcggggggttcaaaaggagacaaattgccgccccaagcgggaggtggactggccagggcctggagggggtgggggcgcggagggcgcgtcttgggcgagggtcgaggccgcgctgcgagtgggaatcgcttgccagggagcggcctagcggcctgaacaccttgtccttccggtggccgcgtggacggccctgcagccccattttacaggcggaggaacaagctcccaggggccgggggattctaggccaacttcacacagtgaccagcttgaggtgaggggcaacgcagacttcaaacagggctccggtctgtaggatcgcaggtccttaatcttttggcggggaggggtcacgacccctctcgtcatggaagctgtggatgtttttccctggggaaatgcacatatgcacatacatacacgagtcttccttacagttgggggactgcctgggttggccttctagagaaagttctcaaaaggcagtgtgtgtgtgggtgtgtgtgtgtgtgagttaggggggtcttctggggacattacaggaaacttttagtaaattatcttgatgactctctaccctctttttttaattgagaggtttcaagcatacacaaaagtagaattgtataatgaactgctgtgtacccatcaccccgcttcaacaactattaaggttttgtcacacttatttcacctactccccgcttttctgaagtattttaaaacaaattccagacatcatgtcattttacccctacatacttcagcacgcatctctaaaacacatggacattttcttacataatatgccattatcacatctagcaaaattaacacaaattcctgggtattacctaacacacagttcgtattcaaagtactccaattgattcaaaaatgtctttttagcagtctgtttgtgtgaatcgggatccaaaagccctgatccatttattatggctggagcccccttgggattttaaatgcatcacgtgttcctccactccatatgaaggactggcaaacatttcatagctacctaagggggagtgggggctgggaacacttgagggggtgtcagtgaactgggagtggggacaaggctgagggatttggggaagggtgcatgaaggacagggctctgggtcaggaagtcagatggggtccctccgcacaagggctttgtgccagggagctgtgcagaagcaccctgtgggattggatgggcccacatttcctgggttcctctcattgtgcagggatgtgtggtccccagaagaaggtcagaatcagggtcttatctgttcaacccgtctctctcttgggtcaccatattagccgggggctggtcagtatcatctcagggctgggcagatgtttcgggatcaggacataatttgcagggccgggagcaaaataaaaaatataaggtcccttgttcaaaaatgattaaggatttcaggatggtggcagcagagcattcacctgagcccggggcccttccacacactgggctctgtgtgactgcaatggtgacccgcctgggaagctggccctggtgagactcttgctcttctggggctctgatatgtgatagagccagagactcagccagcacagggctccctccgcttcctgctcagaggaaccctttccattgcacaggtagaagcattgaggctcagaaaggaaaggagtaatgcccagtgtttgctgcaacatgaaggctgcttgtaggagaggggaagggaaatcctggctgttgctgaccgggcggagcccttggctaccttgcaggagcacatggctgtccacatgtgtgtggatcagcacatgacacagatgagcacatggctgcctcagcagggaag

SEQ ID NO: 317804 - DNA, 4001 bp, Homo sapiens
gttaaaaaattggtgtttaagatttttttctttttttgagacggagtcttgcactcttgcccaggctggagtgcagtggcgcaatctcggctcaccacaagctccgcctcccgggttcacgccattctcctgcctcaggctcccaagcagctgggactacaggcgcctgccaccatgcccggctaattttttgtatttttagtagagatggggtttcaccgtgttagccaggatggtcttgatctcctgacctcgtgatccacccgcctcggcctcccaaagtgctgggattacaggcgtgagccaccgcacccggccgcttaagattatttttaataggccagactgaactgaggatgctatacaaagaatagaccaaaatgattaaaccccaaaccactgtatttacaaacacagatttttatcaggagatacagaaaaataacaaagatactaatccttggattactaattcatatagtttttcagttgttctataaatccaaaaatcatacataagtagaaaaactatgagcaaatggtaatttaagatgacagcaagggtgaggaggaaaaaacaataaaaaagaaatagacatcttttcatttttcaaaacatttaagaaagaaaaaaatggtaattaattttttttttttgagtcaagagtcttgctctattgcccaggctggagtgcaatggcacaatcttctgctcactgcaacctctgcctcccgggttcaatcaattctcttgcctcagcctcctgagtagctgggattacaggcgcccgccaccacgcccagctaatttttgtatttttagtagagacggggtttcaccatgttggccatggttggccaggctggtcttgaactcctgacttaaggtgatccgtctgcctcggcatcccaaagtgttgggattacaggcgtgagccaccgcgctcagccaataatgatttttttaaaactacctctgttatgatatagaacagaggaccgcaaatttttttctgtaaaggacctgatagtaaattttttagggtttgtgagtcacacggtctctgttttagctactcaattccacccttgtggcaggaaagttgtactccaataaaactgtttatggaaactgaaacttgaatttctaatagagttcacgtgttatgaaatatttttatgatcttttccctgcaacacttaaacataaaaactattcttagcttgagtggtcacacaaaaataggcagttaggcagatttggcccaggaccttctcctgctcactagtttagaagacgaatgtcccttctcatcgaatcttccccagcaaccgcttagtggaaaagtataaacaccgtccgcttagtagaatttataacatataaagcttctgggttacaaagggtcgtagttctaaaagaaatggtaggggcaccttccttccagtttagctctggcattcaatttgtctgtaaaccagagaggtagggggagggcggggaaacaggaggagaaattacagcttctaagggcccggggcactgtgctcaacactttcctagactatctcatttaacccttgtaacctctctccagggggtcatttttctctccttttcgctgatgaagaaagagcttcaacagtttaagtgaatgaggcaatcacggagacctgacgtgaccgagcgtgaattcgaaccctagcccttctgagcaagggcggagttccgggccacaacgcccacttggccccggctgaggaggccaaagggaacaacctgaggagcagggtcatgcggtcctcgctgcacgccgcctgggcgccggcgacctgcggtggcccgcctgcccggccttcccctccggagtccgcgggctcgtcggcgtcttgcatctggggctgctcctccattgctggttgaggggaaaggctaccactcaacaggcaaacgcgctcagaaaaggtcgcttttcccgccactaaatggacgccgggaaaaggcccgagggccccgccccttccgcccagggccccaccctttccgccttgtttttcggttgccgtggttactacgggctcctctttcatccgggctctactggtgaaaataactgcagacggctggtaaaaagttggaatagctttcgttaagcgtcggatgtgtagagtgctgagttaggggctggactagagacgttgggacatctcccgggaacagcagcctggaggggaaaaatctcctgacctaagtggtcattcggccttggcgcttggacacgggagtgcggcgacagccatatgtccatccatcttggcacttttccgtcctctgcctttgaagatgggtgtgcccggcaggctgtgaaagataaacattagagggttgtttagaagacttttttgacctgagcccatgaggtgcataccctttgtttggcggagaaaccagtggcttctgaagatcagggacgggccacaagtgcgaggcattgcagacatttcgaacccagacttccagcctggagacatccacacgcttccagtttcttgcactggtacttcattctgtcattatgattgccaccactcgtaactgagagttgcgtgccctcaagttttgagtgtctgcagggtacctttgagctttcttagctgtgtagtgagtggggggaatggagaaaatgaaggacagatgactgatttgtagtttttcatttggacactgtccttgccgcacaagcacagcagcttgaacctctttgaacaagagtcgagagttcttttacagctaattacccactagttaaacttgatcatactgtgctgttttcttcctctccattgtcaatgtaatacggctcctgacaaaagttaaattcgctgggcgtggtggctcacccctgtactcccagcactttgggggctgaggcgggtggatcacctgaagtcaggaattcaagaccagcctggccaacatggtgaaaccccgtctctactaaaaatacaaaagttagctgcgtgtggtggcgggcgcctgtaatcccagctactcaggaggctgaggcaggagaatcgtttgaacccgggggggcggaggttgcagtgagctgagatcgcgccactgcacttcagcctgggtgacagagtgaaactccgtctcaaaaaaaaaaaaaaaagccgggcgctgtggctcacacctataatcccagcactttgggaagccgaggggggaggatctcgaggtcaggagttggagaccagcctgaccaacatggagaaacctcgtctctactaaaaatacaaaattagccaggcgtggtggtgggcacctgtaatcccagctactggggaggccgaggcaggagaatcctttgatcccgggaagcagaggttgcagtgagccgagatcacaccagagatgcacgccagcctgggcaacagagcaagattccttctcgaaaaacaaacaaacaaacaaaaaaacagttcaaaagacacagaatggactggtggcgatggcccacgcctgtaatcccagcactttgggaagccaaagcggaaggatcgcttgaagtcaggagaacagcctgggcagcatagtgagacctcgtttctacttaaaacaaaaacaaacaaacaaacaaaaaaacaacaggtgtggtgacttagacctgtggtcccagctactcaggaggctgagatgggaggatcacttgggccccagccgttgaggactgcagtgacctatgatcgcaccactgctctccatcctgggtgacagagtgagaccctgtctcaaaaaaaaaaaaaagcacaggatgtaaaatcaggcattaggtttgctattcctacatgtaaacttatggaacattttcttgtttcctttcattttgttttacaaaaaggatgatcccattgttaactttttctctttaccacttagtggatgccttccactgtctcaccacaatcttatccttttaagcagttgcctatca

SEQ ID NO: 317805 - DNA, 4001 bp, Homo sapiens
actagtagaaggctgaaaatctcacctgctatacccataagatacagtttaagttcacaaagccaaaatcagtcatcatgaattttagaatatttttaagcgaaaaagtcaaacataaatatttctttactgaccaccaaaatacattatcaatatgcaaaagtaatgcaaaactctgcacatgtggtgggggcggagggtgagggataaatattcaacaaattatctggcttggcgatttaatgtggcagtagaataaaaacatatagaaacatttaagagtttgctctctaccgcttgaggatgcaagatgtaagctgtatgtaacctggaagagggtcatcaacagaaccagaaaatgatggcacccagatcttgaatctccagcctctagacctgtgagaaataaatttcagttgtttaattaaaacacacacacacacacacacacttaagagttgaacttttcccgttcccacattttgtatccttaaacctatcttcctggaaagggaacaagtcaactttttgaggtccccagttaggactacaatacttaatcatttattgaagaaaaacagtatctctttatttagggataatactatacttaaagaaactcgtactattaattgggaaaagattaatatacatgaaataagcaaaaaatacccacataattctaaaatacattcatttattcaacaaatatgttaatgtgtgccattggtcagacactggctttagctgtgtagatgaaaaagtctttgtacttgtagagcttccattctcatgcagacaatataaatgaatggataactaaatacatgatatgatttcaggtagtcagaagtgctatgaaatggtaaagtatacaacactgcctgcaagtactatcggaattcaggatagggaagcttagaaaaaccaacccggaaggaattagtccataataatgcttaataaatgttaactagctacattattattatcattatcattatcatcttcatcctcattattgcattggtctctgaaagatgagaagctgtaaacatgaaggctaaatcgctgtggagatgctttcaagcataaaaacataagagtaggaggcaagaacgaacaagggaaatttgtgagacacaaaagaaagtagtctgatgagagcagagggcagagaagaaatgagacttgctaggtagaatggtcaaataatgggaacctttgaaataaaataaagtgcctactatgggggggcagttccttccctgtacgtggtgcctatctcaaggcaaaagtagagaagagatttacgacgaggattttattaggttggtgcaaaagtaattgcagagaaaaaagaagtgttttacggaggtcattttgacaagctgtatttgattttttaaaaaagagattaagataatacattttatgttatgtgctttttacctaattttttaaaaatgaagaagacagatgaggaggaggagaaagagttcagatgactgctaggagatgaaatcctataccagagagaagaaagaagagtgacccgttctgccctaggtcttttggttatttgaagtagctgcttctccaccccacccccagaaacagtaacaagcactcaccaccttcttcagagagtgtgtgagagaataaaggtcaggagagaaaacatgtttagtgcatctgaaaggaaacccgcgagttaaccacttccttctgtccccacccttccatctttctctaaatattggtgaggttatggagcttgcgttggcgcgcgggaagccgagaagaacgggactcaaagcccggctgggaagtcaggtatctagttggccggcgataagggtttcaccttcaggactggagctccacaagattcaaccgttatatcaacctccccggcccaggtcttaccatcacagcgtcacaaactccaggtcgcctaggcgctgcgcaggaagcgcttgccagccccggacttctgcgcgcgctgcatgcccattggatgtgctcattcccaccccagccaatcccgaaactcgctcggacgctgacagaagactgcgccgctgctttgggattggtagctgagttttgtgtcgcgccttttctgacgatgcgaacaacatggcggcggaaagtggtagcgattttcagcagagacgtagaaggcgccgggacccggaggaaccggaaaaaacagaactcagcgaaagagagctggcagtagcagtggcggtgtcccaggagaacgatgaggagaacgaagagcgctgggttggacctttacctgtggaggcaacactggccaagaagaggaaaggtagctgcagacatagtaccgggacgaattggagtgctgcgtccgctgagtaggagggttcaagccagatccgaagagggatgatgtgtggagttttgtgccctcagaacagagggccgtcctctcacttctggctactccatacttgcatgtcttaacgaaatagtgatttaagcgtagtacaacgtctttttgataatatctaacacttttgatcattgatttgttatgacagatgctaaaactaacattttcctattcttatgtgtttggctcctctcatttactccccacagcagccacatgaagttggaatttcgaactcttatttaggtatgcaaaagggtaccagttctctttaaggctttagttcaggagtggtgttaatgtattaatgtgttggggcgcgagaggaaggcggtgcttatttcgaatcatggtaggtaaagataatttcaactctgacacttccactaataaattttcgcatctagggaaaatgacgtaagcttcctagatcacagatttgttttcatccaaaacccgaagtctgtggttttgaaatcacgctcttgatacgatgggctgagtctttttgtcactaacgaggaataatcacaaattattatcaaataaaaggggtgggaaaaggggtagattaagttttcttgtctttgttgttttgttatcttgtttttctgtgaaatgttttccttaagtatttaagacattttaaatgtggtctaagctcaaatcgtactttagcaccttcccttaaaaaacttcaatgatttgtcattattttctctctcttttttttttttttttttttttttgagacggagtctcgctctgtcgcccaggctggagcgcatgcagtggcgctatctcggctcaccgcaacctccgtctccggggttcaagcgattctcctgcctcagcctcccgagtagctggggctacaggcgcacgcccagctaatttttgtatttttagtagggacggggtttcaccatgttggccaggatggtcttgatttcttgacctcgtaatctgcctgcctcggcctctcaaaagtgctgggattacaggcatgagccacggcgcccagctcattattttcattaaagcccaaactccctcacatggcatataaagccctttatgatgtgatctctccttaccttcttagtgcatcttccattaccttcctctcccaaccccttactttgtactccacccattctaaaatcactcgagaatcggtcttgtacttttttttcctctggattcctacccagatatggtgtttctaccgggaataatttccctcaactcttccactgaactgacttttggtcaacctttagcacttagctatcatcttctctgggaagcctgtgacttctccagtctggactggatttctgaagcactttgatcataactctgaggtagttatatatcaatactgaatttacaggtagccttcaaattttatgtatccaaattttgaagaagctgtttttttgaacgttgtatattgacacccttacagtgcattatcatttttacttcctggtcctcttattaaatgtttccatagtaaccattttatttatggcacttgccgcagtttctaattatatatttattcatgtga

SEQ ID NO: 317806 - DNA, 4001 bp, Homo sapiens
atcccacccaccctaccctcaaacctatatttacagtacatatcacatattttaaatattataccccaacatattgtgtcctgtgatctccccacgtggacagacctctacatccttggagggaatggaggtatttgtttcctcatagcatggtcagttataagtctaaaaactgttgttaaccaaattttaaggttatttcagtcctatgtttttaaacaataagtaaactaacagttaatagtgctccaaatctttatggcttttctggtcagtctcttgttccaaaattcaaagattaggattacaatgtttcctttgctctcatccctcacacagtgccaggcctttataaaacactctcccatgggggaaaaaatgcagccaggcttctgctctggctcaagatgactccttcttaacatactattcgtaaagtgtcctcaattcacctgttatctcctatgccctccactttcttgcaaatctgttctccaaccacactgaatttaaccaatgtttactgagtgaatttaattaagcaaggcaaaacgtgtcttgcttttccatactttaagtgctccctgctcttctctttgcctggaatgcccttccttttttcacctgacaaattcctaatcatctgtaggaccccaaaaaatgccacctcctctagtgaaacttccgcagtttccttagacagaggtggtcattcattagggtcttccacatcctgatgaattatttgctgacacactctccttgctacatccttagctttttagaatcaggactgtttcattcttacattcccagcacagtgtctgacactcaatgagtcccaataaaccaatgtcattcatccaaaacacaccttttaaggaatgtataatacaccctcttaagaactgtagtcccctgagtcctccagcaagacgtgtaaagggaattgcctccggaacacttctggaatcgcaggaagcctgtattcaagtcaaagctcttacaagtgctattattgggaaccgctgatcagaacgcgcttctcaggaccacgttcagctcatatataaaagccatcgacgtgctgctttggatgaaaatcgttttctctagattctctggggctacggctagtcacgctaaatatcacttatccctaatagcgctcatatccctggagagatttttaaatcaattgcctaacagacctcactacgtacaactttgaacaagtctgtggggaccacaaaagcacagatgacagggttcttaaggttaacaaggcctcggtcccacactaagcttttaaaactcgggaggcagcagttgcaaaagcaagcctcaggctgctcaccttctaggatggacacgacgatgagcaattggtcggatttggagaccatggttgcggtgagcggtccgggggcgaaggcggctggggggaagtgaggtccagttgagtcgcgggtaatccgggacccccggcgggacccccactgcccgcccccggtccctgatgcccggaccccgctccgcagccaggtcccaccgccgtctgctgcagcgcgcccggctcctctgcctcgggccgccagcccagatcctaactgtgccccgactcaaggaaaaagccacgctgcagccctgccagtctgcaagcagagacaagcccgccacccgaggaccttttgccgcctgcgtagccgcttttcaaacgcccgggcggccgcagcggccgccgccgcgcccagcttccgcctagcaaccaggcccgcaggcccagtgcccaggggaggttggaggacaacgggtgatagagacagagcagtcaaggctagaacgcccgtcagcgagcttcgcctcccgcccttttacgctctgttccagagccctaaggaggacgccttcattacctcacagcgccctctgctagccggacgaggagaggcgggcgacttggtgtgggaccagctgcgcaagcgcactactgctgtaaacgcttcctgaagctgcgtagcctttaaggagcgtgagtgtagcgtattacctgctttatgcttcagccacaacctgagagttatattagtggggattaaaaaaacaaaaaaacctagcttagttgacgtacccagtgtcaacactgcttaaaaaattaaatcacaaaaaaataatgacttaaatctaaactctaaagtccctaaatcgtgctcacgcggcacctcaaatttccgacctttgaaaacaagtagcttcaatacggtaattactgtacttgttaaagctgacgtaaactccccgagaatttcctgtcccttagaaattacccctaaaacaaaaacactgtcacgtgggcaatgaaatataaaggttcttccacccccgatgacaaagttattagcaaactcaaaaccaaaaataaacaaggcattgaggtgctgtctgccgaccctttccccttaacgtctcccaaattcagatttaagaaacggttcaagacttgtaaagggaacggcctcctaaacactactcaaattgcaagaagcatgtattcaagtcaaaggcaaagttcttttggaggttatctagcttgaaacttaaataaccgaattggttggagcgatcgtggacactattaagtttgggaaaaattctgcttcggaaaacaaaagtaaatcataataaaataaagctgcagagatagcactaggtagtggacataagtgcggcttctcctattactttctggttttgtaaattgagaagttgttttgagagcaaatataatatctcgctgttttctttttcttctattgcttccttgttttggaaatttagaagttattttgagagcaaataatataatatcactattgttttcttcttcctcttctttattcttccttctttgctttctgcccaaaagaaaaggaggaatatgtagagattggactaattacttctaaggccctttcaggtcctatcacaggcattcttaaaatgaagcactattcaatgtaaaatcaaagtaatgatctactttggattcatcattgaacaatgcattatttttgtggaagatgtcaaacatactttaaagaaagcagaatgatataatgaacccccagttacccagaccccagcttcaacgattatcaacttaagaccaatcatcttcatctgttgtgttatttttaaagaaatccccaacatcacatcaattcatctttttggatacgtacttctaaaagatgaagactttttggccaggtgtggtagtggctcacatctgtaatcccagcactttgggaggctgaggtgggcggatcacttgagtcaggagttcgagaccaacctggccaacatagcagaactccgtctctactaaaaatacaaaaattagccagacgtggtagcgcaagccagaaatcccagctacttgggaggctgaagcacgagaaggctgaggcacgagaatcgcttgaaatcatgaggcagaggttgcagtgagccggtatcatgccacagcgctccagcctgggccacagagaaagactcagtctcaaaaaaaaaaaaaaaaaaaaagataacgacttcttaaagaatcttaaaatattaagtatttaaccacaatcccattattacacttaataattaacaaaaatttcttaatcccattaaatatatactgttcaaatttctctgattgtctaataatttgtttgcagtcggttttttcaaatcaggatccaaacaagttccaaaatacaatggttggtatgtctcttgtcttttttaatgtatatggttaggctttgtgcccccaccaaaatctcattttgaattgtaatccccacaacccccaagtgtcaaggaagggaccagatggaggtaattgaatcatgggggtggtttcctccatgctattctcctgatagtcagtgagttctcaggagatctgacggttttattaagcgctcttccccctttactcactcact

SEQ ID NO: 317807 - DNA, 4001 bp, Homo sapiens
tcaaatcaataatctacagttttgcctcaaggatttagaaaagtataaaataaatgcaaagcaagcagaaagaaggaaataaaaaaaagcagaaatcaatgaaatttgaaactagaaaaacactggagaaaaatcaaacccaaagtcggttctttgaaactatcaataacattcacaagcctctagcaagactaaaaaagaaagaatacacagattatcaacatcaggaacagaaaagggatatccctgtaaaccttgtagcactaatcagggaagaagggaggactcggcatgtcccgaggtcagctgccctctcacctgcttcctcagagccctgtggtgcctactgcctcaggatcacttggattttgtcacgaggttacagttccccttaaccactctacagataataacctggacattataaaccgttaagttttccatttgagatattctttcaggacctggggactgatgccagctggtctaaagggccccgcaagcggattcaccaaagaatgcagtttccacaccctgataattccatggcccttacctccaccaactgacaacaccaatcttccagctcctcacagtcctgttcctctaaaacccccagctcaggctgggtgtaggtggctcatgcctgtaatcccagcactttgggaggccaaggcaggtggatcacctgagatcaggagttcaagaccagcctggccaacatggtgaaaccccgtctctactaaaaatataaaaaattagccgggcatggtggcgcgtgcttgtaatcccagctactcaggaggctgagtgaatcacttgaacctgggaggtggaggttgcagtgagctgagattgtgccactgcactccaacctggacgacagagtgagactccgtctaaaaaaaaaaaaccgctcagatctccttggggagatggattgaggcctccttccacctccctgctgggcccctgccagccttaaactctttctctgctgcaaaccccactgtctcagtgtattggcctgtggcccccacagcacctgactgaacctgttggtccagtaacacctgcagaccacacacagacattaacaggctaacaacagaacaccagaaacaactcaacacacacactccacaagttagctcaaataagccaatgccacaaaaccccacacagccaagactcgcggtgaactaatatgaacggttctctaacaaccagagatacagaatttgtcatttaaaagcttcaaaaacagaaattgacatgtccatatggtttcactggaaaattccaggaaacattcaaacaatgagcacacactctacagaacctcttctaaatataagagaaggcaacacttctcagcagtttatgagctcggcttcaccttgacgccaaaaccagacaaaaataagccaaaaagaaggaaaccggccaccaacatcctcaagaaggccgagcgcaacaatcaccacagagtgggcccaggagaaccagggaggtgatccccagcgggagggcgggctgcgctcctggacagcaaggccggctccctcttctcagcggatgtaacccccagtcacggaaccagtgacccgatagacaggcaggggccgggacgccgggacccgaacgcgggcaggggccgcacctgggcacggggggtgggtcgctcacctggacacgcgcgccccgctcgcccgcgaccgttccggacgcccgcggcgcctgcgtagacgggtcccgcctgcccacggtccgccgccgccccgggaagctcggcacccacccccccgccacctcacgcttgcacccccgcccgccctccggcgcacccaggtcgcggtgaggccctaagccgctcttcgcccgaaccgcctcctcgctcagcaccagccgagggccagcccgcgccatgtttcaaacggagccctcggacggcgcctgcgcggcgggcggggcgaggctacgagaggggcgggacctgcgtcggcagaaccgagagcctggcgggacggggcggggcctgcgcggcggggcgaggggcgtggctgggggagggggcgggactgcgtgggcggaaccaagagcctggcggggggttctcctgaatggcggttctcccaggtactggccacgcgaccccagcccccgccccagatagctccctgtcaaggcttccctgggcgcggccgccttctaggccccggcccttgacacacgcggtgtcctcccggggaaaccccgagtaggcgcggtggaatcgcggctggtggtgggcatggggaccctgccccatccacactccgctcccaccctgaacccagcgcccccggggacccccgactcacctagactccccacccaacccgacccccccgcggggacccctccagacaccccagcacccgcccggagccttgtctgctgcacctcccgtccagccccgggcctcccagaggtgggcgggagctgagcttctccccagccagtcactccccacggccggtccttctccaccccagaacctccagagatgtcacaggcccagcactgtggctcgtggctgaccgcgccctggagggtctcgctgtgtttatccttgtgaggtccttctacagagctttcaaggaagacagagttcagcctgtttattgggaagactttaatcctgctcaagacatctactgtgtcaccgtaccactgtggcccagcgcctggtggagtgaatccagacccccaggggtgtcccctccccgcctttctcctggtgtctaggggcacccagaaaccctcaccccagattagaccagctcgttggcaacatccctggtatgtcacagcctggggggtgatagacaaggcagggtagtggtggggggtacgtatggtggtagtagacgagggtatacacagacagagggtgtacatggggaatgtgtgcaggggctgtgtgcagggagtgtgtgtggatggtgtaggggagtgtgtaggggagtgtgtagggggtgtgtgcagaggttgtacacggggtgtgcaggaggtgtactcagaatgtgttcagggagtgtgtgcagaaggtgtacatggggtgtatgcaggaggagtgtgcagagggtgtacatgtagggggtgtgtgcagacagtatacagaaggggtgtgtgcagaggatgcacacagggtctctgcagggagtatgtgcagtgctgtacataaggagtatgcagggggtatatacagggtgtatgtgcaaggggtgtgtgcaacagtgtgtgcaggaggtgtgtgcagggtctatgtgtgggggtgtgtgcaacagtgtgtgcaggaggtgtgtgcaggaggtgtgtgcaggagctatgtgtgggggtgtgtgcaacagtatgtgcagaggtgtgtgtaggggctatgtgtgggggtgtgtgcaacagtgtgtgcaggaggtgtgtgcaggaggtgtgtgcaacagtgtgcagggggtgtacacaaggtgtgtgcaggaggtgtgtgtagatgtgtgtgcaggaggtatacacagggtttgtgcagaggatgtgtgtgggaggtgtgtgcaggggatctgtgcagggagtgtacacaggctgtgtgcagaggctatgtgcagggggtgtgtgcaacagtgtgcagggagtgtacacaaggtgtgtgcaggaggtgtgtgcagaggtgtgtgcaggaggtatacatggtgtgtgaaggtatgtgtagaggtgtgtgcagggggtatacacagggtttgtgcagaggatgtgtgagggagttgtgtgcaggggatctgtgcagggagtgtacacaggctgtgtgcagggggtatgtgcaacagtgtgcagggggggtgtgtgcagaggtgtgtgcagggggtgtacacagagggtggtggcaggcggtggatgcaaggctgcatctgttcagcccaagacgttccattggtccagtggtgttagagcacatttggtcaggttgcctt

SEQ ID NO: 317808 - DNA, 4001 bp, Homo sapiens
agttctcttctttttttcctctttgttttgtccactacaagctcacttctatgaaatggaaagaaaaagcccttagtccactttaattctctttactaacagaaattagccaataattaccttctaaatttcaaaaaagaaagtactttggagaaagatagggaaactttccctttatgagtcaatgacctgtttattccatagtctaaattgctataaatctgaacttcgcaaaactaaagagtgttacagattattaaaagaaatgaggaccaaacttttctttttcccagctttttatttattcccactaatgttactgtggaagaaacaagaactgtgaataagcaacactacttttatgtctgaaactccaaccaactccaaccaaaaaaacaaaaacacgttatcctacaagaatgttaaagaatttaaaaaaaatctccaaatgaaaccaaaattcataactgacaatcactatatatcggtttactgttgatagttctgataattatgttcataaaattacaaaaaaaaagtgaattaacttatacagtattttagcactgttggttcaaaatgtttttagattacacgtttttaacagtttggcaatttatgtgtcatttcctccattgatattaacaaaccatcgaaaatattaatgagtctaaacatatgacaaatattagatgccaatatacaatgtttgtgcttcattctatataaaaatgtgatgagtcttgtctcatttaacatgtaaaccggaggttaacttctcataaactctggaaacgcttaaagaaaaaaagcaaaaattattttaaagccagaaatgttttccttaagagctgcccatctaaatgtgctccaaattttcaaatggagccgcaacactggaataacgagttttgaaacacaatccggtaacacattaacatgtcaaaccagttgactgtacttaaaacacctatctagttgcatttgaaagtcgttttggtctctgaaagctccaaaaaaaaaaaaaaaaagctaggaagtgactagtaggtgcagtataacaaagctgaggaagatcttcctttcatgagacctgacttgacacaaacttgggtattcctggggtcagtcttttccttcctgagacttttggaggccaagtccagaaccgacccacccctgaccccatccaagggtaccatgattatcccttagcagaacatggaatattttcggagtgtcgtaagtgtatggatagttttacggtacaacgtctacatagtgggagagggcaacagagggttagaggttagaactgaaaggtaaaaaaatgcaagaaatttaggaaatccaagagacagactgccaattaaagtcactaaaatgggtctccaattacaccgtaaagcagggccctgggagaagaggaaagagtttttgttatttccaaaatttataggtgggtgattgcattagcagcggagcagccgaggtggggccctgaccaggcacacggatgaatgaagggatgtccgcgacctgatctgagaaacaagagtagaagcctcgcgatatttcattcccacctcgctcgcaactaagcccaaccttctggcagtccaaagccctacgcgctgacagaaataacctccttagcagaaatgcactggtctcgttccctgcagggcatcagagcccagagggtgagtgatccgggcaggctgccctaggctcctttcccgcgtcccaaactacatcccctgcctcgcctcggccccaaacgtcctcccttccacacacaccctccctgggccccgctccggggtgtggagagcactgccgcctccttattaccgacctcagagctaaactcattatctcttcgcacagagacgttcctctcaagaacgattttaaccccctacccaaggcagcaagacgcccacagccgttcaacagacacgaacgacctcagcggcctcagggacctcccacaacatagacacttttgagctggattggttgaaatgtcgctatggttctgcctattagggggcggaagctttaccagttctattttcattgggtaggttttacgtcaatcaaggaaaaaaaaattttttttctgtgccccgcccacctcctaacgcccccccgcccccccaatctagggccgctctcgcccttcggattggctcgatgcgtttttccccgaatcctttgcgggtccggcctccgatccctgtgtggctgtttggcgggtgggcgctgtgttcctctctcgtaaagccgtgcggtctgtgggccgccattcagaaactggatggacagcttcggcggtgggaagggaagggacatgctgcaggccaccctccggctagaaggagggagtacttgaggaacaaggtctgcgaaaattggctgtgctctgttctaaaacttggaatggcctcagtacctggggaatgtgtttaaaatgcagacttaaatgtccgtttctccattctaatttcagtaggtatgaatctgcgtttttactcctcacaagccttccaagtgattctgaggcaggtgctgtggctgtacttggattatcacagggttagattatcaggctatttatgatttagctgtatctaaaccacctttccctctctttcctcctttgaactgtttgaaacggatttgttcccttctgtctcttatttttcagtgctgtaagctgttaacacacatgagactgtcttcactaccaaaccaagtctcctaaagctcacttgaatgtctgcttattcgtgtctcttactaggttcaatttcttggaggccgtgattatatctatttaacgcttttccttgtacctaataaaatgtctggtgcgtaggtgctcggtaaattgagtggaatcttttgaaaatccacaaaatactgagctaaacagcaaatctcataaacgtgaataaaatagcctgaggatgggagttgaaggcggagaatatataaacattatatgtttaagggatgtatataaaattttagagaagggagagaacacaagatatgcttcttaaaggaggtgacataaacgttagacctagaaggatgggctaaatttgcacaaggaaagatagtatgatagaataagctaaaaattagctaagggatagcacccctaaaaaacaaaagtggaacttttattttgttcgtattttaaattttaaagtacctttataaatcacctttgagtctaaaaggaaagagaaattgtagttactagaacataatgatattgaaaaaaactatatgttaaaattttaagatacagaccaagttataggagaacattattttaaataagaaagaataaaaataggccaagcatttatttgaagatgttagaaacgaagaacaaattgtataattgaaattaggaagaggaaattagtaaagataaagtttgagaacagtgttttaaaaggaaattggtaaaattgataaagtactcataatctagtataaagctggtttttggcaataccagtgaaattcaaagacttataggaagtgtaacaagaaaaggaatagtgccactagtaaggttggtaatttaataaaagggaggtttaaaaattattaaaatattttatacaattttataccgccaataaatattaatagaaaatgaaatagtcacttttcaaggaaaacataactcaaaaaaggtggaaaactgaattaagtcaataactacagacaggactggaacaaagatgccaaagttctgtactcacaaataaaaagcctccagcccactcagatttatgattaaaaatcataagagctaaatcttgtgctttaaactcaagtcatagaaaatgatggagagcttcttagcttaatttttgaagctgccataatctttcacatcctaaaagaacatttaaagtcactcagtgtaagctcagtgatgatgaaggctatgcatgtttctcaccattgta

SEQ ID NO: 317809 - DNA, 4001 bp, Homo sapiens
ttgtataactcctagaccaatacttgttcaagtaataatgctgctttccataactgttccttattttattctctatgatgttcttgcttatccaaacagtatgtatgaaagctgataaactaaagtataactagcaaggtcagaaaattccaagtgtcaggcctggcgtggtggctcatgcctataatctcagcactttgggagctcgaggcaggtggatcacttgaggccaggagttcgagaccagcctggccaatgtggcgaaaccccatctctacaaaaaaaatacaaaaattagctgggagtggtggctagcgcctgtaatcccagctactccggaggctgaggtaggagaaacacttgagcctgggaggtggaggttgcagtgagccgggatcacaccactgcactccagcctgggcgacagagcaagactctgtctcaaaaaaaaaaaaagaaaaagaaaagtccaagtttcagatcaaatacaaataccactatttagttttctatctaacattttttcttaatcttcctaattgccaaaactttcctgtttcttgtccacccccatgtctccatcactgtaattaatgttttttttatatagtatcctgtgttacacaaaacatgctggttacaataagcaaatattcagtgctcattatctcagaaaatattttaagccctttacatgaagcatctcaatcctcaaattttttttaaattttattttttataaattacagacaaagtctcactatgctgcctaaactggtctccaacttttgagttcaagtgatcctccttcctcagcctctcaaagtgctgggattacaaacaggatccaacaagcccagccgtgaactttaaataagataaacaatagtttaatcccctctttatggggcaaaaatcagagcctcagagattaagtaatttgccctaattcacacaactaataagaggtagaaatagggtaagcaaacagtttgactccagtgcccacattcctaatttctatatatgataatgcatataactacatggattgtaaactaatgtgcagataactcaaaatttgagagctacagaatttaaagaatcttctttgcaaacacttgacccaagcaagaactcttaactccttcacagataattaaaactccaatctgaaaataaaaaagggccacagtaatatttcaacaaatgtctggctcagcactgtctaaaactttctccagtgatagaatgttttctatgtgctgtccaatatggtagccactagccacatgtgattattcagcacttgaaatatatctagtatgactaagtaaattctgaatattttgtaattgagttcaaatagccacatgtggctagtggttaccacactggacagtacaggtatagaagacaaaatgccagaaaaagatgagtgaaaaaatttttattgccttcatctagaaatttcactaacagtcaaaacaatttaaatctattatacatgctccagcttaattattagctcaaatataaacttccaaatagatttaagtaaacaaaaactttctatatttaagatctactgtgtatctgaatgaaaaatataattaaaacctgtattatgaaaaaaggttcgtatatcagaatttttttagtatttggatagctaagaggaaaacctgaaaactctgctacctatgaggaaaactaaataacaacaataacaataaagaaaaaagtcaagttttcaactctcttcatagtaaacaattgataacaaagtgcttacttaccttgattctccactactgtttctaacactttcttcatcactgtgtccattcattgtaaattattatcaagaagttttaaagtaaaatataaatcttcccagtttaaaagatgaatataaatactgactccttgaatataaaaattcacagatgaattttcttcaacagtcacaggttttctgggactctcctttgattcacctaaagaaaatatattaataaattaacaaaatttcctgcagaaaaaaggtaaattaagccctgtctaaaacgtataaatctacgtaggccaattagactacagctgttaaggaagaagtgggggccttttattaaatacttaaaatatctagacttgtaataactacactcctgactgctaactagaatttagtatgctactgctaatatacttcggacagaaaaaattaaaatatttgtggagtgaaaggatttttagagactaactgcaactaacaatgtttttatagactcctaaagcaaggtgatacgatgtaacatatgcatacatcccaagagtagataacggagtcttattagataacttggtcgaataaatgaagtgggggggggggtgggaggaggttacctttaatcaagccctcactcctatcaccaagaacttcatacacttgagtgagaaagttctgaaaacgctcccatgggaggaacaggcaaataaaagataccatatactctcaacaaaaatgcatagctcaaaataaatgtgttatttaacaggtaaacggatagtgggatgataacatttaaataatacttaaccagtttgcacttggtttttattttgtgaaaaaaattgaaaaggtaatagaatatacactatatctgattttttacgtaaaaaatttggggcaagaataatgaaccaagacacaccatttccacctttaaagatttcagtacaacactgaagaatcacctacaagccatccacgaataaacaaaggagatctctggcaggggagggagaggaagaagcgggggaaggagacgtcagatccttccccagccagaaagtaccgagacagccaactgagagcagagctgtcctccgacctcagcaaagagaattcactcctacgattatttccattccacaagagagggagggaaacagattgttaccaactcaatgatagcaaagtctgcatctggatcaggatgttaattctctagactactgtccagtagactctgcaagaacaggttatctaaaaagtaaccgttctactcaacatttattcctaatgttaaatattaatctcaaccctagtcaaagtgccttactgaacaattaagtcttaaaaaatctaagtatgttaacaaactgcctttcccgtttcttcctttaaaaagttcactccccttttcgttctttccttttcaccttcctttcgtccctcaaaatggctttctctgtacattttaacttcctttcccctccatctcccttatccgaataagtcctctgagacccttttcacaaccctgagttctgaagctccaagcgcacacagcgctgtgtcctctcaagcgtctccacaatgactaccctaagttattaaacctcttcaatcctctgtcttttagcagttgctttgctcctgctaagtttttaaagcggcactcgaaagaggtttggaaaccatcctcactcatccatccagcgcgctccaatcagcctccctcgcggacctgcccccctctcccagggcctccatcccggtccaggagtccctcttcccgcctcaaacttcccgcagacccgccccgcgccctcccaggctcgcccgagccgccgccccctccccctcccgccgctccccacgtgctgggagcccgggtcgcggcaggacccacgcaccggctaagtgctagccattcgcgggtctcctctcgcggcccggtcggcaccaagccgaagaggccggggcagggccgccgggccggcgcaaggatgcgttctgcggccccggcctgtactcgccgctcacacgccccctgcgcgccaggcccgtacaccgccaccggcactcacagagccacccggccttcacccggccgctgggccgccgcctgggcaccgcgccgcgcccgccctccgcccggccggttcctgtcctctccgccacatcctgacccgcccgccgccccctttct

SEQ ID NO: 317810 - DNA, 4001 bp, Homo sapiens
atgtgaaaagtactatccgaatcaggaggaagcaatgaggctacgagtagaaaggcataaaataaggaagggctgcccccctttgaccgggaagcaaggaaatgtggaaaacacagagaaacctcattcggtacaaccctgctgcttcccttgcgttgctccccatctcagcaactggctggactggaaagattcacttctctgacctaaagaactttgatccgctgagtttagaaattctctgtccagagccgcccacattccgggaaaaagaccgcgcctcttttaaactgacaaaaaaagttttttcttgctgtggctgcctgtggttctgggaaggacttccagcctctgcttatcaccgcggccaacaaaatgcactggaaaggaaccaatactagtgtgtgctagtacagtctgctgttcccaggggtctggcttattagcgggtgctttcctcttttcccccaccaccaattccttacaacatgcccatcctctcagggttttattgaggtgtggcggggggatgggggacggcttggtgctgaactgtagcggctggaaggagcagcgcgctggcacggtggggatggccaaggactcccagtatgtggagagttgagccaaagggaagggaacacataggaaagggtccgggacagcgaagacgattcctcaatctgagcagttccaaaagtgcgctagatccagtttaaacaaaagagcaagatccaaagccagaacactggatctccagactagttgtagctagcatcctccgtcttcccttcctgaagaccacgcccctctggaccgattggggaaactaccatcagcaggggctttcagaggagggcagagtgggaatggcctttggtttagctctaaggttccttttctaacctctccgacgaggtaaagactaagggacaagcgcgaggcggcaccgaaaacagcaagtgaggaaggcgaataaagccaggcaggtgtgaggagggtccagattgcagaagacgaggaacgggctacgaattgtgggcggatgcaaggggtggggagggcgggccagggcctgtgggagcccgaagcacgtgctggcagagaagcagcggaggggctgggcaggggctaggaccggttacagagaaaggagtcggggagactggcaggctggaaagccggcgcagggaggtcacctttgatgtagacatcgtcgtcggcgcgcatgaaccactcatacttgtccaggtagtggtcgtgcatgtacttgatcatcatgaaggactttttctggggaggataggagtcgtccacacccggtagcgcgatgacaggcaggggtggcgggggctggccggcgttggggggctgctggctggaaaagaactccacgcggcccgggatgaaacgcgcccaggtccgctgcgcggccagcgcgcggctgcccaggtacttctgcgcggtcatcacccccacgtacaggaagtcccggggtcgggcgctcggggcggcagcgcccccgtccccgctgccgttgtggctactccccggccggccgtctctccgctgcccagccgcgcccccgtcctcctcctcgggctccccctcggccgctggagcaccgggaagccccgtcgcgccctcaggctcgcgtcctcgccgccgctgctgcagcggaggtggctgctgccaggggctgcttcgaaaactggtgatcccgggtgctgcctcgggcagcggtggcccctggagatcctggcgcgcggggggcggcgactgctcctgccgtggtcgggactggggctgggggagcggctgctgagcgccggcgcgggggccagcagcagagcgaccgtagtaggagcagaggctggagccacgtctcttcctctcgctcagctccgccaccctgggggcgatgagccaggacgcggcggtgaagcccagcaccagccctaatgccacgctcatccacgggcggcgagagcgcacagccatcgcggctgtcccgggcgcggacgctcgctgggctgtcgcggcgcggcacgcggtttccccggctcacacccgcccctcctccgcctttgcgcccccagccgcggccgcagccggccgcctaggcgccgacaccggctggaggtcgaagcgccgcggacgcctcgactgccgcgggctgcagctgcctgccgggctcccgctcagctctgggccggggctccgagcaagggtcgggagtgaaacttctcccggcggcggcggtggcggcagcggcggcagcagcggcagctggaggagctgcaggaggaggaggaggagcagcggcggcggcaacgcgtccgctcctaggctgccaccctgtcagtggcgcgcctgggccctccctcctccctccttcccgagcccccgccctcactcccgcctcccgctccccccgccgccgggctccgagctggcccggaggaggagccgcaggcggcaccgctgccagccggagagaagcgcgggccgcggtatttccccgtcacccgcccttggacgccccccgtccgcgcctcagtccagagccggcctcctctccggaaggaaacgatccctgtcgggccgcctccggcttgcagcgccgacgccccctcttccctcctcccccagctcttgctcttcgtcccatttcccgtcccgtcccgcccctccgctggcctcccgacactcgtgtctgggggctctactggcctcctcccggcgcctaggctccgctgacctcatcggcggagctcgggtccgggagcccccagcaagttcgttgctgtcccaccgtgctctcctcccccggcccacagccgggtacgtcctggcgtgacccttaccactctgccccgccccaggtccgccagggcgccactcttcgcgttttccgtcctttccacgttgttcttaccgctgccactccgcgccttctctctctagtcggtcacttgtcaggaaaccaaacgtcccatcccagcacctctcctcccagcctaacttccctcctacctgcatcgtccaccagctctcctcagtccttcacagaagcaccattgtcgttagggtctctcctaagaaaatctctgagggattggaaatacttatcctgaaaggctaagggagttggtggtgtgtgggggttcaatccccaaagaacgtaaaaatcccatgtcctccacctgttgagttggaaaatgtggggctgcctaatggtctccccctcggctctcctgatgatatctgttcaagaaatgagaactatggtctattttcagtcttggtagaagattggctcagtgggactggcaaatagtggagaaatgggcacacattcacagggccaataccctgaagatccaaacgaaagaaattcttacccccacaaaataagtgaacttaatcaaaaaataaaatggaggatatgatttttattcttgcctatgaaccgttttattttctaaggcaaagacaggaaaattttacctctccaatgagggaggaaaattgtccagcaacagaatctcaaaaaaagttaagctgtattggccaaaatcattgtgccttagttacgttaggaagaaattacctgaaggtatatgatttttgaagaagggagcattaacaaatttctctctaaaggttgtgcataaagctatagtctggggtgcatttggcatcccaagtacttccttctcttcaaatttcagtcttctgttttagacatcaaacgcaaagggatggtattgaatggcattagacataatggctcgatccagcgaggtgctggcagcgtccctggaacactaggcctgcctggagcctttggaggaatggttctttccacaccggtccctggctgtgcatgagcacgtctgactaaatgtttcatctgctggacaatgaagctccttttccatgtctaggtttttcccagagacacttgggaatacagattactgggctctctcaaagtt

SEQ ID NO: 317811 - DNA, 4001 bp, Homo sapiens
gttctaagatagcaaagggtgtgcgttacctcaaaaccacttagtacgcagccaaccttaatgggcactcttggcattactgttctactcagcaaatagacagtcctaggcaggaaggagatatttagaatcctactctgtaaaacagaggcctttcctaggcctcctgtgatgaaggcatgggaccgttaccagactttgtccctcaagggtaaattgttttcaagaaaacaggaagctaggagccatctagtcctttgaagtgctgtgaagtgggctgccttcttccccgcccaagggagggagtctctgaggcttcctggcaagggttagtgtgacctccagcagtcaccttcagcatgggttgctgctggattcctggctctgtgggcaggagctcccagaatgcttgacacagactctacgtggcttcctttgggaagacaaatggagcctgctgtaggctatggcagagatggaggcccagggcctctgagctaggggcaaagtcagtctccctcctgtgtctgaaaccccaggactccccattctgtatggtactccccccgacccaacccacagtttccttaggaaaactgacctgcctatggcccatttcctaatgatatgatttggtcatgaggctggcagagtccatggggtgcatgtggcactcctgtgctttgctgtgacagtgccttaacccacaggcgtgattaactccaaagtctggggtctttggaaaaggtgcctatcaatgcagaggaagtgaagtgctcagaccgccaaacaaggccaagagcctcccggaagagcctgcctgtcaggaagtctctggccacatgctgtggccatgctcgcctctatgagaggacagagagaacagaccaaggacacgagttcagaacagagaaaatgtgagagccgtagacaggaaaagcagcccttctggaaacagcacactggtgtacctagcgtaaccttgtcctgagggccactaactgcccctcacttgactcagctgacactgtgaggggtcacgagcctggcaacactttctggaaggtctaaagggcagcactgaggagacctaaaggttttggtctgtttgtcaaatgtcactcttcctcacattcggaggagagcatttgaaggcagaccactctaggggcaagaacaggactgattttaaccccgggacaaccaaccaagcaagcaagctagtgaagaacaggcctctgcccaggtgaaacacgtggggccaattccataggtttttttttttttttttttttttttaattaacctccggtgggaaaggtaaggatggtggggaggggagacggttacttgtctcattatcaatgtgttagtattagtgacggcaaaactgaatctctagcaatactatttgcccgtttaaactgggcctggctattgggcttatgagcaaatagcttctcaaaattttaattttctagttagttcatcccaagtcactgatttacatgtcttttgagactgagactgctggggaaaaacattcccagaaatgagtggattagactctgtgaattacaagggaaagacactttaagtttaaagttgtcccaaacttagcgtcaaaatacagcctttagatttttttttccatcgagaaaaattcctgattcactaccaaaaagaggccctgcaggcagcgtgctgatttgttctgctcctggtgctgagctgcccccacctgtgtgcagggaggaggggtcgcttcggccaagggcgggagctctgctggctttagcgagtcaccattgcctcctcgcagtcagcgtcctaacggggtccccgtctacagcccggcatccactcctccaaggcccttcacactggctctagccatgacccctctttggaggaataaagcagagtttcacggactcaccgaccttgaagccggagcctcccacgtcctgctgagcgcacacagccaagaagtgtatgcagggcgagctggtcgggccggcctggaaatcctccctggcggggcggggccagaggacctcaccaatcccagcgtagacctccgggcgcaccggcccccacagctgtacccttgaaggcaggcccgtgggcgctgggccctttatagcacctgccctttctctgaaacgtaaaaggcggagccagtcttgcttcccaggcctggtcctggaggctcctttgccagggctctggatctcagaatggaagggccagcaggtgaaattgcacatctgttgggggatttgtttctctcttctctcaggtgtaccagccttggggccctggtgagctctggaggatgaacccctcaagccaaggtcggagaggaggatgtctcaagctgcctggctccagcagctgaccgggccctgagccaggggctggagggacctccttccagcgtctttgtctgggacctggatccagggacaattacagtcaggtttctgttcaagatcaggccccctgcagtagatggctagatcatctcgctttctgtccacaccagcttaacccacggcaggccatagccctgcttaaaaatagccccgcttgggatatccaccgcacgccgggaaggctgcctgtaaatagcaatgacccagcaggattttggacagcagccctgccatttcaagggagcctgcctaggcatctggtgaccgtcacgtactcagcttctgaggccacgtggacatgaccaattggttcctgtctcttccttctcagagcccagctcatgctcagaggacttgatggagcaaggggtggagccccaggaataaccttctacccagtgtggttctccttcattctctgaaggagtttccatttcttttaaacacgacccatgtttaaaaatatcatctattttacctttgcatggggtactgacagggagagcacgtgagggggccttttggcgggatgggaagtttcctgattggggtggttatataaagattgggaccaatcaaattaatttcataatcctttaaggagtcaagacccaccagcttgcatattctatcatcagggcagtctcggtttattccttctcaaaatagctcttttccacacacacttgtttcaagtcagttcaggcaccaactgaaataaatccattgaccctgaaatagcccagctcccagatccagaaaattataaggcttttaaagagcatggaattgtagatttaaagaatggcagttatagcaaaaacctccttttcctccccaattgcctaatcaacatttagggccccctccactcacccgacctcaacaccttatattttatagagtaaatgtttatgttagtaaggtcagaagaaaaattgggtcattgttgagaaaagagggtaccacccttcttttgggggactggtcctcttcaagcttattataaaggtggtgtgatggggatgaaatctctacaagggactcacagtagaaattctggctttctggaaatctttcaaatgccatccctgtcacatggcatctattcccttctcatcgttaccaactccttttgaagctctggggctctagccacaccaggctgccctgtggctggcttctgccataagggcaggaacagaattgaagtgtgcgactgccatatcatttgctttaaaggaaaatgtcctggacttattctcttttctgttcctgagtccagcaggagtgtggctagagcaggccccagatttgacctcgaaggcaaggatgacgccttgtgggatgagcaagtaataggatgaaaggaacctgggttcctctgtcgcaccagcctggattgctcatttcagaattgggcaggagggacccctttccttagtctattcttgtgtccagcaactgtaacttaattccatcagctctaaatgttgccacaacttcatagaagttaaagtattttcatatatagtaatccatataaccactgcagttatttta

SEQ ID NO: 317812 - DNA, 4001 bp, Homo sapiens
gttggagggtgcagtgagttatgaacacacaaaagaatgagaccccatcaaaaaaaaaaaaaaaaaaggtagcttttagtcttcttttggcctttaaaaaactatttaagttgatatcctaatctttacacaatatactaaaaaaatgccaatgaacctagatctggaaaagatctagtttatttcatcttcggtaagcaaaagcaaagaatatataaatagctaaatagtccgaaataaatagctgaagccttaatagccaaatgagttgttataaaggaaaattattaaagcaaatcacttttcaaacttgaagcttctttcttaaagaggtttatttcactctaaatgcaaaacatttgctagtttcaaaagtacactaatataaacatattctgttaagggctttatatgcaatacaatcccttaacccttaagcctcacaacaacattctaaggtaggtatcgttgcattttcattttgtaccagagaaaactagggcactgtgaggataagtaacttccccaaggttataaagcttgaacccagctttgcaggttctgaaacctgtgctccttaggcactctattgccttcttggtagcacagaaaatataaaaatatggtcaagctctaagttctatctgatgtatcagacaaggcactggaaattactttgtttcctggtgtcaagaaaacagtttgctatctatacttcctgattttaggttaggtgggtggcacaaatcaactgtttttctcaccacacttattgcataatcattaaagccccaaaggaagaggactgcttaaattcttaaactttatttcctgctggcctagaagaccttacttaaccactgttatacctgatatactcattttaaaagttaaggttttccttgtgcaagtaagagactaaagttatttcagtcttaaaggaaatcaactacgtactggtcgttttacctgcttttaaaagcagatcaacaggatataaacctgggttgtttttttccttaagaggacatttcttaatgacctcttaatttaatcgaatggaacaagtagcacaccaaaaatgatgtgtagtggaaaaagaaacagaagaaaaaatcgcaagaagtcatatagtgatctactttcactagtgttagaaaagcaaaggatgagtgtcttcttgagtaacttcaggctgaccacaatagccacttgttacactactaccacccactccaacacttcaggttcattaggaattaagaggaggcaaggaagataaaagacacaccccaaccaggtctaaggtctctccgtactacaccttgagggacacagggaaccagtgcattgtgccccccacccccaaaccttccctgctccccaggaggcaaagcccacggcctggggccaagacagtcctccggccagggcagtgacccagcgccaaacaacccgccccttatgaccaaagcgtcggcacccaggggttggaataggggaagggacgggaaggcctggaaaggagagaagggtggccaagaggatgtttttttttaaaacgagggagggtccctccccagcctcgccagcggggatgaggcccggggccgggaaggagcgggccgccgccatgatggggctggcagagccagggggcgtgacgtgggcaacccctagcccaaggccagctccttctccccctcccccctcccccacgtgggcctcggccacaactgccccccgatactcacgctttgtccaccagctcgcgcaccttccacatgttcaacatcgtgccccgcgcgggacggtccgccgcctccctctcctgctccccacggaccccggaacacttccgtaccggggcagttccaggccggggtcaccgccgcccgccgcctcgaactcccccagtcagctccttcctttgccacagcagcggcgccgccggtgacacgtcgagacgcggcagcacaggcgctgcgtggagcggaagtgtccgactttccgccgctgcgcgcggggcacgccgggacttgtagttttccctgagtgccgagctcggccggttgagttgggagagctgagaggttgagttgggagagctgagaggagttgggatggtttctcttaagctttcccagtccccggccccagacctaccgagccagaaattttggaggtggggcccagcgatctgtgcttttacaaatcctctaggtgattctgatcacgctcaagtttcagaaccactggtgcagggtctagtcacactcaaacacttttcaaatgtaaggcagtattactatgttattagtaatgattatacagaagtatgattggcatacgcattcctcatcgacagacacatcgctgtatttatttcccaatgcccaagtacacttagatctctaggccttagtttccacccctgtaaaattgaagaacttgtattctaaatccttttccgctctaattctatgatacaatgttttatatttagacaactacctgaaatccttgttaaatgctttactataaacctcagaaactcagttcacactccacgggaaactaaaaagccaacattatatatacacgcacacatacacatacatatgacaggtttgtgttttttaaggataaatatgcacattgcttccattgctttgttgcaatggttgtcatcacttccttctctacttactcatttttatcaatgctcatgttaaagctacaagcaaccttaagtttcatttgatccatctgctgaaattttacagttcttttcattctacaaatatttattgagcatcttgtatgttccagaagtggggaatatagttaaagacccagctctcttggaattcaaacgtaattggaagaaacatataataatcaaggaaacatttaagataattgcatatagtgtaattgcttagcgggttctttctgcccactttacagataaagtcaattcactgcgaccaagtcattgcagtgaagagtttgacatgaggctggccatgccacttgagagacagagttattactcaaatcaatcttcctgaacatttggaagctagagtttttcaaagatagtttggtgagcagagggttagggcatgggtgctgctgattggttagggatgcaatcagaggagtatggaaaatggttctcctttgctgaatcggcttcttgatggagggccagcagaggagtggctggtctgggtggggtcatccgtttgtcagaaatgcaaaagcctgaaaagacgtcttaaaaggccaatcttaggttctacaatagttcattacaggccaggcacagtggctcacgcctgttatcccagcattttgggaggctgggaggccaaggcaggaggatcacttgagcccaggagtttgagaccagcctgggcagcaaagtgagatccccctgccagcccagtctttaaaaaaaaaaaaaaaaaaaaaaaaaaagccaggcgttggggcacactcttgtgaggccagctacttaggaggttgaaatggaaggatccctcgaaaggatcaaataaagactccaattcacaaagaagtgaaattgatggttgctagtcatgaagctaggtaacaataatcccaaataaacaacctcggaccctggtccctcaagtgaaaccacctcttttctattttctttttctttttctttttttttttttttgagctggaggtctcactctgttgccccagctgatctgaaactcctgggctcaagcaatcctcccacctcagtctctcaagtagctgagactacaggaaaccctctccaagttgcattcacttaattaccgaaagcagctttgaaaaaagtttcagtaaggctttcggattgaggccccaagagaaagaagcaaggttgaaggaattgacaggcagaaaattacaacaagcagaaatccaaagttatctcagagctttgtaatggtaggagtacttgggctgatatg

SEQ ID NO: 317813 - DNA, 4001 bp, Homo sapiens
aatggaagtgagcattccggtttgatacaaatggagtcacttccatatgggaacgtgacatgaataacagcacacatttacttgaggcaaaaggccaaaacacaaactttcttcattagagctatcaagaaaaatttatggctggacgcagtggcgcctcatcccttgagcccaggaattcgagactggcctgggcaacacggcgaaaccctgcctttacaaaaaatacaaaaaattagccgcacatggtgactcgagcctgtagtcccacctactgggacaatcactggagcccaaggaagtcaaggctgcagtgagccatgatcacgccattgcataccagtatgggcgacagtgagaccctgtctcaaaaaaaaaaaaaaaaaaaaaaagaaaatgtgtatttcaagtgcagttcttctgaagcgttccgtcaaataccaaagttgtattttaaccacatcaggaactcagcttggttaagcatttttaaatcatagcaagcaaaatcacatctgatgaccgagcgttattattatgaccctccattactatgaagtttttttcaagacttatgtatcttcttcagttttgttttttcctcttctactgtaagtctgcttacaaccagctaacctccagcaaaacagaactctcaaattatcagttaatatgcaaacattaaaataagaacgagctccgttgtgagagtccaaaattcttctcaagttcactacttcaaatgtaattcagctgttagtcccagcctctgacctcccccactcaccctgcaatgttcaaaaatattttatctggaggcacaaagatcacccgacccacgttctacgtggtaaggttccttcgcatacataaaaaagaaaagctatctagaatcatgacactgcctctaataaagcatcccacatgctagagtaggtatctttcaaaaaataatgacacaatggatctcatatgtagatccatcgccactgcccttaagatcctgtagttcttgacaactttacgctacgtacatggcttaaaaacatcgaaacaggttataagtttaggattggatggctccaagaggactgcatttaatgggttacaagcctgtaggggtgtgtaaaaagcacaatcgcacaggacagctatgaggcaagacaaagtggctggcgagttcagtttgcggggcggtttcctaaggatcggataagcctatctggactatttaggcaaccagggataataagatgcaaaaccaccagaaacgcaggttcgctgcaacaatgttgtgttcagcatagcacagaggactagcctccgcaaatttccacctctcacaagcagctactgccctcaaccacctggatttgcacggacgcccggtccccacctcccggctcctgggcacccggccagtgcctttggcgcactcaagacaggggcaaatgcttgactctggaaaacccccgaaacgctacaaacggcccaggccaggaatccaggggaagacttgatctccgacaacacgaatgccagagacggctctcgaagggtctcccgacaggtcctagcgcccgccggctggaagaggtcccgacagggttaaccaacagccgcgctcgccaggcagcaggggaccgcgagcccacggcctccggagccgcgacgcgagcggccagggccctcagagaagggtcagcggcagaaccgcgacgcccgagcaactttcggtgctgccggcgtgcaccagccgagcagcgcctcgcagaactcccaactcagctccagaagcccaggcccctaacgcggtcgtttctccgacacctggctcggagacctaaagaccgacagccgcctgtcccagcacacaccatctgcaaccctacctccgcaaaagcaaatggcccttcggccgagaaatgtcgccaaactgccgtcttccctcctcggccgctgcgacaaacaccccacaaaatggcggcagcgccgtcgccctagaatcccccgagtcgcctctagcaccacctacgccgcgcgaacgcgcctgcgtgacagaaccttgcgcgctcccgccgctccacctaagggcggggctccacgtgacgtaagagcggggctcgagcctccacactgcggctgcgcggcccaagcatttccacccccccccccccgcccacccggtcccggggcctctaggccgggagggtgtttacgttctctacgggctcgggtggaaccgggaaggaacgcccgtgtcccgccctcagtgtgtaccgcgtgtctgccccctcccccgggacctcaactcccgcagccggcacccgacaacggccccaaaaccgcctagggcgggccttggctggtccctgggctgttccctggactgggtgcttgtcctgcccacttggcgcttccagtctaaggtggattcggacaaagaggctgtctcagaaaacaagctcaaggggtgctaatcttttcaaggcacgtgctcctattcagaacaaaacaaaaacccggaggtttcaatggagactcctgacaaggttttcctgttaggatccctacctcctgagcagttaaggtcgctggaagtttccctaacgaagttttccccatttttttttgtccctgcgggctgattttattcaaggctgaaaaatgtctctgagctagtgatagtccgttatggggcttgcttacctcaaataaggtattctgcagttctgaggaccctcaggcagttcccccgtgtaagtatgtaacatgagaaatattagggtcaaagtcggagccctgtggggaacactcaagggccagagggaaaggggcctgagaaggaatgatcagcagaggaggagaaccaagaatagggtgtcaaagcaaggaagggcgtaagtgagggaaagggtttaggtgagactgaagatcgtggggggggacggcgggcggggtgggggttggcttctgtattctgacggggattcgctggataaaagggaaagctagaaatcaaatttgggagggtagggttgaactcttgcgggtattagcccagtagcatgtgggagacctgttatcctgttaggtgaaaggagggaacggaaatacctttagtgatctaacatgatagaaacttgtgccatctggtttgggtaagtagggtaaatttagataaatctcggagattgtacagcatttcaaaaagtaagttgaattttcatggagattgcactccaagaagcgaagttgaaaagaaacttggaaaactggaagggtaaactctttatgctacagaatgaaacaaatgatattattttcatctagaatagccaccatttttgcatctacaaatttaaatcttactcatccttgaaaggccatttctttaagatgctgtctctgacatgagttcccacccatttcccggctcctgactactccagttagatgtgaagtcctcaaatagtggagtatttggagccacctggtatgctaacagattttgcccaaagagtgaaatgtattggttctacaattgattacacatcccgtctcaagggaatctattagatagaatgttgagctgactggtctgggcgataatacaaggtagagtggggctcaaattgcagcatatgagaatgtaaattcaagctggcaccaaagaatgttctcctgtttcatggagtaggagagatcctgcctcctggggttataagaaagtgtggtcaggacagcccacaattctgctcaaaaaagcaacactatgttaaaaagcagccacttgaaatgccacctacagaggcctttatattatagacgtcacacacactgttacccaatagtagagtctgctttgtaattacattcatctcgctttagtgttttaatttgtatgccaccaaaaggtctaatgtttaaaagtgtgtagtgatcagaaggaagctgagaatgactagcacctctatgctatgtgatgcagcactatggtg

SEQ ID NO: 317814 - DNA, 4001 bp, Homo sapiens
ctctccttaaaaatcttacggttggccgggtgcggcggctcacgcctgtaatcccagcaccttgggaggccgagccgggcagatcacgaggtcaggagtttcagaccagcccagccaacatggtgaaaccctgtctctactaaaaataaaaaaattagccaggcgtggtggcgggtgcctgtagtctcagctactttggaggctaaggcaggagaatcccttgaacccgggaaccggaggttgcagtgagcagagatcacgccactgcactccagcctggcaacagagcaagactctatctcaaaaaaaaaaaaaaatcttacggccaaagttgtaatgaaaaacacaaaggcatctatggctcctcactacccaggaaagagtatgtctccaccaggacatcttaagtgtctctcttcaggcagagggtgcagggctgtgtatttctggtggaatgtgcacttggagacacttgaggcggagctgtgttaagagtgctcattctccccacttcctccaggctgacactgtgccaggtcaaatggaaaacctcactagctgtccttggtaactggtacacggcccggcacggaagaggcagtattcatgtctgggaaattaaacccagtgcagatgaatcctgagcatttttgaaaggtgtgggcagctacaaccgagcgggcagcttggtcaccagcacttctggcctccccttcatggaggcagagagagggcaggaactggcttgaggtcacaggcctaaagaggccaggcagaaaccggcttgccagcgcctccagctacccccagggactggctgcctagagggcgtggagtccagcatgagtctcaaactttcattattctctcctcagatacctcccaggcaatgaagggaaatggttgacttgtgagaagcaaatcatatttaaaagtatacttattcaattaaaaaaaattaggccatgtcagatgtaatttttaagatactctacatatttggacattgatctattctaacgtcacatgtcacttatttatgattttctacaaaattgcttcctctatcctcatctcttttccctcacaagtaacttaagcgaactacttccaccaggaaaagacaagttggtccccggtagtgaaactgcagagttgtctgctctccactggttcaccaagcgtggcccctgctccttcggagcctccccgtccaggacatcccactgccatcacactctgctgagaactacttcttaaacgacattcatcacctgtcaccttccaggctgaatgtttacaggccacgcataggcctccagttaggatattctaccacttcaagacattcggtaagactagttctctaaaataaacatgttatgtacagaaagctaacttttaaacaatctgaacatgagtaatgttttccctttcactggcattttgtcctacgcccatacctttcaaatttggactccacatcaaagtcttccacattcaagaccaggtcgatgttgttctcagcacccaggtgggacctcgtcgtggtgtacacgctcagctggaaaggagggggcgtcgagagtcagctcggccaggccctggcaggacgcactcaaatcccacggccagctggagggcggaagacctggccgctggggaaccaggaaaggttccatctcgactcgcgcggccacagctccgaactgggacgggaaggcgacgtctggggcctggaggagaggcccccaccccaacccgcccggcccccggccccgcggacgctcacctgcagcttgggccgccgcgccaggtagggctggatgcagttggcgtcgccggagcacgggcgggtgtagacgatgccgtacatgacccagcaggtgtgcaccacgtagaccacgaacacgcccaccaccaagctggtgaaggagctgcggccgctccacatggcggccccgcgcccggcgcccccggcccgcccgcctctcagccgcgagccccgcccgcccggcgcccagcccgccgctccgggctccgccgctcactggagagccgccgcgcgccaccgccaccgccgcgggggaacgaatgcgccgcgcgccgcagaccgccggccgccccgcatgctccggccccgctcccacctggcgccgcgggattcgccggccccgcgcgccgcttccgggccccgccgcctgccggaagtggacgcgccgcgcggctccctgggaaacggagtctcggccgctgccgcgcacgcgcatccaggatgcggcgcgtgtgtgacgttacccgcccgcgccgccctcctggggtgcctctcagggacccaggcgctcagctgctggggccgcggagggcgttcgcggggcgccggggaaggctagggccgcggggtccccggggcgccgtccccaaccgccgacgcctgccagaccaccaagtgggggccatgtcgacgtgtgaggagcctggtggaaggtgatactggaattccggcactgggcctgcaacccttttagtccacagttgtcagaatctaaagggaagaaaaacgaagtgctcagaaccctcacagaagccgggcacctcatcccgtgtgtgggttttttccccagtacaaacccattgtggggacaggcgcttttgaagaaaaaattcagattcccgggctgaagtggctcctcacagccttgaacctgacccccagcttcccgctaaagccgagcgtgcccagcacggcgaggtcagcagaggcccctcggagggcggccgggggaggtcagtgggaggccctcgggcagccggtggatgggccggcgacctccccgactccatcagaagcgctcagtctgtgcccttcagttactggagcagctcccgtcctttggccagttctctggaaggtcgtttccgtttctgtgtctgccacacgtgcagcacaatcgaaaaaccttgttcgacatttctagaaagagtagatgctactgaagacccaatagattgctgagggttttcagagcagggacaattgcatcagggtgctgggctccgggaagaactcagaggacttggctgacgggcggatgggacagtgattggtgccgagaatgggccagagaagcaggtctgcctggagcaggcacccgaggccgcgtgcaggggcggtcctgggccaccaacccctggaagctgggccaggagcttcggagccatccgaggcttttttcgctcctctcactctcatgcacctagttaccctccccacagagtcttctcacggcgcggttttcggctaccattgcagtggtgtctgactacacccagtgcctctatcgttcccccctcagtctgttctcgcttcttggcaaacctgtccttggaaagccctctgctgactcctgttaccctgatcaaatgcatcctcctcaggaggctcgtgagccctttgcagggtggcccaagaggcatcacgccctgctctccagccactcttggggtcccctacagggccaggcgtcccacaccagcagcgggtgctggtcctgccacagtctgtgcgacacgtgaatgaaggctgtagacctgtggtctgcgggaggcaaattccaactccagctgtcaaacataaggggactggtaggctctccagggtggattgtctcacggcatccagaggcagggaccgaggcagggacctagccaggcctcgggaaggagctgcaaacccaggagctctggggtgtggcttcatctccctccctccctaccaccctacccccatctctccgtgttcttcagatgcctcattttcctgtcaggcacctggccagctctaggagctggaatcaggttggtgcctccttggtcagtgtccacccctagtgtcatccacagtgaccaacggaaggggtggccggtggtacaggacattggccatcttgggaaagatcacagagacaggaagggcctctccagctgagcagatgagaggt

SEQ ID NO: 317815 - DNA, 4001 bp, Homo sapiens
ggaactacaactacagctacatgccaccatgcctggctaatttttgtatgttttgtagagatggggtttcaccatgttgcccaggctccacagcatttgaaagagcatggagcccagagttgggaggcgtgggatcaagtcctagattggtcattcctggctgtgtgactctgggcaagatactcagattctctgggccaccggtttcttgcatgttacaaaagcctggttacatttctcatatcaaggagatacagagttgcttcaaactcctcagccacaggaactgtcttattcatttctgtatccccagcgtcctgacacacagtaggtgctcagtaaacgttgaatggatacaaacatgactgtgaagagccttgtaaacatcattaaccaaaatatgtctatatgtatatatgttagcacttactacaacaggcccataaacctttccaaaatgacatcaacaggaagtaaaacctgttttggatgtacccatgaaggtgatatctacttttttactaaatattttacaaaatcattcttgctagccagaaccagggcagaaacatcattgataaagatgatttcacagggactaggccctgaacactgaggtctgaagccaatcacagtaaatcataatagccccggaccacctttggaaaaccattaagtcgacaactacaaaaccctgaagggccctaccgcatctgactgatgcctctttgtggcccacactccggtgtctaactcagagccagacacttggtaggcagtgtggtcaggtggagagggcttcaagtccgacaggaacaggtttaaattcacggccaggtgtggtgactcacacctgtaatcccaacactttaggaggcagaggtgggaggattgcttgagcccaggagctcaagaccagtctgggcaacatagcgagaccccatctcaaaaaaaggaaaagaaaaaatatatatgtaaaagaaaaagaaacaggtttaaattcttgatctgccacttactagttatttcaatagcatactcccttgagcctcagttttaccatctctgaaatgggttcaatcacgtgtatgaagtgattaaatgtaaccaaggcgcttagcccagcgactgccgaatgccaggcggtcaccggggaaggttagtgagttcctggagcacccaggatcctcttttttcccagctgcaggagagagctaagcctgaggggccaggagggctgtgttctgcccacacctgcacacttagctgggagcctgggacacccaggctattaggaggctcaggagggactctcaaaactgaggtggggttggattccagagccgggcagtggggaagctggcctggggatgaaatgtcatgaccgaattcctgtcccgggagtcaccagatccacagccccaggcgaggcctcatccccagctcggaagtcctacatggagatctccaagaagattcttccccacgtctcccagctcctgccccgggtggcctagagcaggctctcttccctgtgcccctgggccccggccggggtcccccgggtgcgcgccctgagcccctctccaggccccgcgctgactcacccccactcgtggggcccggctgcgcgggggccgcatggctgccggcaggtgccccgaagccctcgtcgttctctatgcctgcaatctcgctctcctgctgggccaggaaggcggccgccgggtcctcctccgccgcctccggggcaccgctctccgacgacgagaagaagccaaagtcatcagccattttccccgcgcctccgccggagcctccgctgcgctcggctctgcccgcgcctgccccgcgctgcgtccggcggccgcgacgctgtcacccgagccgcgggggagccggcgtcggcggggacgggcttggcgcggaccgcacttcctctccgccaccgggcccggctggctgtcactgcggtgcgggcgccgcggcgggaggagcggagccggaatgcggtgacgtcaccgcgggggcggggccgcagggccgggaggtcgccgagcagcggccgcaggagggcgcctcaggactgggcgcagcgctgggcccgggaccggcgcggcgcttccctccctccgcagcggcgcccagctgctcgcgtcgaggacacctgggctaggcactgctcccgcccggcctggaggcgaaacgcagggcacagagtggccgtaccgtgcacagagctgcgacaggaggccacctctggcctcgggagcgcagacctggctcctgattcattctgcagaagtttcttctcctaggttgggatgtcatgcacctcattctatgagcctccgcctctgtaagaagaggaaaattgaggctgggaaaggctgccccgcaccttttcatgcaagtccaggtcctttcccactaggccgtgttgttttgtgtatttttttgtgtatctcccttgaggaggcttcagttcatacgaccagagtttggatggccagctaggccccttaaatgtcctttaggtatgaaccagcctgagaaaggcagacctggtttacccaggcagcctaccactctccacgctgcccgctgccctctgtgaacaggctctgaatgcctcctccctgcctgcgctttgccaagcaccaggacagcaacgttttataaaatccagccatggccatgcggagattacaatccggtgagaccaacagatggcaaatggcctgtcaaagcactgtgtgtgaggcgctgtgacatttaaacacggggtatagggagacgatgcaaagaaacaccatgggatttgggctgtctgctatttctaatgtgggacttgaaaggcaactatgaaatatggactggaagagcgaaaggaaagatgtgccgccaagttgggggtggaagtggagttggggtgaagggaccttccaggtgtttttttttttttctttttaatttttttatttagagacagggcctcgctatattaactgggctggtcttgaactgctggcctcaggggatcctcctgccttggtctcccaaaacactgggattacatgtgtgagctaccaagcccagctggaactttcagtttaattggtaacaacttgagcaccttttgatgttactgtttttgggggggtttttattgttttatttaattaaattaatgtatttatttattgctgtccatttgcatggttttgttgttgttgtttgtttgttttttgttttgagacaggatcttactcttgcccaggctagagtgtagtggtacgattatagttcactacagcttcaactcctgggctcaagtgatcctctcatcctcagacttccaaagagctgggattacaggcatgagccaacacacctggcctttttgatgttattgtaagtggaagttttatcttcttttttgattgcgtattgttaatgcatagaaatttaactgatttttgtgcattggctttgtatcctgctgctttgctgaattcatttattagctctaacattttttgtgtgtggaatatttagggttttctgcagataagagcttattagccaggtgccatggctcatacctgtaatcccagcactttgggaggtggaagtgggtggatagattgagcccaggagtttgagaccagtctggacaacgtggcaaaaccccatcactactaaaactacaaaaaattagccagacatggtggtatggtgcccgtagtcccagttactcaggaggccgaggtgagggaatcacctgagcccgggaagtcaaggttgcagtgagctatgattgtgtcagaggtgtgtgaatcagagcaagtccgtcgtaaacaggatctgggtaaaatgaggctgaaacctactgggctgcattcccagacggttagggcattctaaatcacaggatgagataggaggtcagcacaaaatacaagtcataaagaccttgctgataacacagtttgcagtgt

SEQ ID NO: 317816 - DNA, 4001 bp, Homo sapiens
aagtcacgatttcacctttggctgaaaattatcttttaacaatgtaatcaaacattccctttctaacactggcagtcagacaggtaagagaggtgataaagtatggtgagggtgtggttttcctgatttcacgccctaaggattcaaataactcacaagtcagacttccaggcacaacgcagttctccaacagaaatagagaaaacagattttgacaagcaaaagggactggtgcagttgggattataacaagcagggaagtctaggaatacatctccagcctcctgggagagcctgagcccggagggggcagagaggaggaggagggaggtctgggggaagagaggtctgcaaagtaggggaagggaaggccaggagggagggaggcgcagcggggaggagaggagagaagggaggaatacatttctggaagctttagaaatttagaaatagaaaccacgtggaagtgcatccagggctcagggttacagaggaccccaagacaacacaggaaagtggggtctaatgggaaaggcaggaggtttctcctttactgcttaaacattgtaggaacttgcatggcaagtgattttcaatcttgcagcagggaaggcagggccagtacttatccttagatgattctacaaacatcaaacttctccaaatatttatttttcagcagccatgcttgtattttccaagtgtctatggtcgagatagcatgaattaggaagctacctggatgagcccacaatggccctcttagacatgccaacgacgcccctgcagaatctgctttttctctggctgttcctaggcctggatagggttcccaggcctggacaggattccccggataccggcgaggctcattactaaccactttattttaaatgggctttgaaaacaacaggtggcatcttccatcagcaagtggacataaatctcagtgcccagtgtttccaaggcctgcccgacccacatggctgtggggtgtaaactgtccagtcgttcctggcacacctacccagcatttaggatgtcccactcttagatccatagacccagcacctctcttcttaatacccaccctaaagaaaagctgtcgaatgtggatgctgatttagttgcaaatatgctcagttttttaatagttttatattagtaaaaacgctacaaccagaatgtctcactgcaggaagagagttacaaggagtatttaacggcatggtggaaaggctcctccgtgctaaatggccaaaacgaacgcaagtttgcatacggtgtgatttccactatgtctttaaaatgcatggcgaaacacctacaggaaaataccaaaatgtaaacagcggctgcttcggacgcatgggatcgtggaggctgctgttctgcaaggacaacgtatcacttttatgaaagtcagcttctgaaaacggactatgggaagttccttacccgtgcacgcggcaaagaccttctttgccatagtcagaacacacgcgggagttcagaggagcggggcccgggcttgtgtgggcttgtgtgccccggggacgcgcacgtaccttgtcccgcggcctgagactgcgctgcaccgcgcggaggccgaacccagaggaggcggcgtggcgccgggcggggacgcgagagggacgtggacgcggcgaccgaggacgcggggatcctgcgggaccagtggctccagtcgtagcctcctgggagagccaagcccggagggggcggagaggtggaggagggaggcctgggggaagagaaatctgcaaagtcggggaagggaaggaaggccaggagggagggaggcgcagtggggaggagacgagagaagggagggagggaagtgtgaggggaggggaagaagtggggtggtcggagggtggggtagggaggaagagggagggagagatgggagaggctccaagataaagaaaggtgcagggagagggggtgggagggagggaaccgcagagaggaagggagaagagaatcaggcagccttgagggaggaggcagggaggccaggagaaggaagacagccagccttctgtgagatttacgtgcgtgcctggcttccaagacaagtaacttctgttgtaaatacaaattaagctattttttgtttattttattttattttattttattttattttattttattttagagatagggtcttattctgtcacccaggctggagtgcagtgacacaatcatagatcactggagcctcgaactcctggcttcaagtgatcctccccttcagcctcccaaagtgctgggattacaggtgtgagccaccatgcccagccacaattttttttttttttttttttttttttgagatggagtctaaccctgttgccgaggctggagtgcagtggcacgatctcaacctcaacctcactgcaacctccacctcccggattcaagtgattctcctgcctcagcttccccagtagctgggattataggcacgcgccaccacgcccagctaatttttgtgttttcaatagagacggagttttaccgtgttggccaggctggtctcgaactcctgacctcaagtgttccacctgcttcggcctcccaaactgccgagattacaggcgtgagccgccgcacccggccccagccccaaattaagcctttttttaaaaaagaaattaatacacgtttcatacttgcctccttcgtattttctctggtcatctgcccaaggttatgacaacagcttcaacttggctgcagaagcacacccctgtggctcactcaaactggaaacatacaggaaaagggaattctaggaatatagctcagcctggacaaatgggcacattaaaaagccattgcaccgtggtggccgcacttcctgccatccccactgcaaaggtgttgttatggactgaatgtttgtgtcccctccaaaatttgtacgttgaaatcctaaccaccccgcccatggtggtatttggaggcggggcctttgggagatgcttaggtcatgagggtggagcccccaagaatgggatttgtgccgttacaaaaagaggcaagggagcttgcttcctcatctgtatgccaggaagaggatactcaccaagaacccaatcctgctggcccatcccagacttccaacttccagaactataagaaataaatgttgtttaagctacccaagtctatctatgatgtttttgttgttgttgttgctgttgctgtttttgagacagagtctcgctgtgtcgcccaggctggagtgcagtggtcccatctcggctctctgcaacctccgcctctcgggttcaagcaattctcctgcctcagcctcctgagtagctgagactacagacatgtaccaccatgcccagctactttttgtatttttagtggagatggggtttcaccatgttggtaaggatggtctcaaacacctgacttcaggtgattcactggcctcggcctcccaaagtgctgggattacaggcatgagccacctcgcccagcctggtgtttttgttatagcagcccaaacggactaaaacagtgttttccttctagagatacactaattttctttcagacaggatctttcaaaacccagtctgaaacatctgcagttgaattattttatgggcttggaatttctctaaaatagtggttagggattttttaaacatcagaataatttaaaaagttaccaaagtgttattacccagaacaaattcagggtcagcgccaaagaaaaaaatttatttactttttttgagacagggtctcactctgtcacccagactggagagcagtggaatgatcacagctcactgcagcctctacttccctgggctcaggtgatcctcccacctcagcctcctaagtagctgggactacaggcatgtcacccaattaagtttttgtttgtttgtttgtttttgtttttgtagagacgggctttcgccctgttgcccaggctgaagaaaaat

SEQ ID NO: 317817 - DNA, 4001 bp, Homo sapiens
atgtgtaaaattaagctgtcccccaaccaccttggccacatgttctcaggatctcctgcaggccgtgtcacaggccattggtcactcatatttggctcagaaccaatctcttcagatattttacagagtttgatgctttttcgtcgatacgtgtttttcctaaatccagaagttttgctgacttcctgttacccttgtcatccaataaaaaataaattggatgctttttccaggcctccattttccatattccctcatgtgtccctccactctatttattctgacctctttccctggtgtccaccttactgtctgtagtcagaacaggctgaagtttactgcagacaaatcacatccttttctgaaggccttgacctttgtcaaatggcaatgcaaccccagagtgaatggtcagctgctcacattttagtgtaaatgagttttcagattctcttggttgtaaattgtggttgggcaaggatatgaggatcccagacaacagtaagggaaaggttataaaagctgagttgacagacttccccttctcaacactgccaagggatcacaggtcccctactccctgatccacttcctacaggtgccttctcctctgctcttcctgtttgtagtccctgcccactacttcaaggcagctccagcccaacactccctcttctgcccttgcacagtacccatagtcctcccttccacctctatatagtctcacactccccatgttagggaaacgtttccccataggggaaaaagttagggaaactttttccacaaggtccttgaggccagggactgtgcttgcttcccacttggcagctgtttgataaacaggtgacatacattcaggacttcttgtctgaccatccatcctcctcaatgcccctctatgggctacttcttcaacatcggctctgctggctttgattaggtaagctgggcgttctgagatggtacacacccacctgccaccttcaaagcctttctactgttatgaacagactgaggaagagacatcactgactgacacacagtcaggaaaaaacccaaaactcatactcaaggaaaacaagtgaaggtagaagctaatccaaatagacattagatgatttctattattctcattttagggccttcttaaagggacggagggtgggagatcgaagggtgggaggtgcatcttttgtacatagtattacttcatcgcattcacggaaactgatatttgggatttgggaccaggacttgaagaacagggattactgaaactcatgcttcttttcccccaaagaatttatgggcctttgtatcaaaataaggtcaccttattgcagcctagcctactgctaggcccccggggagaccgccattcatcggaaggtaccagtgcgccttcaccgcctccaccccacccccttctcctctagcgcaggatttcgcgattgttcctgtgcctcgggccagatgtacgtgttccagcacatttcggcagttatgcaggacctaagtaaatcctcaggaataaacaagagcagcgagtcacaaggagctgggggcgggggtaatgaactctgctgcaggcgggcctgtcactccagctgacagcgagcaccttcaccttcaagttcttttaaacgacagtgcacccagagagaaagtgcctagctcgaggcaaacgaaccccagagcttaaaaacttaaagcaaacaagcaagggtgctgctagctgccctgcaggccctgggccgaggagagaggctcgcgctacctggagtccggctcctcctccgactccgccgccgtctcgtcctcctcgccctccgactcctcctcggtctccagctcccgggtcgcctcctcgtccccgtcggagccgagaaagctctcgccagcgtggttgctatcgcggctcgccatcgcctctcccgggcctgggccggggccggagccggagccgcccgcgccgcgcctggtgttctccctccgactgctctggcccctgccctccccagccctgcccctgcgggggcggctcgggttcccggcgccgggggcgggcgagccccgcgactttaaatagaaggcgtcaaagtttcgccaccgagcttctggggcccgggctcagcttctcctcttccctgagccctcccccgcccccgtttcgccagatccctggcgggcctttcggacaactggagatcactttaaggggcgcgggctccggctgcaccagggggttcaaaggaggaaaggcaacctagccccgtctcttatttcctccagagtgagtcttttcggttttgagctgagctactttctggaccctttatcccaaacaataccctgagctgggcacttaactaccaggcactctgctaagggtctcgctttcattacctcgattctgtggtggtacctgtagaaggttttactgtagtgctggtttcccagatgaggaaactgagactccgaagagctccagcagctcaggctgtcattgctagtaaaatgacccaatgagaaacaaagctaggcgtgccctgctcaaaagcccagttttgaaccagtgttccgtcccggctctctttatatcgcaagtcaatatactgtgtattttcttgctcagtggtccctgttattgagccaggaaactttatctccactcatcttaaaccttgaggaggagcaatttcccccacgttagcaaaaagctaagttttgtctgaaactggcccaaatgccccaaacctttccccggatcaagttgtggttaaaacccctcaatggcttcccactgctcaaagactgaaccccaacaccctcacaaaggtaacggttgcctaacaggccatgttttacctgtctactctttttttttttttgagatggagtcttgctcttgtcgcccagactggagtgcaatggcgcgatctcggtccagtgcaacttccacctcctgggttcacgcgattctcctgcctcagcctcccgagtagctgggactacaggcgcgcaccaccatgcccagctaatttttgtatttttagtagagacggggtttcaccatattggctagcctagtctcgaactcctgacctcaggtgatctgcccacctcagcctcccaaagttctggaattacaggtgtgagcccccacgcccagctggtcaggtgtctttagaagtcaggagttcccaacattgtcaagtcactccactgtgtctttattaacacaattccttctgcctcaaaggttggtcccatttttaccaggatacccatcattcaagatcaccacctttcactgaaatcccaaagttaaactcagtacctctcttccaggttcccacataatcctatattcaaattatgtttgtatctccttccccagcagacttcgtaagtttactactcttctttgtcccatcatccccatctcttacaagcctacacactagcaaagtagctagcacatagcaggtacatataatggatgctccctgaagagaacagaaccagaactgctatgtacaaatggaggtaactttacaataaagatattcatttcatgagaatgatttgatggctagaagagttaacatttatttttaattatagcaagtcacagagttgttaaatatgactgtaagctggggattattcaccagttacacgagctggtatgcatgcattatgtctggaggtaatgaactgtaaatcattgaattacagtacagatacatcagctagtggggcataaggagggaaaacagcagagtcaaggcttccacagctcactaaaccaggtttagcatcagcaatatttattctcttaacaccagctagacttcaccatcagtaatcccaaatgaccatgctcatccagtacaaaaggaattcaatcacagctgtggcaatctgttaaacactaatcaaaatcacaggtagccattctatgttccttccatcatttaattaaaaatttctta

SEQ ID NO: 317818 - DNA, 4001 bp, Homo sapiens
gcgctctcacacgcacacaaacccggtcctttccctcctcattacagtaccatgggcaagtcacctccacctagaaaggtctgtcttctcattagcagctgttcatgtattttgtttaaagcaaaacacctggagtagatcacagatctaaagatattaagcaatttttattctaaattttactctaaaagtcatcacattctaaacactgtgatggccaggcatgttggctcatgcctgtaattgcagcactttgggaggccaaggaaggaagatcgcttgagccctggagtcggagaccagcctgggcaacagagcaaggctctacaaaaaattaaaaaattagccgtggtggtgtctgccggtagtcccagctagtcaggagggtgaggcaaaaggatcgcttgaacccaggaggcgaaggctgcagtgagccgagaactgtgccactgcactccagcctgggtgacagagtgagatcctgtctcaaaaacaataaataaattaaataaagactgtgataaatgtcttaacagcaattccccaaaaaagcctttaaacccttttgatcaatggcccacgtccactcctacagcctactaatctgttctagagtagtaaattctagtatattgtaaaaaatacaaagtgctactacacaccattttatttttcagttattcatattcactctcttcctcttcaaagttaaattcccagatacaagtaggcaagaagattcagcactaacaatgagacaatccacctggaaaacaggtaagtatgggaactcaaattgaagcagattatctaaaacacatcagcttacacagtaacaacaaatccaaagagctcgagcgagatgaccattcacaacgctgtcaatggcaacaacagttaaaaacagaaggccacaggtgttggttagcaggctcttcggggaaggtgaaggaggtaaagaatcaaaggaagtttccaaagaaaatagcgattagtgctgaaaaacaaaaaggagggatgcaatttgggttaccagagaaaactgcttgtagaaaccagtacaatctccgaatccttcgcaatactataaaataagcatcctcattgcatgccaagtgcttctttaacctgtaatccaccccgtcctctccctcaaaatctgcgttaaactgaattttaaaaacattttaggggagggggtaagcagttggtttcccgcttgacagtaattgtggccacggagcgcgaagctccacactccacacagcgcgccacccacagaggcgcttctcaaaagttgccacccatcttggccacgagtcccgggacacggactcgcctcctccgacgacggcagccgggaccggccgggatccgggagcccagcgccgaccctctcccctctgcgcgccgccgccgccgccgtcaatcaacgcccccctcccagggactcggcccgggggcgcggcccggggcggggcgcgatcgcggcgcgtcgaaggggcccccaacagccgccagcttgcggagcagcgggaccgccgcccacgaaacgaaagttgcccgcgaccgagcccggccgacggggggcggtccgtgcgcggccggagagaggagcggcgccccgaccgggcctccggcctgcctcgctcacctctcggggtgcgccgccttcctccgccgctgccgcctcctcctccctgtgagtgcagcggggtctgccctgtggaaccaccataccagtcccgcccgctgctgcagcgccgccaccgccgccgctcctctgccgccttagtcgctgctctttgttccccctccgagagccactgcttcggctgcccgcctcagccgccccgacgggccgccactacgccctcccgccctctcggcccccggcctcgccctcctcgctgcgcccgccgctgccttcgcctccgcgccgccgtcgccgccgccaccgacgccgccgcctcctcctccgcgcccccctcgttttcattgaaagcaaacaagcatcatggcggcggccgccgtccctcagccagcgagcgcccggaccgccgccggcgctccaacatcctggccgctcattgggcgccgtcgccgggcacaaccatccgcccttcggtgcgggggtcgctcccggcacgcagctgcccaggccccgcccccttacccccgcgctggagagcggtggaccggcccggcgcgctgcgggccctgcctccctgcctgccgccctccatcccttcctctccgtccatccttcgtctccttctgttcccgctctcctcgctcctttcctgccttggcacttctgttttctcctctccttagcgctcctccatttttcatctacttctttttccgccccaggttgtccactttttttttgttttttgagacggtgtcttgctctttcacccaggccagagtgcagtggggcgatcttggctcactgcaagctccgcctcccgggttcacaccattctcctgcctcagcctcccgagtagctgggactacaggcgcccgccaccgcgcccggctcattttttgtatttttagtagagacggggtttcaccgtgttagccaggatggtctccatctcctgacctcgtgatccgcccacctccgcctcccaaagtgctgggatggcaggcgtgagccaccgcgcccggctgggttgtccacttttatctcctcttttccttgatcgtcctcccctttttttctcctcttccttttccttaagccttcgcctgtcaatcacgtcgaaacacagtatttgaccggagccagtatcttgatctgcctaaagacaagacattcaatcgtgaacagtcgaatattattccttcctcaattatacaaagaagagtaagttaacataccacttcagcctattaatggtaattcattccattacattaatggacagttttggtgctggggtcctagcctgggtaacggacagcagctgctgtgctccaagatcaaaaggtgttcagggcaaactctggtgtttgaaggtcagcagagaaatgactgggctgattcatgatgcttacatcaagaaatattagttgactgatggtcagggcacagagatgaatcagaccccacccagccctgagtaagctcacagtctaggggcaagaataacacccaacagacttaatattggaggtatattggtcgggcgcggtggctcacgcctgtaatcccagcactttgggaggccgaggggggcagatcacctgaggtccggagttggaaaacagcctgaccaacatggcgaaacttcgtccctactaaaagtacaaaaaattagccaggtctggtggcttgcacctgtaatcccagctactcgggaggctgaggcaggcaggagaatcatttgaacctgggaggcggaggttgtagtaagcggagatcgcaccattgcactcaggcctgggcagcaagagcgaaaccctgtctcaaaaaaaaaaaaaaaatttgagctatatgttgaaggcgtgaaggaaaaggaaagctgcctgcccacctatgtggcaaactaggataggctgctaactgcttcctggaaaatcaaccctgaagaaatgagagtgagacaggttccaggaactaacagtagcaacaaaccgaggcttctgcttcagtgaaggctgttgagagctggggatgtgggaaatgggttgctgttgcctggggtggaggagacctggctggaagggcaaggaaaggatgagggacaaaagctgttcagaggtgaagatgatccccctctccccagcacggccttgggatggtcatcgcttggcactgccatgacatcaggagtgacagcccaggcctctagcgccataggacactgggcaaagacagagcagtgcagaagtttaggagtcaggaagaacacatgtagaccagtaagctgcctgtggccatccctccacaacctcctcctgtacagcagggagttgtgcggccctg

SEQ ID NO: 317819 - DNA, 4001 bp, Homo sapiens
cctgggcaacaaagtgagaccccgtctctacaaaaagtacaaaaacttagccaggcatggtagtgtgtgcctgcagtcccagctactcaggagactgagctgggaggatcacttgagccccaggaagtcaaggctgcagcagtgagctgtgattacgccactgcattccagcctcagcgactgagcaagagcacgtctcaaaaaaatcatcatcatcatcatcatcataccagcaattctgcctgccactttccactttgtaagcacatgctccaaaatgagcctaagataggggtttgtcttcctccttttaagcctcctcagggcaagcatctcacagcgcatcacaactctatggctttcaaatatgcttatttgcacaacacagcccctaaaggtaatctaattacttatctgggttacaaccaaagcaacagtaacaagtttcaaaactgaaggaaaaaccgtccaggatgtagtcagaaacaggatgctaatctcaagcgttgcaccttcctaggaatttttaagggttaatttttattacatacaatgtttgcctcacgggctgacttaaaaacttgactcccacatgagctacacagaaaactgtgcaagaaggaaaggttttcacaaacacactcacacctatgaattactgaagtccctgctctgtgttgacctgcagtgcagtatgttcagatcgctcccgttcatctacggtgtaaacttctccaaaacatagcttcttatttacacaggaaagctctgaagggcaactaatgataaagccacaggaaagttttctctgcaagcaatcaaggccttgctcgggaaaagaaacgttgagtctgattttgttcgtttaagcccaagtgtacaaggaaacaataaacatcacttccttattctagaggactgaacaaaggctttgccgtgcatagatatgatagaaaaggaagtggcacgtttgaagaaataaatagcagcagcgtttaagaggatcctctgaccctcccttacctccaaacagtgtctcaaggcactgccctggattgaaccgcagttcaaacttcttaaaaccacccgaatggcccaggtctgtgagttggctcctccattcataaagccatagaacaccaagaaaaagttatggggccgcaagaactaaggaagaggcggcgatttagaagggggaggcccgcaagattccaaattcaggtcctcctccccactactccgtctcccatcatcattctcttctcgtttatcatcatccttccacttcaaatcacactcagtcctcctccttctgacacgccattcttcttctgtttttgtttggtaaagcaaagttaaaattacgggccttaggactaagataactaagttcgaagccaggccaggccacgtagtagtcgtgtgtccttgcataagccacttaatctatttcgtgcctcggttttcctatcttgtaaaatgggtttgataacagtacgcacctcggaggattggagtagaagttaaaatgaagcatatgagatgctttgtaaagtccccgcacatattactcgaatattatcgtgtgacggtggccattattattactactctttgctggggttcctctcctcctcacacaccctgccccttacacacgcccccactccccttccccctacagacccccaatggtctctcacactctttcatcttacgctcctctttccggtaagcgcaggcccgcttaccgggaccgacagggcccgcgaagcgctggctggcgggctgacgagctggcgggctggcgggctgactccccgacggcggcgacggcagcccctggcccggagctcttttccctctaccccggatctgctcctagaaccgaacgagccagtgaggtgagcgcccccgtgcccagagcggtcttacgtgcctcccaccaaacaaccggacggcaccactctacccacccgatccgcccgactcgcctgctctctagagtcactccagacgcgcgcgcgcgcctggtcacgcccgctcctccccctttgcgcgcccctgcgactccgtgcgtgttcgctctgcctgtgaggtcgcgggaagcagcgcgcaggagcagaagtaacagggtgccgccgaataggtggggagtggaggcctggaagcacgcttgcggaagacggcccgcctgcggccctcttcgcgtgattagttgcgctcgctcaatttaatcatgattcttactcctccattttggtcctctttccgagcgaacaaggaaggggcgtggtctagaactagcgcccccccccacccccccgccgtgggcgcggcctggaaaaatccaaaggccgaggaaagggcgtggcccttcgaacaaacccctcgaattaccacgccccctcctcctggctttgaaggaccgttaaaatcgttggcacgaagggatttgtgaagaggctgacggagaaagaggctgtcgcgactttctgttctaacatggccccgtagatgtctcacaaagcatctatcctacggttcctttctggcaaacaattagttgggggtggggcggctccccaaagccgaatgtgggtgacgtccgccaaggcccgcctacctcccggcctcaccgagcagagcgaggaacattgccatagcaactggcccgccagggtctgctcgagttacaaagaggacggcgcctcccgtgggcacggcgcctggccagcgcaggcgtcgccgggctcttcagagctccaaaatctttgcggacgcgcagggagctcgccagattttagtgtcgagacccacgggctcaggcctcgcccaggagcttctgaggcccctctgccagccccttggttccctcttaatcctgcttgaagagagggctcttgaccgacgccggccctgggcagcgtgtggccagctggggcgcgcctccgcctcgtgttctccgcggtgggagagcagacaaagcgcccgcttcctgcacacagtgtcggcggcgggccgccctcagccactcccgccagcgctccacccctgttcccgagaggacgtgggggctgccccaagcacggttctagttcttgtcccagatgcttgtacttgagaggctgttgataagaaaacggcaaatgtacccctagtgacgaggagaggggcttctactattcactttgcacttttaaacatttccccctaaggggattctccaaaatcctccaattcctaggctggatgccgagctggccttgagcggcaatttcaaacgggattcccaaaagctgttctccagggaggtgaactagctccagcctccaggataagagcatcaaatgcactttctgaactccagtcctcctcttctcccccccaaatgagtgtctagctccttatctgcaaaattaggttacgaatggctgtcgtgagcttgtgaagattaaatagttaataattggaaaaacaccccgcaccgaggaagatataaaagagcgttcaataaatggcatgtctcagtttgctctccctaaaacagtcgatttggggccgggattggtggctcactgagcctgtaatcccagcacttggggaggccaaggcaggcggatcacctgaggtcaggagttcaacaccagcctggccaacatggcaaaaccctgtctctactaaataatacaaaaattagctgggcgtggtggagggcacctgtaatcccagctactccggaggctgaggcagggagaattgcttgaatccaggaggcggaggttacagtgagcctagatcgtgccactgcactccagcctgggcgacacagcaagactccctctcaaaaaataaaaaaataaacagtgattccgttgagggatacactgataaagaaggcaggcaagtgccccatcccccagtcagttctatgggtttcttttttttttttttttttttttttttttgagactgagtctcgctctgtcacccagcctgga

SEQ ID NO: 317820 - DNA, 4001 bp, Homo sapiens
tgggcaacaaagtgagaccccgtctctacaaaaagtacaaaaacttagccaggcatggtagtgtgtgcctgcagtcccagctactcaggagactgagctgggaggatcacttgagccccaggaagtcaaggctgcagcagtgagctgtgattacgccactgcattccagcctcagcgactgagcaagagcacgtctcaaaaaaatcatcatcatcatcatcatcataccagcaattctgcctgccactttccactttgtaagcacatgctccaaaatgagcctaagataggggtttgtcttcctccttttaagcctcctcagggcaagcatctcacagcgcatcacaactctatggctttcaaatatgcttatttgcacaacacagcccctaaaggtaatctaattacttatctgggttacaaccaaagcaacagtaacaagtttcaaaactgaaggaaaaaccgtccaggatgtagtcagaaacaggatgctaatctcaagcgttgcaccttcctaggaatttttaagggttaatttttattacatacaatgtttgcctcacgggctgacttaaaaacttgactcccacatgagctacacagaaaactgtgcaagaaggaaaggttttcacaaacacactcacacctatgaattactgaagtccctgctctgtgttgacctgcagtgcagtatgttcagatcgctcccgttcatctacggtgtaaacttctccaaaacatagcttcttatttacacaggaaagctctgaagggcaactaatgataaagccacaggaaagttttctctgcaagcaatcaaggccttgctcgggaaaagaaacgttgagtctgattttgttcgtttaagcccaagtgtacaaggaaacaataaacatcacttccttattctagaggactgaacaaaggctttgccgtgcatagatatgatagaaaaggaagtggcacgtttgaagaaataaatagcagcagcgtttaagaggatcctctgaccctcccttacctccaaacagtgtctcaaggcactgccctggattgaaccgcagttcaaacttcttaaaaccacccgaatggcccaggtctgtgagttggctcctccattcataaagccatagaacaccaagaaaaagttatggggccgcaagaactaaggaagaggcggcgatttagaagggggaggcccgcaagattccaaattcaggtcctcctccccactactccgtctcccatcatcattctcttctcgtttatcatcatccttccacttcaaatcacactcagtcctcctccttctgacacgccattcttcttctgtttttgtttggtaaagcaaagttaaaattacgggccttaggactaagataactaagttcgaagccaggccaggccacgtagtagtcgtgtgtccttgcataagccacttaatctatttcgtgcctcggttttcctatcttgtaaaatgggtttgataacagtacgcacctcggaggattggagtagaagttaaaatgaagcatatgagatgctttgtaaagtccccgcacatattactcgaatattatcgtgtgacggtggccattattattactactctttgctggggttcctctcctcctcacacaccctgccccttacacacgcccccactccccttccccctacagacccccaatggtctctcacactctttcatcttacgctcctctttccggtaagcgcaggcccgcttaccgggaccgacagggcccgcgaagcgctggctggcgggctgacgagctggcgggctggcgggctgactccccgacggcggcgacggcagcccctggcccggagctcttttccctctaccccggatctgctcctagaaccgaacgagccagtgaggtgagcgcccccgtgcccagagcggtcttacgtgcctcccaccaaacaaccggacggcaccactctacccacccgatccgcccgactcgcctgctctctagagtcactccagacgcgcgcgcgcgcctggtcacgcccgctcctccccctttgcgcgcccctgcgactccgtgcgtgttcgctctgcctgtgaggtcgcgggaagcagcgcgcaggagcagaagtaacagggtgccgccgaataggtggggagtggaggcctggaagcacgcttgcggaagacggcccgcctgcggccctcttcgcgtgattagttgcgctcgctcaatttaatcatgattcttactcctccattttggtcctctttccgagcgaacaaggaaggggcgtggtctagaactagcgcccccccccacccccccgccgtgggcgcggcctggaaaaatccaaaggccgaggaaagggcgtggcccttcgaacaaacccctcgaattaccacgccccctcctcctggctttgaaggaccgttaaaatcgttggcacgaagggatttgtgaagaggctgacggagaaagaggctgtcgcgactttctgttctaacatggccccgtagatgtctcacaaagcatctatcctacggttcctttctggcaaacaattagttgggggtggggcggctccccaaagccgaatgtgggtgacgtccgccaaggcccgcctacctcccggcctcaccgagcagagcgaggaacattgccatagcaactggcccgccagggtctgctcgagttacaaagaggacggcgcctcccgtgggcacggcgcctggccagcgcaggcgtcgccgggctcttcagagctccaaaatctttgcggacgcgcagggagctcgccagattttagtgtcgagacccacgggctcaggcctcgcccaggagcttctgaggcccctctgccagccccttggttccctcttaatcctgcttgaagagagggctcttgaccgacgccggccctgggcagcgtgtggccagctggggcgcgcctccgcctcgtgttctccgcggtgggagagcagacaaagcgcccgcttcctgcacacagtgtcggcggcgggccgccctcagccactcccgccagcgctccacccctgttcccgagaggacgtgggggctgccccaagcacggttctagttcttgtcccagatgcttgtacttgagaggctgttgataagaaaacggcaaatgtacccctagtgacgaggagaggggcttctactattcactttgcacttttaaacatttccccctaaggggattctccaaaatcctccaattcctaggctggatgccgagctggccttgagcggcaatttcaaacgggattcccaaaagctgttctccagggaggtgaactagctccagcctccaggataagagcatcaaatgcactttctgaactccagtcctcctcttctcccccccaaatgagtgtctagctccttatctgcaaaattaggttacgaatggctgtcgtgagcttgtgaagattaaatagttaataattggaaaaacaccccgcaccgaggaagatataaaagagcgttcaataaatggcatgtctcagtttgctctccctaaaacagtcgatttggggccgggattggtggctcactgagcctgtaatcccagcacttggggaggccaaggcaggcggatcacctgaggtcaggagttcaacaccagcctggccaacatggcaaaaccctgtctctactaaataatacaaaaattagctgggcgtggtggagggcacctgtaatcccagctactccggaggctgaggcagggagaattgcttgaatccaggaggcggaggttacagtgagcctagatcgtgccactgcactccagcctgggcgacacagcaagactccctctcaaaaaataaaaaaataaacagtgattccgttgagggatacactgataaagaaggcaggcaagtgccccatcccccagtcagttctatgggtttcttttttttttttttttttttttttttttgagactgagtctcgctctgtcacccagcctggagt

SEQ ID NO: 317821 - DNA, 4001 bp, Homo sapiens
ctccaaaatgagcctaagataggggtttgtcttcctccttttaagcctcctcagggcaagcatctcacagcgcatcacaactctatggctttcaaatatgcttatttgcacaacacagcccctaaaggtaatctaattacttatctgggttacaaccaaagcaacagtaacaagtttcaaaactgaaggaaaaaccgtccaggatgtagtcagaaacaggatgctaatctcaagcgttgcaccttcctaggaatttttaagggttaatttttattacatacaatgtttgcctcacgggctgacttaaaaacttgactcccacatgagctacacagaaaactgtgcaagaaggaaaggttttcacaaacacactcacacctatgaattactgaagtccctgctctgtgttgacctgcagtgcagtatgttcagatcgctcccgttcatctacggtgtaaacttctccaaaacatagcttcttatttacacaggaaagctctgaagggcaactaatgataaagccacaggaaagttttctctgcaagcaatcaaggccttgctcgggaaaagaaacgttgagtctgattttgttcgtttaagcccaagtgtacaaggaaacaataaacatcacttccttattctagaggactgaacaaaggctttgccgtgcatagatatgatagaaaaggaagtggcacgtttgaagaaataaatagcagcagcgtttaagaggatcctctgaccctcccttacctccaaacagtgtctcaaggcactgccctggattgaaccgcagttcaaacttcttaaaaccacccgaatggcccaggtctgtgagttggctcctccattcataaagccatagaacaccaagaaaaagttatggggccgcaagaactaaggaagaggcggcgatttagaagggggaggcccgcaagattccaaattcaggtcctcctccccactactccgtctcccatcatcattctcttctcgtttatcatcatccttccacttcaaatcacactcagtcctcctccttctgacacgccattcttcttctgtttttgtttggtaaagcaaagttaaaattacgggccttaggactaagataactaagttcgaagccaggccaggccacgtagtagtcgtgtgtccttgcataagccacttaatctatttcgtgcctcggttttcctatcttgtaaaatgggtttgataacagtacgcacctcggaggattggagtagaagttaaaatgaagcatatgagatgctttgtaaagtccccgcacatattactcgaatattatcgtgtgacggtggccattattattactactctttgctggggttcctctcctcctcacacaccctgccccttacacacgcccccactccccttccccctacagacccccaatggtctctcacactctttcatcttacgctcctctttccggtaagcgcaggcccgcttaccgggaccgacagggcccgcgaagcgctggctggcgggctgacgagctggcgggctggcgggctgactccccgacggcggcgacggcagcccctggcccggagctcttttccctctaccccggatctgctcctagaaccgaacgagccagtgaggtgagcgcccccgtgcccagagcggtcttacgtgcctcccaccaaacaaccggacggcaccactctacccacccgatccgcccgactcgcctgctctctagagtcactccagacgcgcgcgcgcgcctggtcacgcccgctcctccccctttgcgcgcccctgcgactccgtgcgtgttcgctctgcctgtgaggtcgcgggaagcagcgcgcaggagcagaagtaacagggtgccgccgaataggtggggagtggaggcctggaagcacgcttgcggaagacggcccgcctgcggccctcttcgcgtgattagttgcgctcgctcaatttaatcatgattcttactcctccattttggtcctctttccgagcgaacaaggaaggggcgtggtctagaactagcgcccccccccacccccccgccgtgggcgcggcctggaaaaatccaaaggccgaggaaagggcgtggcccttcgaacaaacccctcgaattaccacgccccctcctcctggctttgaaggaccgttaaaatcgttggcacgaagggatttgtgaagaggctgacggagaaagaggctgtcgcgactttctgttctaacatggccccgtagatgtctcacaaagcatctatcctacggttcctttctggcaaacaattagttgggggtggggcggctccccaaagccgaatgtgggtgacgtccgccaaggcccgcctacctcccggcctcaccgagcagagcgaggaacattgccatagcaactggcccgccagggtctgctcgagttacaaagaggacggcgcctcccgtgggcacggcgcctggccagcgcaggcgtcgccgggctcttcagagctccaaaatctttgcggacgcgcagggagctcgccagattttagtgtcgagacccacgggctcaggcctcgcccaggagcttctgaggcccctctgccagccccttggttccctcttaatcctgcttgaagagagggctcttgaccgacgccggccctgggcagcgtgtggccagctggggcgcgcctccgcctcgtgttctccgcggtgggagagcagacaaagcgcccgcttcctgcacacagtgtcggcggcgggccgccctcagccactcccgccagcgctccacccctgttcccgagaggacgtgggggctgccccaagcacggttctagttcttgtcccagatgcttgtacttgagaggctgttgataagaaaacggcaaatgtacccctagtgacgaggagaggggcttctactattcactttgcacttttaaacatttccccctaaggggattctccaaaatcctccaattcctaggctggatgccgagctggccttgagcggcaatttcaaacgggattcccaaaagctgttctccagggaggtgaactagctccagcctccaggataagagcatcaaatgcactttctgaactccagtcctcctcttctcccccccaaatgagtgtctagctccttatctgcaaaattaggttacgaatggctgtcgtgagcttgtgaagattaaatagttaataattggaaaaacaccccgcaccgaggaagatataaaagagcgttcaataaatggcatgtctcagtttgctctccctaaaacagtcgatttggggccgggattggtggctcactgagcctgtaatcccagcacttggggaggccaaggcaggcggatcacctgaggtcaggagttcaacaccagcctggccaacatggcaaaaccctgtctctactaaataatacaaaaattagctgggcgtggtggagggcacctgtaatcccagctactccggaggctgaggcagggagaattgcttgaatccaggaggcggaggttacagtgagcctagatcgtgccactgcactccagcctgggcgacacagcaagactccctctcaaaaaataaaaaaataaacagtgattccgttgagggatacactgataaagaaggcaggcaagtgccccatcccccagtcagttctatgggtttcttttttttttttttttttttttttttttgagactgagtctcgctctgtcacccagcctggagtgcagtggcgcgatctcggctcactgcaagctccgcctcccgggttcacgccattctcctgcctcagcctcccgagcagctgggactacaggcgcccgccaccatgcccggctaatttttttctctttttttagtagagacggggtttcaccctgttagccaggatggtctcgatctcctgacctcgtggtccgcctgcctcggcctcccaaagtgctgggattacagacctgaaccaccgcgccgggccagttctgtgggtttctaac

SEQ ID NO: 317822 - DNA, 4001 bp, Homo sapiens
aggagtttccagcagggctgagagagagttttaagtctgcaggccctttcaagggtaaaataggaaatcatttcatgaagcagcaattttacccagaacccagctagaagagatgtgatcctagcttaaattaaagtgactaagaaacaggtggggtgaacaaggaggtgtggtacgcaagtcatcttctcccactttcctttggaatccaaaggaactcaacattggaaacacagctggatacgttaataaagatcccagctgggcagtctagggaattgggggtgtacaggccagtgctccctctcctccaccttgaaaccctgcctgttttcacacagcaattgaggatgcgcccttggacagcgaccttggggtctggagcagccatctatcccaggagaaggaggaaggctcggcaggggaggctctggccagcccaccagggcctgtccagtttcgtggggaggggaactgccgcacatgccgcacacaaaaggcggaggctttgaccaacatgctgggtgagggcttggaggacccaaaggtggctctttctttgaagacacacagcagcaatcttaacccttagaagtgtcacagagcctcatatgagctttcaagtaagctgtggaagtcgcgattcccaggtaagggacgggaaactccggatgtcctgcgagcccacaccccagatggcaccgcctgaaaccagaatccaggtcctccacccccgattgtttctccttcctctcatcttaccaagtcatgtgggcgcccccacccccatccccgaggcctcagtgcgacggtgaccgctcagtcttggggcctgagctgctggagacacactggagcacagcggggcccagccctcgggcctgtctgaggctttcctccgccgtgaccaccgcctctccaggtgtaccagcgttggttaggaacagtaggtgctactggtcacagtcaccagatacttcccacgagcctcatctttatccccgactctggccgccggcgggaagcggcgtgtccgagcgcacaccccgtggagactgaccctaggtctgttactccaaagtccctggtctctccttcccctttctcgcggccgcctgcctggcacgggaccctgaggccggagcggagaccgcaaaaccccttggggccggcaccccctgcctccgccttggcgcagacgtgcccatctctgggacggccccgagcgcacgcagccggcgggcgaccctcctcccagagacctgcacgctgcccccggctcccagcgtaccgccaccctcaacccgacacacccaagtccgccccagccacgcgccaagacgctcacctcccgcagcaggcgctccaggtgcggctcggcccaggcgtccagggcgcctggcggccccgcgcgccgcagcagctcccgctcctcctcgagcgccgccacccggccctgcagcgcggccgcctggacacccagcagcaggcaggcagccgccgagcccacggagagcagcaggcacagcgcgctcaccgcccgggacccggccgtcgtcgccgagcgccctccgccgccgccgcccgccgcattgcccttccccgcgtcgccgccgccaccggcgcgctcgcctgggcccatggcgcgttcgtcgcgcgtggactctccgagggggcggtgctgctggggcagaggctgggtgcgagaggagcaggcgggacagcccgaggcacgaggtccgccgggcgcgggggttagcctccgggtagcagcggatcgccgcgcacgcccccttcgccgcagccagctcctccacagcggccactttgggcagtttcctctatgcaaatagaccctgccagaaaaggagcagggacccacccaggggaggagcggccgggctggccccgcgcggcgagggggcgggggcgaggaaggagcgagctcctcggagccacccgtcggcgccgggctgatcccacgcgcagcgcgcacctctgccctcacctagcccgggcgccggcacccgcccccgcacgcacctctgaggcttccccagcccaagcccgcactgtggaccccagaggtcggaggggagcccggcgacaccgcgccccttctgcagcccacccctggctggagcacccaccactcgtgccttagcacattcctctaaacttgtgaattacctttctgacacttgtaaaagttcaaaacttcaaatcctgcaaaaaactgagtgggtctgtcctcggtggtggattagcgccgcttcgtggcggaaagcgacctctgcgcactcacatttagagaggcagggtcgagattgcgccaaacagaaatacgccccttagaatcttctcacgagttcttagctgccggacttcggtgcgggaaacaaaaatggtaagactgtttctggcctggagagggcttttgagaaaactgagactataacgaatgggaaagattcagaaaatgaacttcaagtcttgttcaactgatgacttaattctgtattagacgcacaacttggccaaaaattatgatctagtatgcaccacacttaacctgtactgcgattctgctgcaaatttaaatcacagggctgaggcaagaaggctgtggcgtacagcctgggtccagagaacagaatgagtggcactaacaagtcttggcaggaaagggaagaactgctggaagtcaggctgggttcagattcctaccaggcatattcatgtcctaaatgggtcccaagtaactctttcgctaactcctgtaatacctaaatgaaacaacaaaccagcagttcagatctttgtgatttgagtaaccccccaaccatttttttttaagaaaaataacgttatatccatcttccctctcactctggatatcttctggttgtctcatttctgtggatactcaccttttagaactgttgagtgcctctggctaacatgttccatctccttcccttaattcagaggggaacccctgagatggccgggggttatggttgatagacttggctctgtgctaaagtctggtgtatgcccaatagaatgaaaagttggcctcattctgaaaagaggccaacaccctcttacaagtcagcactacatttcttacaggcacataaactgcacaccacctacctatgttaatgttactgcatgtattgtttgccatgttcctgaagcttctgtgtattgaaaaagccaagctcactggcccctgggcctctgcccttgcctaccacctcactacctgcattcctgctctcagatcgttaaacggcaagcccctcctcatcctccaggtcaaggtcctcaacctcactgcttctaaaagatcttcccagactgcccaatttaaggtggcccacaagattaatcagggaattggggcggctgaattaagatggaaatactgtctgcaactcattctaaaaggcgaaaaagaaaatgacttacttgtgtccattagggtcctggaagaatagatggcatcctcagagagggtgactcaagacagcctgaatgtagagccacttcacaaagtggagatcagaggggccagcaggggaggccgaagcagcactctgcgggtattgacagtgggaggccattaccatccctaactgggaaccctggggaacttggagctatagaagagggctgctccacagcacctgtggcccttggttaaggggaacagcctctgcaaagccatggcttgaaagggagggagctcacagaataaatactcaactgctctctcctgctctctgatctactggggccttccaatgaccaaacctccagggcaggggccagcctcctagagggcagagagcagaggcagaaggaagaagggcagatcttgagggggaataaaagaatatccactaacctatcgtgtgtagcatcacctaacaggtagacagcacttacaccaatcccgctactgctgcctatgaatggctaacctgtcagca

SEQ ID NO: 317823 - DNA, 4001 bp, Homo sapiens
tagttctgactactcatgcctttcctggcccccttctcattagctttctagacattataaaagcctaatatgaaacaattccacaaataatgtccaagtgatttgccaaatatgaatactggaaacagggtgatttcttaatagccactggctgcacatgacatagtatcttatgaccagcttgttgagggactggcccagctccccctctccaagttaactgctagctccagccatgtctaaaaaagtttaacaggaagggagagagaagtcaaaaaggctacgtgaatcttcttacagcaaaaacttaaaaaaaaaatccccacaactatgtaatatcaagagatcatccacctgcagtcctataatgactgctttgctaaaattttgatacagggattttaaaaaatatataaaagataaaacatcttttccttaccctcgaccccttaccgcaaaaatattttattattaagtaatgctcttcctggactaaagatcagtctccattctcacatgttccaagttactatgaatatttcctgtacccatcatgtgccgattcaatatctctattctgaactaaggtacagggtgagggagaaagtcctccacattcatctgtctcactacatctaacctagcagaattcaacacctcaaatttcaacaccaagctgagtcgctccagcttctgtcgaaagagttgcgtccgcagtgccccccaacctactcggcttggcatcctcagagagaccaacctcttttaagaggtccgacttgaaccgctcccatgcccagtcgttcggacaccgctgaagcccaacccggattccttacacccgggacagctgccgccctaagtcccaagtcacggcgcgcatctggcctcccaaactggatctcaggtttatacaccctttccctggtcctcggctgcccccgacgagcccccgggcaacaaggacagtgcccctatatccccgcctcatccctagtcgctgcagcaacactcagcctcgcaccccggcacgttccgcgcctcccgccagccccaccccaccgcctcagcggattgcctcgctgcaggtgagtctggccaggggtcccttggcaccaggggttgctcaccttactgaggaccccgcagcgctccacaggcggcccagactccgtctctggatcctcctccgagcccgacgagttccagctctgattatccgacatggaggctcgacaaccgagcaggagaccggcccccgctccctcagctgcgccggaggaggcgcccagtcctcggggtgaagggtcgggggatggcgaagcgaagagtgcccgctccggtgtgggggggagcaggaggagggacgaagtccgcccgccgcgccgccgccgcgcctgacaccgagcggagcgaggaaggaggacgagcggtgaaggaagcctacccttccagccgtcagccgccgccgccgtcgccgtgacccctgcgttgcgcccggcgctgccacccgaacttagccccctcgatgccaatttcaaatagggaaggaaaagggaaaagaagggaagagaaaatccggccgctgagtcccgcgtccactcacacctccgctaccgccgccatcttcctgcctggcccactatttaccctcccctcccctgtcctttcccctccccttcgtcctcccattctcccccactactccccgccccgtccccctcccggcgtctgacgcgacacgccgagccttcgggatcctcctcccgaaccctacctccggctctcccgggtgacgacgggtagaaaagcaggaggagcggagaaaggagagggcggggtagggatgcagctgtgctgcattctgggaagggcgttggtccgtcgctcgcgcagcctcctgggagttgtagtcgcgatcctgaggtaacgggtgagtatcccgcgcggggatcgcttgtccccttggggccttgtcagtcggtgggtgggcttcgtttgacagttgcgtgaccagcccctcggcctcgcttctatccttgccttgtgtgtttatgacgaaccctccgggcttgcgggcccagacgtgagagagctttccgctgaagatgacgggcctgctttccagggcggcttgtcgaaagcccgggagcatctggccgcttccgcctcaaccatgggctggggttttgtgagctactagtgccaagggttttctttccaccagaccaccgctgtaaatctcgagggtcttactcattagaagttagaattcacatttgacgtttaaaggaagaatttccttagtaccttctcacaagcacgcacttcgcatttttagatttctagagtttgctttgtagaaagtaattttgaggttgtcagagaataaatgacgttagaaaggtttttaaagtaaaacaagaatgtgagatgatagcctgggattttctcttggttgtaaatgaatatcttactgagaaccacgttaaccatgcctgcccctcaaagataggaaaggttggatatatagaaactttctcgtattagaaataccgaagtgcagtggttttgtgtgtacaagggattaggcaataggaggctatttttgttttaagactagggttgaattagcagaaagaccaatagaagatctaacaactcttgtcagttgtcaaggataactttgattatgagactttgactttgtagcttcagtaatttcctctcgttagctattttaatatagtcgatttccttgtaattgccaagagtaaaatttgttattaaaccttagaaagagtactttcttactacaaggatgggacgataggagcgaaatttcgagtctaagggaaaacgctggccgagtgtggtggctcacgcctgtaatcccagcacttcgggaggccgaggtgggtggatcacctgaggccgggagtttgagaccagcctgggcaacaaggtaaaaccccgtctctactaaaaatacaaagattagccgagcatggtggtaggtgcctgtaactccagctctttatatcctggtttcaaatctaggcttgatgaccttctcccatatcccagtatcatatttttttcttcctgcatgggggattaattacgattctgaatggttggtagcatgaagctaggttatccctatcgtggcaatggatatttaagtaggcattgccaatatttatcttgctttcttttactttcttctttttctgaccatccacactccatttatattgatgagttcttttactaatatcaattattattatattatgctcatactgccatgtcttattctgcagctttgatccttaaggtgactttgcatatctgtctaggactcctttatctgttgatttttaccatttaagtctccaaagacagctgtatttttggaaaagtgggagggaagaggtagatggggatactcattgataccttaatgcacttcacagctgcttgagaatatgtcagatctcataaaaagttctaacattcgagaataagacagtgatttcagaaatggaatttcaaagggtgtgtaggccaccctttttatcctgtttcctattgtagaaatgagagccaggctaggaatgtttcaagcagaaatattcttactattcaatgaaattgaaaatgtattcccatatcttttactcctatctgtttggtttatgggataaaaacttgttagagtagttggtatttcataggcttcactataacattggaaaatcttttagtctaaaaagcacacagtacggtacaccaatgaacagtattagtgcccactcttggcatgtacacatgttctttctgtcgtttttattttgcttagcttttgagtctcttcctgttactgtgagaaattcttttattaatattttaaaggcatactatataaagcagtgtggtggtatattaggtatcagtagaatcctcttgatagttatttagtaaacgtgttttgcttc

SEQ ID NO: 317824 - DNA, 4001 bp, Homo sapiens
aacccccaaaaaagtaattatcagtaggtcaaaagtacaatttgtttcgtaaaatacttaacacatcacaatactaatatggcagtcagcttcccatcttatgagcagtgatgaaactaccaaaatcactgagaagcaagtaacccacttcctattaccaactgaaaatgtatacctactacacaatgtgttcaatagagattcctaaattacaggatacatttaatctaaagaaatcctgaggagcttctcgttactgaaaaccttgcactgaaatttcaagaatgatcacagcatcaatatacaacataattttgctgctatacaaataaaagtcaacacttgcaatccttagttctgactactcatgcctttcctggcccccttctcattagctttctagacattataaaagcctaatatgaaacaattccacaaataatgtccaagtgatttgccaaatatgaatactggaaacagggtgatttcttaatagccactggctgcacatgacatagtatcttatgaccagcttgttgagggactggcccagctccccctctccaagttaactgctagctccagccatgtctaaaaaagtttaacaggaagggagagagaagtcaaaaaggctacgtgaatcttcttacagcaaaaacttaaaaaaaaaatccccacaactatgtaatatcaagagatcatccacctgcagtcctataatgactgctttgctaaaattttgatacagggattttaaaaaatatataaaagataaaacatcttttccttaccctcgaccccttaccgcaaaaatattttattattaagtaatgctcttcctggactaaagatcagtctccattctcacatgttccaagttactatgaatatttcctgtacccatcatgtgccgattcaatatctctattctgaactaaggtacagggtgagggagaaagtcctccacattcatctgtctcactacatctaacctagcagaattcaacacctcaaatttcaacaccaagctgagtcgctccagcttctgtcgaaagagttgcgtccgcagtgccccccaacctactcggcttggcatcctcagagagaccaacctcttttaagaggtccgacttgaaccgctcccatgcccagtcgttcggacaccgctgaagcccaacccggattccttacacccgggacagctgccgccctaagtcccaagtcacggcgcgcatctggcctcccaaactggatctcaggtttatacaccctttccctggtcctcggctgcccccgacgagcccccgggcaacaaggacagtgcccctatatccccgcctcatccctagtcgctgcagcaacactcagcctcgcaccccggcacgttccgcgcctcccgccagccccaccccaccgcctcagcggattgcctcgctgcaggtgagtctggccaggggtcccttggcaccaggggttgctcaccttactgaggaccccgcagcgctccacaggcggcccagactccgtctctggatcctcctccgagcccgacgagttccagctctgattatccgacatggaggctcgacaaccgagcaggagaccggcccccgctccctcagctgcgccggaggaggcgcccagtcctcggggtgaagggtcgggggatggcgaagcgaagagtgcccgctccggtgtgggggggagcaggaggagggacgaagtccgcccgccgcgccgccgccgcgcctgacaccgagcggagcgaggaaggaggacgagcggtgaaggaagcctacccttccagccgtcagccgccgccgccgtcgccgtgacccctgcgttgcgcccggcgctgccacccgaacttagccccctcgatgccaatttcaaatagggaaggaaaagggaaaagaagggaagagaaaatccggccgctgagtcccgcgtccactcacacctccgctaccgccgccatcttcctgcctggcccactatttaccctcccctcccctgtcctttcccctccccttcgtcctcccattctcccccactactccccgccccgtccccctcccggcgtctgacgcgacacgccgagccttcgggatcctcctcccgaaccctacctccggctctcccgggtgacgacgggtagaaaagcaggaggagcggagaaaggagagggcggggtagggatgcagctgtgctgcattctgggaagggcgttggtccgtcgctcgcgcagcctcctgggagttgtagtcgcgatcctgaggtaacgggtgagtatcccgcgcggggatcgcttgtccccttggggccttgtcagtcggtgggtgggcttcgtttgacagttgcgtgaccagcccctcggcctcgcttctatccttgccttgtgtgtttatgacgaaccctccgggcttgcgggcccagacgtgagagagctttccgctgaagatgacgggcctgctttccagggcggcttgtcgaaagcccgggagcatctggccgcttccgcctcaaccatgggctggggttttgtgagctactagtgccaagggttttctttccaccagaccaccgctgtaaatctcgagggtcttactcattagaagttagaattcacatttgacgtttaaaggaagaatttccttagtaccttctcacaagcacgcacttcgcatttttagatttctagagtttgctttgtagaaagtaattttgaggttgtcagagaataaatgacgttagaaaggtttttaaagtaaaacaagaatgtgagatgatagcctgggattttctcttggttgtaaatgaatatcttactgagaaccacgttaaccatgcctgcccctcaaagataggaaaggttggatatatagaaactttctcgtattagaaataccgaagtgcagtggttttgtgtgtacaagggattaggcaataggaggctatttttgttttaagactagggttgaattagcagaaagaccaatagaagatctaacaactcttgtcagttgtcaaggataactttgattatgagactttgactttgtagcttcagtaatttcctctcgttagctattttaatatagtcgatttccttgtaattgccaagagtaaaatttgttattaaaccttagaaagagtactttcttactacaaggatgggacgataggagcgaaatttcgagtctaagggaaaacgctggccgagtgtggtggctcacgcctgtaatcccagcacttcgggaggccgaggtgggtggatcacctgaggccgggagtttgagaccagcctgggcaacaaggtaaaaccccgtctctactaaaaatacaaagattagccgagcatggtggtaggtgcctgtaactccagctctttatatcctggtttcaaatctaggcttgatgaccttctcccatatcccagtatcatatttttttcttcctgcatgggggattaattacgattctgaatggttggtagcatgaagctaggttatccctatcgtggcaatggatatttaagtaggcattgccaatatttatcttgctttcttttactttcttctttttctgaccatccacactccatttatattgatgagttcttttactaatatcaattattattatattatgctcatactgccatgtcttattctgcagctttgatccttaaggtgactttgcatatctgtctaggactcctttatctgttgatttttaccatttaagtctccaaagacagctgtatttttggaaaagtgggagggaagaggtagatggggatactcattgataccttaatgcacttcacagctgcttgagaatatgtcagatctcataaaaagttctaacattcgagaataagacagtgatttcagaaatggaatttcaaagggtgtgtaggccaccctttttatcctgtttcctattgtagaaatgagagccaggctaggaatgtttcaagcagaaatattcttactatt

SEQ ID NO: 317825 - DNA, 4001 bp, Homo sapiens
aaaccctgtttcaactgtaaaatcaaatttattattacaacagtaatcaattttgagatagggtcttactctgtcacccaggctggagtgcagtggcacgatctcagctcactacagcctctgcctcctgggttctaagaatccttgtgcctcagcctcccaagtagctagaactacatgcgcgggccacagcgctggctaatttttgtattttttgtagagacagagttttgccctgttgcccaggctggtcttgaactcctgagctcaatcagtcctgcagtggctcacccctataatcccagcactttgcaaggccagggaggacagatcacccgaagccaggagttccagaccagcctagccaacatggtgaaaccccatctttactaaaaatacaaaaaattagctgggcgtggtggcgggtgcctgtaatcccagctactcaggaggctcagggaggagaatcgcttgaacacaggaggcggaggctgcagtgagccgagatggcgccattgcactccagcctgcgcaacaagagggaaacgccctctcagggaaaaaaaagagagagagattagcccgcctcagcctcccaaagtgctggaattacaggcatgagccacagcacctttcctgtaataatcaactttaaatgatgtgatgagaacaattctatactgcaccatattggatacagtttactgatgtagcggtgttccccaagacactggtatgaggaaagaaactggcgatcagaaccaaagtgaggcaggaaaatagggtcaggaggctgggaacataaagctgattcccacttcagctatgacaagaaatgtcctctccatatggcataggcggagaaaatgactttgtaactttacttcatcctcttcatttacatagggagtacaccaagtaaccaatggaatcctctagagggtatttaaattcccaaaaattctgtaggggcccttcagcccctatgctcaagcagctcccacactgtggagggtagtttcattttcaataaatgtcttcttcattctttcctcgctttctttgtgcgtcttctccagttctttgttcaagacgccaagaacctggacaccctccactggtaacaaaaggaatccagaaagaaggaaaaactttaaaataactcttttcttctgaaagatttctacccaatccaagcacaaagaaattacttccgaacactattttgcctatatacttcagtactttttctgtatccacacgctacctgcactattgcttattttttcacaaattgagtctttttttacttaaataatgttaaaggggagctttatatcactaccatggacaaccaactttatctaccataagtagaaattaactaaaaatctgtttaaaatgcaaataaaagcaaatgctaccaaagccaggctagattcttctaccaaccaaaaattcggtcccctattcgatactgatttaaaaggggtattaacacatgttggctattaaagaccctccagcagcagcgtgagcctttcccaccagagtgtctgaaccggaactgaaatcggaaacggaataccgttccacgtgattcggcagcactgaaggcagcacccgggaacttctgataccaaactccgcgaacagtgacgcagaccccacgcttgcagaccacacgcttccgtacagacctcagctgccaggcgcactgtgagccccacaggtggaccaccgtgactgtagaggcgctacacggccccacgcactccgcagacgcagcgtcgcaacctcggcagcccaccccaccccaccccactcaaccgggcccgccgcggcgcccaggcggcaggcagcaaggacagccttgtgcgagcccgatctgggccttcctgggcgcggctaccgcaagagcttaacggatcagctacctggggctctcccgtaggatcagcgccgcggggaccgccatcttcggctttctcgcactgccgccgtctgttagctgcgccgaacccagccaatggcggccgcggcggacggaaagccggaaggcccaagccgcgcaggggccgttttagggctccgggtctcctgcgacccgggcgccgggagacttgtcccgcagtcctggagggcggagagggcagcccagttgccctcccgacactccaatcgtgttggagttaagtctgtgcatatatatgtctttatatttatatattatatatgtatgtacatacctggataggggtgtgtgtctgtatttaatagggcaggtttaagcaagtctatgtacagacctgtatagatatatgtgtgtatgttcgtgcataaatatatacattattatttttaatagggcaggtttaagcaagcccgtgtatacatacttggataaatggtgtgtgcgtgtgtatatttttttaatagggcgggtttaagtgagcctgtgtgtacatacttggataggtgatttgtgagtatttttttttccagcgtttgggctacagagaggcaggcatttgagcgagctcccccgagcctgcccaggaagcggcgcatcacccctcaggagaggtggtgcctccagttccaccctaagcactgtgccgtcaacccctcctgtatctgcatctgcagggcttgtagtatgtacgttcaattccttcagcaacgttcaatgaatgagtgcctactgtgtaccaagcactgttctaggcactggagatacaaaaggccaaaattcctgccctcagggtttgccggcagtctaaatggacaagtatttgttgcacccttctttagagtctgacagtgcagagtaggggagatgaatcgctgcagtgagtgatgtcaaagacctcacccaagactagggagacaccatgtttgcataaataccttggtctgcctttgagaaaaacatggagtgagttaaaggaattcagatgtgggagcagtgaaaggcatccgaggtaagatcaggaaaagctccctagggcaggtggcaaatgcggtgggtctgcagagatgtggagggtgaggctgtgtgtttcaggtcagtagagtagaagggcggtttgacgtttgaagaacaggaatttagactagaaaaagcctttaatgactggttgtggcatgtgcacttaatctggtgagaaatgggtaagcattaaatgttttttctatccattaaatgttttgaaccaaagaaattttgcagtgggagttggatttttgaaggttgctgtcagcagaatgatgattgaaatggaaagaggtaagcaggagagctacctggaaactactgcaataatctatagaaagcagtaaaatcctgtggtactaaaaaggcattggtgaattaaaagatagtggatggattagttacgtttcagcagtagaatattcaagagctgccaaaaaattgaatttaattttccttcctaattatgttttacttaaattattatttaaattagttggagttcctggagcagcccaagaacaacctaactgaaaggagaaaccagattgcacattaaatctgaataatctccacatggataattgagtcaattatacagtgtgttgaacacatacaaatacatttagttccacaacactctacagtccccaatgtatgcatatctgaaaaagatgtatgtgaatctacataaattataggtctctgatccaaacacagatgacctcatctgcaacttaaaagggtcccagttccctcattctttgaatcatttcccttttgtcttgattccttacctgaagtagaaccactaaccaactaaaactgtttcaaatccctaatgaagttcaccctctgattgccttaaaaatatatagccagaattttgagcaaaagagcatcaagatggctcaaatcccaaatccatgtaaccttggacaaagtacttaacctcaacaagtttctcattcccaatctgtaatggggatgagaataatgtctgctc

SEQ ID NO: 317826 - DNA, 4001 bp, Homo sapiens
tttatagtgttttaaaagacacattctcagctactgttctagtaacagtgttcaagatagagtaacattaatcagtttatcagttttacctggttaaaagtgtgagttctgcaacaagaaactgcctgggcaagagtcctggtccaccattatactagttatgagatgttgaacaacttaacatctctgtgtctcagatggggttactatcatccgcctcacaagcttgctagagaacatgagatatcgatgtaaagtgtacctgataagcagtagtattcaataaacactggccattattgaaatatttttatataggtttacaactagtctccaccaatgccacatctacacataacctcaggaatcagccctacacaacaatgtatttgtgtgtgtgttctgggtgatggggaagaggctacttaataaaaaggcctgctttaacatgattagaaatccactaactacctgttaaatggaggaactgaaacatccttatgttttaagcagttggtgtcttactacaaggaagggtgtagcaaatgcagatccaaagtacaaacacatcttagctagtaacgaccacttgttttccactgaaaatggcaaattctgttggaaaaaaagagaaaaagtaatcgaaattgaatctcaaatcatctgcttaataatcaaaatacaagtatacaggaaatgctagttatattttacatcatcaggttaacatatgccataaatcataacatcgttttaaacatttatctttcaaatcctatgaccttcatcacaaaacactacatggcaagaaataatctggctttactaagcactaggcaatgaatggtcttgaggactcaaacgtcaaatagtgagaagtttcttactttagaaaatcgaaaaaactactgtcctaagtagtcaccttagaagatacatggcaatgttaagtgcaatacagctctttttttttctttttttttttttttgagacggagtcccgctctgtccaggctggagtgcagtggcccgatctcggctcactgcaacctccacctcccgggttcaagcgattctcctgcctcagcctcccgagtagctgggattagaggcacacaccaccacgtccggctaatttttttgtactttttagtagagacagggtttcgccatgttggccaggctggtctggaactcctgacctcaggtgatccgaacgccttagcctcccgattacaggcgtgcgccaccgcacctggcccacagttttttttgtttgtttgtttttcattaccaagcaccttctctggcctttatgactaggcctcgtgtgaccctccgagattgttactgctatgtggtttaagttatttacacctgaggccaaacccagccttaactgaggtgaagggttagtacttctaacttaggcagctagtttaaaaagcctgttccataaccagaggccctgatttcctcatgattttccaatgaccttcatttcgggtccgatgacctccagctcggatttaaccaacacacctacagccgtggcctcccggagccatctcagggctttctgcggggcgggggagggggcgtcaggtggctgatggaggcagggcttccggatctacctgcccattcctttagcggctacgcgctaggatgcccagcttcctcactggtccttgggctaagtggaatgctagtctgcgtctcagcctggtttctggctatcatctcccacgccacagcccggaggcggccttgcaggtgcgcgagtcacagccaagcgccccctcccccaacgaagccgtgccccttacacactaaccttcccagggccctcctcatagtggctcctacggaccacagaggttgtgaacctccggatgctctggcccaacataccgctgctggaagctctgcgaaaggcgcagagaatgaggacagatgaaatggcggcacctcaccaagaccttttttttcacgaccttgttccccggtgcgcaaggactgaaaagaaagatgggaaatggggcggagccttgaggaaacgcgacaaagcggaaatcgccctggattgtgggaattgtagttcagaccattgcggagccttatcagcccccgaaggattgtgggaaatgtagtttcgcgccaggcttaggtctaggattcctggggcctgttaccggaaacgattttattgaatcaagtgaagcagtttcaccccgtatactctagtctgttgaaaaggacaataaacccatcccttttctcttctttctttcttttttaaaaataaagtatatgctaggtgtcaatgatttcgaggacttttgccaatgctgagagatatgtgctaatgatcctagctgaagaaacaaagcataaacacaagtaatcaaacaacgtgcagcacaaaggacttcagagagaaaactgaaatgctaagggaatgatcactaaagataatgggaatcgaataaaaaagaaggaagaacaaagggcagggaaaactcaagtctggtatgagtacagcatgtgtgaggagtagaagggaaaagtggcctctgacacctggagctagcctggactaggaactggtgtccgcctgatgaacgtacacaatttcagcaagcattagcatccaacaagaccactctgacagtgttcattaagaaaagaatatgatcactgtgtaatcacatctgaacacagataaaacattgtccaagccacgaaaatgaccggacatcaccctatctggtttaatttgatgacttctgcttctttaccaattacaatcttagccttgatctagcctttcttcctcctaagatttggtaaggtagccaatattaggagaaaaaaatcccaaatccaataagcattttctaatattttacagagaacccttactgcaatgaataataaaccccgtttgtcaattacatgtgtgcttctggtggtctttgaccagaaggtattgagaagaaaccagtgataaatgaacctgggaaagtggtgttaggttagattgtgaaaggccctggtaacctaaatgttatgttattcatctgtgggggagtgtatattgcctcacgtgtctcatttatatagcattaggaaacaattccaataagacctaaggtttgctttgaaaagggcataacatatatgctcttttcgtcttttttttttttttttttttcagtttttggaagagaacaaccatgcccctcccccccaaaaaaacacttaaaaaaaacacttaaattcatattttgtttcaacaagtagcttctttttgagtaggggttcatgaaatgcatcataactggtgtcctctaccacctaatttatagaagttatgtgacattccatttttttttaacattccgttcactgcctttacatattaaagaattctgatttaactataattgagaaactttttcacacttaatatttctagattacacttttcaatctagtgtgagtaatgttatctgtggatttggttcattgttgcttctaattcacattaattgagcctccattgggtatctggctttgagttaactctttagggacctgcagggcagagattccagaatatggtttcagaactgtctgccttctcatgggctttgtggtaagttaaatacaaaaaaaaaaaatatgtttggccgggcgcggtggctcacgcctgtaatcccagcactttgggaggccaaggcaggcggatcacgaggtcaggagattgagaccatcctggctaacacggtgaaaccccgtctctactaaaaatacaaaaaattagccgggcgtggtgtcgggcgcctgtagtcccagctacttgggaggcgggggcaggagaatggtgtgaacccgggaggcagagcgtgcagtgagccgagatcacaccactgcactccagcctgggcgacagagcgagactccatctcaaaaaaaaaaaaaaaaaaagtttatac

SEQ ID NO: 317827 - DNA, 4001 bp, Homo sapiens
aagcagcagggacccctccctggtgaaagaaacttgcatcttcattgattattgtagaggaggaaggcgctatcgctgctgaccagttactgaaaccagtaagagacgatgcgctagatgtcaagggttgggttgaagtacctagcccagtggcttcttgataatcaaaccctgtcaacactggagattcgatccttattttctccttcccattgccattttccgaagaattgtccccttgattttcttctgattttgccttctctgtttcaggcagtattccagcttcctgacctggacttggggaaagctgctgcttttctaaggggtcttgctgttcctgttgctgactttttgctttttctgaccccaagatctcatcctgaatgttatgggtagctggagcaggaaaaagccaagctgacccagcactgctgccattggcagctgtgttattatttataaaagcagcagggctgggggtggcattttggtgatggtgtggaggctgcagatgtggatggaatctgactggaaaagcagatttattcccagtattgctttgcactagcactccaaacccgtaatcccccatttattatctttaggagcagaatctcacaataaaaaatgacaacctgatgtctcacgccttttttttcctctaccccaaatttaagttgtttgcttgcttgcttgaaatgtcttatttatagctagctcaaagatcgcagcttatcaccttaaattgttctgatttggaattctggtctctgaaagaaaaaacaactcttaaaaaaatctcttaaaacattgacttggatccaattgggcttatttttaggagggaataaaaatgaagagggtaaaaatcaagtctttggttagtaaaataggcgctttctttttccaaaggaaaatgtacatgaatgacaaaaacagagcttctcaagcatctatggatgtagaagaataagccttgcgcggagtaaaaatatagatatatataatttaacaatcacatatggttttcctcagcagtttagattcactcacataaaaattagaataggactaagaggggaatacgttcttttcttggcagcttggttaaaaaaaaatcaggaataatttaagaacattatatattatatatttatatatatagattatattaggttatctggggtgggaagtgaattcctggtttcgggagaggaaatcagcattgactaatggaaagatgattgcagggaggtttctgctgttcctggtcctgttttctgctctttcgcagggtgcagttttggcctctggggctgttcctgaggctccgggtgcagatcttgctgcggtcgctgttcctgggctccccgcggcttcctctcccccatgaaaggggttggaaacacccgtttctccctcttgcgggggtcgcgatcaggagggattagcgagactcgacgagggtgagcgggcggcctgggggtgcggggaccgagggggcgacctggaaggtcctgcggtttctgcctcttcccctctctgcggctccggggtttttttccctcatgggacccaggggcggtttgttcagttccctcagttcgattctccgcagagagggaaaaaagaggaaaaaaaggaaaaacccactaccgtagttattttaaaggagaagggcctcccccctcggctttctctctcttttcccccagaatttttttttaaactataatttagaaggcttttgtttctcctcacggttgctgggccgtcgccgccgtcgccgctttaccctggtcccgcagtccccgctgtcgttgttgaggactcctcctggttcttctttttctttccttcttcctcctcttcctcctctgctgtcgccgctgctgccgccgccgccgccgccaccgcctcccggtgcccgggtcccgcagccgcggctgagtccttctcctcaggaccgagccgagtgaaatgacaaccagctggaaagacccagagacacttccggttcgaagagggaggggtgggggtagcactcattccccacctacctgccggaagaccaatcatctgttagaactcaggcgaggccacgccccctcgcttcagagctactcccaggaaggtcgaaaagttacctccagagacgcctcttccgtctgcgcctcgcctagtgaggcccggcgcctggaacccgcttcccccacccagagtgagcgcagcaggtcgccatcttttgtgtgggcaagggactcctttgatatttctcttccctaactgggctttgcaggaggagcaatagggacgtgtcaaggagaacggattcctcgctcacgaaggcatacggtcaaggtgttggagatcgaagtggcggcccgtgaaaccgcggatgaatgagaagggtgcccacagtaaaggtggtgctccaagcatcacgtgctctggcccgagctccgccccagagggatctggaaggggaggcgggtcttgccagcagctgtgcggtgcctagaactgcgtttgcccttgcccagaatgtagacctcacgagggactctcccttaaccttccattcgctcacccgcacctcccactctcccattctgctaggctcgcatctggtgcagtctcccaggtgcagagatgcagctgaggcgtctgtggctatgcccccgtatcatcccgatctagtacaccttacacgcaataccagagggaaaattccaaaactaaaattttatcttgaccctcacatgctccgatttcttctatggttgcccattatttcgaagataaaggccaaacttgttagtctggtattcaagcctttctacctaatgggtggtatatcttagtgcctcttccccctccaaacacactctcaatgcctttttacatgtcctttccactcttctcctttggtaaattcctatttatttctaggaatcagttcaaaagccaccaacagcatcttctgaattctctcttataagcgtccacggccctgtgtacctctcgtgcttgtttctcacactatattgtgatggtttatgtcttccagacctgtgctggaccgtgggctctttcaggagcagacattgtagataggagacatcagtgaatgaatcctgaaaacgtgaatgaacaaaccagcaacaatgaagtcttccctgagtgacagccccccaacccactgccaccccttccacccgtcacccaccccccacccctcactcctgtttccaagtctgaattaattatttccttccttttgccatttggtttggagctcacatatcagacttttcattatgtttggtactcaagggctttaatgtcctgtttatctttgtacattcccaacgctatgaccaccatcagggcttaggataatgctttgctctcagcacagctttaaatatgttaaataagtgagtattttcctttagcaggaagaaaaatgaacaaagaaatcagggtagagccagaagtaactggcacaactagagggaaaaaaaagataccaagattaatgaaaaatagtatgaacaaaggtggcttccatttcatttccatagccttcctctaatggtctcaacttctgcctcagtctgtcaatcctccatcacttccgtgtagaacacctgagggccttcaatcggtgattttattctctttcattgtgccatgagcatgagtcttgtctctgtaactctactatggattctttgagcatagagattgggtcttacctgctgtttattccctacaactggacatgcctggaaacttagctggttccgtcaggtgtcttttccgccagaatggtttccttgactggccctctctctaatgtcttgtagattgctctcttttaattactgctggttgtcagtgggttagtttcttaagggcagaggttgtgtctgatttatctttatgtccccagtggccagaagagggtctggcacagagcagactcaaaactc

SEQ ID NO: 317828 - DNA, 4001 bp, Homo sapiens
ctggttactctgagctcctctcaggacaggaccagtatcttgtttcatttctcctgtccccagaattggctacatgtcctggtacatggtagatcctgaggacgtgtgtgccgggttgaatttaacgtgtcaacgagtgcatgagggtgtgtgcgttgaaagtatgaccccgtgtgtgcaactctggacttagacatcgtgtgagtgcgtgcgtgtgtgcagggtgtgtgtgtgtgtatgttttgccatatgcctgcgggagtgctgaggtccagcaggttgccggcagttgaggatttgggccaggccgccaggaggcgctccttagcgattctgcgggaagccttggtctatccctgcgcgggaaggggggtgagggtgggggtgggtgggagtgggggtgggtgggggatgctgcgctgggggaggggaggccgggggcggcgagggatgccgtcgtagcaccaggtttccgtaccttcagtgcgccggggacccagggcgcgccttcagcttccttcccctctccgactccctccgagcccgtcccagcccaagcaccgactcaggctcgaccatctgagcccctagaggttttcgggactgggccccgccatctgacaggctgactcgggtaacctgcagtggttgtccttatggccgtttttctgtttttatgattcaagtctgggctatattcaccgcaactcaattcaacactcatttgcttctggcaggggactacgccaaaggcagtggcagagacaggggatgtcactccaccccctccccccgccccgtccccaccccgtggcccgggatgggagacgcatgggggaggggaggggcagcggaggatgggaggaggtagggagccgactccggctgaaaagcggaagtggccgggggttcccgtttcccggccagaagagaggacaggaaccccggcgcccctctcccggacccccgcggagacccacacccccagcagctctgtcctggatctcccggtgggccacggagagcgccccttcccccaacacacatagctccaaccccaagacccggcccggtttcaaactttgctggggaagggggcagattgaggccgacgagaacgagagcacagaaggggtcgttcccgaagactccaggcggcgggcgtgcgctgtccaagcggcggctcctcccggaaagggacaaatagtccccttggtcccccatcccctgtcaatgtctacgttctcctcccctccacctgcggtctgtccgcccccctgccgccgccctctgactcactccgggagtgcgcactgtacccctgggggcgactccctcctccggggcgaagcgtgctccggcgggcttcgggttaagcacagccagaagtagcttagatcgacgtcccccactcccgcgagctcaaagttgttctctgggttcagacttgagtctccgccgcagccggggcggtcctggctccgggaccccggccgttcgggctctgcccggagtctccggctagggcccacgcttcctcttagttcgcagctagctgcctgctcgcggcccctcgcaaggagctgtcctttcagcaccacggagagcgcacccgggagtgtcccctttaccgcctctcagtccccatccggtgcccaggcagccttggggagctgtccccccgaaagccgtgctccccagcttcccgagctgccccaaggcctcgaggcgagagccgggaccctgttgcccacagcccagctccgccctcccggccctcggccagcaccgacctggcggtccctgcaaccgtctgagccactgcagggctccggcccgactccacgaggtggttccttctgctattccagctcccgccgccgcgtgcaattccgccaggcgagctggagccgcggcttctgccgcgggcggctgccgaaggcgccctccaatcacgcccctcagccgggccctgacgttctaccgctccccttccagatgggaaattcaaatctctctctctctctctctctctctctctctctctctctctctctctctctctgtctctctctctctctctctctcctctctctctttctctccctccctcccccctcgtcccctccttctctccctctctccctccctcccgtctccttctccctccattcctccccctcttttctcgctcccctcccctctctcctccaccttacactgttctcctccccctcgcagacgcccctgccgcctccctgcaaccagacatcctggccacagctccaggcccacaagcttgctgctcctgaggagtggtgggggcaaggggtggaggaagggttctttaaagcaaagctcaaagttcacctccttgggaaagccctccttggtttctccaggcagagtggttgcacttcttgcggctcctgccactcccagacaagcccttgcctcagcgacccccgttccacctgttggtttgcctcttgcctgtgagcagctccaggactggaccttggccaggtcatctttgcagccccccagcacagtgtccagccacaggagcactcaggaaacactgatggagcgtgtgggcaagaccctcgcagtgggtcaggaacctccactgcgcacccagaaagagaagactgatgcaaaactgcagtggaccttaggcaagccactcgccaatccctttgagatctgatatcctgtgaagaataaggactcctctggcaaaatttattctagaaggccatttcttttcctcctatgcccaagaaagtaaaaggacttccaagaggcaggacaacatctgctcccacccccagcctttcctcttccccttgcactcatttttgttttgttttgttttgttttattactctcacctaatgagcctttttattctgcctgccatctttcggctcccaattactccagcccgatgtgtaggaaaatggcttcggagaggaggggccttgcacaaggcctgtgaaagatctgcaggagtttcacatccatcaaggtatgtcagagtggagatggcttctccttctaaggggatggcttccttccaaggaaggggcaacaagagctgcagaaatgtgattttgttccagtgagggagaacttatcccttcacacacgatcacagcagaggccttaaagcaggagacccccccaccagtcagaggccattggtgaacccatcctcgtcacctggagaatcaccttctgaagtctatgtctgttctccccttacaggcttgtgtaaggaaggcccctcctttagggctgagttccatgtttagcactgtgttgggccatcagcatagaatgcttattctttatttttcttccctttcctagggcagatactaagagggggatggcagtggcagggaggctctttgattagagtgacttagactttccactaatgcctgaggggaattctgggcagggagatctgacatcatgtcatttcaagtgcacagtcctccccgtcccctctttcttcatgtgcttcaagaatattctcagtaaatgggacctggctggcagcactctggttacaattggagtttttccacaactggtattgcttttgacatggacatcaactgagctgggctacaaatctagttgaggcttaaggaaaatactgagctcagttatggacaccacactttaagatggactttgacaaacgtgagtatgtcaagctcgagaaggggctagtttggtggtgggcacctggaaatcaggtcaaatgagggcaggttgaaggatttgaggatctttcacctggaagaaagaacacggagggggcattaaccctttaagggctggcaattcctgcttaatttataattcccccgcttagtaacgtgcctggcaaagtagatgctaaggaagtgcttgaatggatgaataactgttgtagcggaagagtagtactattgctttttctattgctggcgatagaattaggg

SEQ ID NO: 317829 - DNA, 4001 bp, Homo sapiens
ctggcacagtgacattgccttggtggctgggacttcacatctcttggccttgacacacagctctgtctgcctggggtcattttcctggtctttccttacagttcgtgactcctgcttctgagatcccacagcccagttgccttgatacttatcataacatattgcaactgtttgtttccttttctggcctgtgacctcctcaagctacttctctgcctccccagtgcacagccagtgcctggtatataacaggtccccagtacaagtttacagaaagtatgatagcagtcatgggatctaccattttttgagcatttactatgtgccactaagctcattacatggctctctcattaaattctcatcgaagtgggtattattgatcttctcattcctctttaatagctgaagatagtctcagacagtcacttgcccaaggtcatatgctagtaagtaaaccactctgctattctccttgcatgtgggattttaaaagacttctctatgaatgttatgcaacaggcccaggagttagagagcccgggttttaggcccagctttgctactaaattgctgagtgaccttgggcgaatcacccctgccccctaggccttgtcttccgcggagacaatcagtgatctagagtgtcacgtgatccgagggccctcccagcctcagctctcagagaaaaggtttctcttccacgtatgctttcctgccgcggaactggcttccctgtttgggaacctcccggcttcacagacgccctcaaccttttttcttgctaattgcaacctcccaggtctaagccgagttcgcaacctgctgtctgggtcgccccctcccccctgccttctctgccgtctgggatttctctggaggtgggggcggaacccggggagtgagggagagagggagcctggagctgtcccgttcgtgaggcttccccgcggcttctcagccccctccccctacggaaactcagcctcacactttctagggatgttccggggacagccggagtcagtgattgcagctgccagccgcgggcttctgtgcagggctcttggaagtccgcgattctgagctgggatggggtgggggtctggagggaagacggggcggcgcactccttcctccccgccgggacctcagcctaggcccagcccgcctagcggagccgggaccgttctgtgcctgtttcccctctacctcttgcccactcttagctgggccccgccattgcacggccaggcctcggcgggcggcggacccaagccggagacgcgcggctgtgctaggcccccgcctagctcgccggtgacacctctctgggagaagctgaaatcccccgatcgatgcggcctcacgccacccctaggcgcgctgggggccccagacccgcggctttgttcgcggttcgcggtgccgccggagagagctgtccgccgccgcggtgctagcgttgggagcggcccgcgggggcgagggacggtccttagcagccgcgcggaaccagggcggagggtgcggaggagcccgcccggccgccgctgtccgccgctgcagtgctgacccgatagggacccggtgcggcgcgggagctgtccccgagatggtgctggagcgagaagcccgaggcgccctctgcctcgccccggaagagccgccggcggctgagagctccagggagggggagaggccggaggaagccgcctctaggaagctctcgagcgcggggcctgtggccggggtctctccgccaaccgctcccgcggaggagggcggctcagccacagggagcgagcgcgcgttctacgaacctgttggaggctgcagctcctccgcggccgacgagggcgcccgggccgaggttctggcgcgtttctccctccccctcttccttgactcctccgccgaggcgctccctcctgcctgggctagcacacgtgcacgcggggggcgccaagccccgtttctgtccgcctcgaatgcctgccgagctgcagggcacagagcccagaggcctccccctaagggcagacccgctcccagggagacccaagcttcccgagaaaggaggcgggggctggcggcggagatgagagaggacgccagcagaggtggcagtgaaatcaaggagacatgggagagttcccacccaggcagttctgccctgaagttcgaggacttgggggtctgccactagggcatcctgacttagaaatatctctcactctccatttctgtgaccagcaaccaaatgcaggtctacctacctgctctgttgccaaccccactcactggcctgactgccgctagtacttcattccaggttgtcttttaccatgtcccagagaaagctctctaaactaactttttgacgagatccttcactagcaagacaagctatgtgcccatcatgacagaggaccacttactctgaacaggctcaccccagggccttagcacctgcccttccctttggctgagactttctcccttccttactacttatgctttatctgcaagtgaaagcatcctcattttccatgcaaattttcctggcccctaaggcacagtcagtcaccgcctcctctaggatccctcagcctttacaaccctccactacacttctcatcatattgtgttactcatgcacctctatcctcagttgccaggctaataaaaactagttccatattttatgtttctctgtatcttcatctcctagcatggtgactggcacacaatagaggttgagttatatctgctgaatgaatgtacacatgagaagcagagggcaaaataacttccttttcttcatgtaattgctcatttgatttcttttctttctttttttttttttttttgaaacggagtcttgctctgtcgcccaggctggagtgcaaggcgtgatctcagctcactgcaacctctgcctcccgggttcgagtgattctcctgcctcagcctccagagtagcggggactacaggcgcgtgccatcacacccggctaatattttgtatttttagtagagatgaggtttcaccatgttagccaggattgtctcaatctcctgacctcgtgatccgcccgcctcagcctcccaaagtgctgggattacaggcatgagccaccgcacccagcctgatttctattttttgaatcacagactgcgaagctccgcgtacaacatccgtgcccaaccctcctgcctcctcatgacccactctccccgtctcagtaattcctcctacaatggcctccattttgtaccaaggtatttttaaagtttttttttttaattttatttgctgttttatttgcttgggaccctcatcatcttgatctttatatggctgaatacttgtcatttgaatttcagcccaaatgtcaccttgtcaaagaggccttctctggccacctacctaatgcttcctcccccaatcactctataacattacctgttgcattttttcttttcttctttttttttgtagtacttattactctctgaaattattttatttatatgtttacctgtgtatcattcactttccctcaactagaattcaaacgcaaccagagcaaggatcctgtctgtcaagcttactgcagtgttctcagtggttagcattctgagagaaactgaacttacaccaatgcaccaatagtccctttctccttggaaaggcttgagccactttgcaggtcattttaaagtcttctattaggcacaaatcatctacgaatgtttaaggaaagaggatcaaactgatactccatgagatagggaaggagagaaaggagagagcccctttacctagatatgtggcatagataaagtgacaaacctggaccatagccccttttcaccccagatggcagaagcatagcaattcactcctacacatcatttaaagtaatttcaaattcactatctcacttgatatttctgacaaccttatctggtaagcattattctccccattttat

SEQ ID NO: 317830 - DNA, 4001 bp, Homo sapiens
acttaaccaaagatgccatcaagagcttggtacccttgacaataccaacgtagccacaggttgtaatccgatgtaaacacaaacctaaattaagcatttaacaaggccaaaaggatgccaaaataaccataatacaattagattaaaataagttattttcgaattattcataccatttttccctgcctctggtgtatatcctattttggattaaaagattaaagatatttaaaagtacaatcaagtgacaactagtttacgacagatcacaagatttacacccaagtcttgttttctgctttaaaaaaaaaaaaagaaattccaggccttgatcctatttttcacctgcagggtattcgcaagaaaagtcccaaagaaccttcgaaactaaataacttcctgtgggctcagttttctcaagaagctgattaatgtggactaccaacttatgttagcaagaggggcaaattactactaagactaggacaagcacggggcctaatctttaaaaggcatcctgatgagaaaaaaaaaaaaaaagaaaccccgcccagccctcaacttgctcggcttttctagtcccgttttcttttacaaaacttccccttcactgcctgtctcttatctgaggcctggtacagaaattcagaccgctatttatccaagtacctccttaaggtagtcttaaggctcaagccagctcagaaacggcagaaagacttgctttcttgggttaaaggagggcgattacagggtttggcggccaggtctgtcaggaagcatagggccgagaaagagggagaatccagagactgagctccatctagtcccaggaaccacccccaggggaggcttgactgccctcggtacttccctgcctcctcagctcgtgtgaggagaaaggcgggtcgaggtcaggctcccctgagctacttcctggtccgatcggactcgccttcggacacccgaaacacccccggcccggctccctcgccctttgccctgtctcctcccctctcagtgacccaccaccactggtcccctcccatctaacatggctgccccgcccggcccacctccggcacagcctaaccaattagtggcccccccgcggcaccgcctcccccacgcccattggtgcagaagtctccatccgcccgctccattggacgccagagcctgccactcagctctgagggctccgcccctcagccgcttcaagctgctttgagaagacatataaacaaatcccgggagggaggcccctcgcccgtcgcctctgaggcggggacagaagggggagcggctacccccgagacgccctgctcggacccccctagccccagcccgcgcctcttcgtctcctgccagcctggctccaacctccgcggccccggcccttcctcacacgcccctctctcccctcctcccccgccagtctcgcctcccctcccctcccgggcccctcccacccgctctcttctctgacaggccgactgccggcagcagcggccccgggctcggaggcagcggggaagggccgggcggcccggcaggacggacgcccggcgctgcccatccccggcctagcctactgcccgcccgcgagtcccatctaccgccgccccgcgcttttatgtaaccgtcccgggccgggggtgggggaggggagcggagcccccgtgacctgcaggcggtggcccaaggcccgcgcgccctagcactcggccgtggtcccggcccccgccccgcgccggcccggcccagagccccagcgctgctgcctcctaggcaagcggccctccgccccccgttccgctcttcccccagcccaggcccctgggggttccgagcagcgggtggcggcgctcacctgtgggtgtaggggcggctcagggactgggtccggttccgctgcaggggccacggcccctctccatgctgcctcgggtttgttttgtttatgtccttcctgacgggttcccggaaatcgcgtgactcgcccccctcacgtgggccgcggcgaggaggaggagggaggcgggggcccgccggcctcgggccaatcgcgaggcgttccacagcccggccaatcaggggctgagtccggccgggcacccctgtcacgtgtcgccggaggggcgggttgccgggaaaaaccaggaagagagggcggagcgggggctcggtgccggcctctgcagtgtgggcgtgggccgtctgcgatacccggcagcacgcccaggatgggagaggatgttcctttttacaaaggcttcaaatctagcgttttatcagatctcagaactgcgctgtgaggcatgaggtgtccttttgcccattttgtagtttaagttcactgaaacttgaagtggctaacttgattagtagggggattgtatcgatgtcatgggtgatggaccttctccccatctgaacgtcttaattaagtgagagacaaaccttgccttttgtcgttcgttcattcattcaccgactcaatatttatttagcacggattccgaggcacagggatcaatcagactgcgtgcacctttgaagagagagacccgtatacgactgtacaaccagaatgccactactacagaagcgcctagacaaacaaacctccgtgacacatggtcgttttcttgcacttactgatcctcttaataacaacagcgtccctttattgaacgagtgctatatggtgggcttatcatctcaattagttttccctgcaagcacatgcagtagtaatatatccatttttcagacaggaaaattaagactgagaggagttaagttacttgcccgaggtcaggcagctagtaagtgagctagctagggctggagcccttgtcttttatcacagcctattcttccagatgctttttatacatcttaaaggcacggaattgatctgaacacacaacagaaatttgattttagtaagcacagggaaaggaagacgggaataaagacacctgcccaggtttctgttaggaggaatcgcctttgaaaatgtgactcccttttgcacagatttagagaagtagtatagtgtcattgtcaaaaccatggactttggaatcaaaaagacccacagatcataatcatcaggagagcagggactgggcagtgtttatcctgtaacttccatgcccggcacatagacagtcattacatactggttgaatgaatagtctggatttgaatccttgtttcaccacgtgtaaagcaacacaaattaacctctgtgaagctcaatttcctcctctgttagtaccttctggggttgatgtgagaactaagtgaaataattcatataaagcacttatcatagtgcctggcatatagtaagcactcaatcaatagttgaattattaaattgtttaagggcatcatttggaagatgtactgtagactaaatagcaagtacagataactttagactttagcaggttaacagccactaaaataatacttctgtacacaaaatgaatagataactatatgtagatacctaacaggaaactaaaagcataaatctctcctctgtagccgccacaataccaaccacatagtagggcctccatgcccaatgaaggaatgagtatttcccctactgcaaagtgagtaccaggattataatttttttaaatctaacacataccacattctaattttccacatcagctggaatttaaaattgaaaaagaggaaaactagctgggaagtttgaggcaggttaccccgactcgttcacatgagattcatgcatcaaatctccccggcatacatgacagaccatcctctcttgtaacactatatttgaaaaagctccagcagatggttagaccttccattgttacactgctatctggacacgggcacgttcatctcctctactgggcagttccttggggtcagggggcagccaggtttatctcctagcgtgaggctccgcccactgaaggtgtttactagtgagttacatt

SEQ ID NO: 317831 - DNA, 4001 bp, Homo sapiens
agctccatcagccatcccatgctgccctgttatacttatggagtctgacgactggaatcgaggaggcagtgagcttaggggtcttgtcctgccctcccacctatctcaatctagatgccccctcggcagccagtcccctactgctccaaaatcgggtcacccgcgcactgaagacagcctctgtgctctcggaacggctctgccgagcgtggaccagcaggagcgaggcgggctcagatgtgagacgtgtggggcgggccttctaaccaagacggcccgcttggtggaccccagcactcgagcttgttgggttttaatcatttttcctcggccctggattgcgtcagagttccgcgctgcgagttcaagtctttagaagttcctagggcctcgaaagcgcccagaagggaatttaaaccatggcagcgtccagaggcaccggccccagccccactggatgtgtgtgggtcgaggtcttcgggtaagggcgagattctcgccgtgtgggggtcctcgaacgcgcctctccgactcgggcaccagcgaagtgtctaagaagtgccactggctacctacgctcagcagccccacgctgggtgcagcgccccagccctttccaaccctcccgtgccgccctccggctaggttggctggccgtgggcgcctcaccttcaggaagtcgccgccctgacagtcgatggagacctggtcgtagtggatggtaatgaactcctcgggctcgctgatgaagaaggctgcgcagtgcagctgcggccggtcggcggtgaaggtgaactggccctggaggctcagcatgtccaggcaccctgggggaggagggcatggggcaataagtcccgggctgcagccgccgcagcgccgtcctcgggcggccgctctccgcgcgccccattcccgggctctgtagtgcccagcgccccgacttccagcctaggctgcgctgggttcctgcgccccgggcgcgccaccctctcccgctcctggcgcgcctccgcggaccgatccttagctaaggggaccgcgcccctggcggttccggccagccccttccccgagatgtccgcgagccctctgccccccgcacagagtcccaccttccccgcgtcccgggcgcccgcgagccgggcagcctcgactcacgcagagcgcggcggtacggctgctccccagccagctcccgcttcaggttggcgctgaagagcaggaaaggatcgtagtccgccgcttccctcagctggcaagaaacataggtcagtccggaaaagttcaagggctggggataaaaaaggggaccaggagcggggcaccctccctgccactcagcatagcgaataaagagagaggggtaatgttttcccgtgtccggagaagacgggaaggtcttagaccctctccatcaggccagggtatccccagcggccagaggaaggcaggcaggcagtctgggatgctcagaggcaaggagggagaacaggataggggaaaccaggggcaagacagcatccagcagagagggaagaaacagcgaaccccaaaaggctgcgagcagaggcagcctgcctgccgcctagggctaacacgcaaggaaggtgagatgggtcagtccaggggtggctcacctctaggtaccggctttcccctcttagagccgtcaggaagatgagaatgaagtgacactgaagtttgaagttgggcgacatgctggccttgcctctgcagctgctgtgctctgctccggaggtcctgggctttccttcctacaccctcgcgcagactgagagctagaagctggtagggtccctttgctgggtctcttttatagagcagtggggagcggaggctctctgccccttaactgatcggagctcagtaaccatgggttaccctgtctcattgacagagtacgtggcgatgacgagggtccagctctcagccacaaattttcagcgtggcccagcattattcaccaagaatgatttcagtcactacaacttagtgcactaaagtgttggagaatgaggcggagacaaagaataagggagtgcattttgttgacctgctaaatgctacattatacttttctgtgggcattcagggaattttccattttgcaaatcaaagtgacaaagttacatacacgcataaaatacccaaacatatagagcctatattatgcagcctcatcacataaccttggatgaaaccatgctagaaattgtcaaagaatttagtattcatggaatttctcatgtctctcagtaagaaacttgaggcattttcagctttaaagaggtggaacagaagcagaagtctgattttgcagaagattgcagtaatgcaattataagctttcttcctgccccttactctttgctttatcctggtccagtttcttataggcatttctttcatggaaaactaactctggtgtcaggggacttctggattttagctgagctctgtcacttgacctggatgtttacatgatgtacacactcctagaccaggtagctgtagccatgaccttcgcatccatctgaaccactgagagatgagattaagtcattccatttcgtgccttcaaatacctggattactttaacactctggtagaaggaactgccaggaagctttattgtaactgctcaccagcaaatttgcagggctaaaaagatgacttagggatccggaaataagtataagcttatctctgcttatcaggagagaagagaatttcttctttgtgtccaaaactgtgggaaacatgaggatgctccactattggctttcctacccctttccagtctctgcaccaagcattgttattacaattattacaaatagaccataatacagagttataaaggaaggaatggctatattttcagttttaaaatactcgaaattaaacagtaattatcctggcagtgtcagaacttgattattttcatgtcaggacaattctgagctctggagaggcggcctctttgttggtttaatcaggaggccttcgtgccacagtccaactttgtaagcagtcctcagaccacagacagtgagagggaaaagagtacctaaagctcatggacactggccaccatgtccttctcatcccaagggctgtttagatgcctgaattttgaaaaggttataaagaaacctgggaggaataaaagaggagaaaaacaaacaacttaaccccaacttgctggcctcaaacatgccaggccatcttcagctctatctcccaccctttttgtgcctagagggagccttaggcccactcaccaggcatgccacaggccctcttctctttcccattgatgtagccacagcccttggcctgttcccagaattcagtccagcacccaccttggagacctctgcctttacctcttagggggtctggcacctgatgtcactccagctcaatgttgctttgttagcatcaccaaggagacattcttctccagccagcccctttacaagcatatgcacatgtgcacatgtgcacacacacatgcacgcatgcacgtgcacagacaacagtgatgttcccaccctgctgtcatgatgcccactcctcaggaaccacacacagcaagagctgggatgaatgagcactaacatagtgactgattttacaaacatcatagcatagcatctgattttacttaatccacaaattatagtacaagatggacctcattcccaccaaattctaggtggataaattaatgtgtagttttcaccagtttggtaaatatctactaagccagtggaaactaccttttctaaaaaaaaaaaaattaatggtaattaaaagatggaaactacaagctatcgagaaaaactaagaagattaaattggaagacaaggagaagccaggtagccattctctctgagagaaagtattaaaaataggtgagagaaatggaagagtaatttggattaggccgaagaaaaattttctgggcaa

SEQ ID NO: 317832 - DNA, 4001 bp, Homo sapiens
agggggcttcaccatattggcgaggctggtctgaaactcctgatcttgtgatccacccgcctcggcctcccagagtgctgggattacaggtgtgagccaccatgcctggccacaagactccatctcaataaaaaaaataaaattaaattgagacctggctcagatacttttccgtttttgccccacaggcaggttgtgggtgtaaggataggacaaggcagtgaaatcaaacctgtgggactctctgagatgaagggggtggcgggtacactgtgtgtgcatttgtcagacctcattgaacttaagaacctgtgctttctactgcatgtaagttacattgcaaaataagaagtccaggccgggcgccgtgactcacaccagtaatcccaacactttgggaggccaaggcaggtggatcacctgaggtcaggagttcgagaccagcttggccaacatggtgaaatcccatctctactaaaaatacaaaaattagccagtcatgatggtgtatgcctgtaatcccagcttgggaggctgagacaggagaaacacttgaacccgggaggtggaggttgcagtgagccgagattgtgccactgtactccagcctggtgacagagagagactctgtctcaggaaaaaaaaaaaaaaaacccaaatactcaagctcagtgtgattgcctgggccagagaaggatggtcagtgggccatctcctcctcatcagggaccagaagcgccacggccttagggtccttctgtgaagaggccagtatgaggctgtcctttctccccttcaatccccatcctcccccaaggtccctttgaataagcaggcaatagaaatgtgtttgttgggccaacaagccaagcacagcagcccctcacctctagtcatgttccctcccagatggaaattctgcagaactgctacagcctggggacctcctgagacttggcagcctgtgtctgggagggctctggtccaggagaccctcactggcctcttcccaatccctcctctagccctatacctatttcaccccgaattcccctctcctgagccctgggccagagaggccaacctcttgtctctcccctctgaccccttacacaagccacccaaggaagaaccaccacccctatcaggcccttccaaatcagatcttgcatagaatcatcgaatcacaggctggcagagctgccagagccatcaggagctctccaggtcctcccaactcagtgtaggtctggaccagcagtgccggcatctcacatctcccaggagtgtgttggatatacagaatctcaggtcgcacctgagaccgactgagtctgaatctgcattgtaacaaaatcctcaggtaacttgtatgcacaggaaagtatgaaaagcactgctctggtctagtctatcactgtccccctgcccccaacacctgcaattgaatagaagtggacactgaagcctcaagagtatcagaggcttgctcaggacacacagtgagtcgctggcagagctgggacagatccacagcaccaggtggaccagttccaccacacccatctcttttcaccccactacctctccaaagcagatacccacaagcctgcagtccagtgttggggagactaaaacagcctgaggacacccagtgaggggcaaggactgaatcctttcacaggggtcttctccatcacaccccaacaaagtcccccaccccccgttctgctcttaccatgccaagctgtggccaccagcaggagcagcagaactcctgggcccatggcctcggtggggaagtggcaggcaggtgcagggctgcaaggtgcccagggcacagagctctcagctactagctccgcagggatcgggacactggacacacgttcctctcctctgcactggctgtttgtcttgttttcctcttcctcctccttgggctgatcctcttcttccccttttagctaggcaaggcaaccacagagtttggaaatcttgggtctttaagaagaaaacaaagccttgaacccaagagggaggggtcgcagtctggggcagggccagcctgagcttggggggagctagctaagtttggggcccttctaaagccatcttcaaggggtcttgggagaagagacatgtccaagagcagccagaccgttagtcagtagcacaaatgagggtcttcagagtgatcaggtggctctggcagatcccaaagagaagttaggttgcatgatattgtgacatatatattttttctttaccctgatgtcctggcttacaactcctaaaatccttggaatctccaaagtaatgcatatcttttaaaaatttattattattattttagagacgcagtttcactctgttgcccaggctggagctctgtggctcgatcatagctcactgcagcctcaaactcctggctcaagccttcaagctgtgagatctgacgttatctctaggtaaatatagtgttcaaattgaatcggagggcaccagattcgtgtctgctgcagaatctgaacaattggttgattgcttggtgtatggggaaatatgccccatcctctacatctggggtcagaagtattttgtgttgtgagactataggagaaacggagtttgttttcttcctgtatacaggttggtctgggagagcctgataatattggcaataagcttccttttacaggacatttactagccaaaccttttacattcactgtctcctttagtactgcaaaactttatgtaggtaagtactattgtcattctcatttcacagatgggaaaactaaagctcagagagatcaaatgccttaagcttgtccatagtcaaacagctaccaaatggtggagataggatttggatcccagcagtctggttataaaactatcttttgtgcgttacttacattgtttatttatttttacaaagaatctaattgttctgcataattcttaaaatatatagcattcctttgctccctcttttcctggaggcaattgcttttacctcttttagttgattcgcttagtattttacttcttatctctaaagaacatggtcatttcttcttctttttttctttttttttttctgagacagggtttggttctgtcacccaggctggagtgcagtagtgtgatctcggctcactgcaacctccacctcccggactcaagccatcctcctacctcatcctcctgagtagttgggactacaggggcatgtgccaccattcctagcaaatttctgtatttttggtagacatggggtttcaccatgttgtccaggctggtctcaaacccctgagctcaagtgattcgcataccttggcttcccaaagtactgggattataggtatgagccactatacccagcctaaagttccttcttgaaattgaaaaatcctgatataacattgatccaggaaaatgatcattcccgtgtactcaggtgtgtgtgtggtgtgtatgtgtgtgtttgtatgtatatttatgagtgtatatatgtactttctttttcagaaaagtgttttgaacctttagcaatcatgaatgtcaatcaaagctgactcaagaagaaaaagaaaatccaaataaacctataacaagaaaagaaatttaatcagtaatcaaaaacctcccgacaaagcaaagcccaggaccagatggcttcactggtgaattctcccaaacatttaaagaagaattaataccaatccttttcaactcattctatgaagccagcatttttctggtaccaaagctagaccaagacattgccagaaaagataactacagaccaatacaaatgcatgaatatagaaagcaaaaattttcaaaaatgtactagcaaaccaaatctttttttttttttctttctttctttcttttttgagacagggtctcactctgtcactcaggctggagtgcagtggagcaatctcggctcactgcaacctctgcctcccgcgttcaagctattc

SEQ ID NO: 317833 - DNA, 4001 bp, Homo sapiens
agagactgggaggcaggagcccagcaggggctgacctgtggttaccccagaccctgcctgccctctgcacaggggcctgagaggcccaagccctcccacaaatgagtttttattatttttctctagctctcagatgatgttagctttcctttctcatccagtcctttcctatcctttctcttggggaaacacagtaccagaaggtctggagacagaagataggagttttgtcgcaggcttccccagtccctagctctgcaaatttgggtgggtgctttacctccctgagtgctgacttgggagtcagtctgacctgggctcctctcccatccctgccacactgaccagatgatcttgggcaagtcacttcaaaacctccctgaatgcacatttgatttggtttgaatgcaaatcaaaattgtgaaaataaaataaaatttcaggagctccccaattcattatgccaatgggaaaagttaagccctggaaactgagtcacatcacaggactgctctctgaccattgcctcttgatttttgtgttgagaatgttatactttaaccgggctccccattctttattcaaacctggactaaatgacacgctggtgatcattacctctttacaaatgagtgttaagcagcccccttaaagtgtagtcaatagtagccaatcaaatcttgtagctctacgttaacctttgtatggaaaatgtaattgtgttacccacccgtttctggctatataaaccatcctcaccttgccccacacagggaagcactgatcaccattctctggttttcctgtttcctgacgactaccctcacactttgcccttgaataaacttctttaactagaaaaacaaaaacaaacaaaacaacaacagcttggactggtgtctcatctgtaacatgggataatagtaggactcaggtcactgggcttttgggagggtaaaatgagctaatgtgtgtgaagcaaccagacagccctggggcatagtaactgttggatagtggtagtcagatttttatcaacctttgtcttagtgtggcatctagctccatttatccctggggaaactgaggcctgatgtggtgtaatccactcaagttcccataaggagcaggcctgagacacagggagctgagatcttctgacctccagacagaggcttttgcaccagcaaagataatccctgtctggaatgtgggctagttattttctttacaaggcagatccgggtatcacctcattcaactcctgccacagctagaagagaagtcacaggctctgggtgttttctgaagccaggatccctgggatggtgggctttgtatggccaggccttatagccgtcgggtattttccctggtgtggctcagctgcccctgagttggcggctgggcctgtgagtcagagctgtcccatggctccattcttttccccacttgaagccacagccccagactcctggaggcagtccagggaggcctgtggttccaaaatgaggtccttcccgcacccactcaaatgaagatgccgtttccccagctcagagagagcaagggaggggctaaggacacacagtgatggatctgaggctgacatctggtccacctcaagtgagccaagtacaggactctgggcccaggtgggagggccctagcactctgtcccctgcccccagcaaccctattgcccctggccctgtgttgctgccggggtcccacaggcctgggctcggcaggagagcctatgactcatgccggccccacaacccctgagatgctgcagccgtgaggggtctgggtcctgccaggtctacacctctctgccctcaaagccacagcctggtcgccaccctattccctcccctgtccttaccctggccgcagttccctccgcttcctctcttcctcttcctcttcctcttctctcttctccaccttctcctcacttcgtgctctcacgcttttggacactctgtctgcccttctcctacctggggcctgatcatgactcacctggacctggaatctgggctctagcagctgcctgtcacagagcacgccggcctcaatccgggcctgtgggcggagtggaggggagggtgtcccagctgatagccaaagccaaagcacatggtggaggcagtgagacgcctcagcaccagagccttggagcagccctgcagccccacaccctcctgcccgactcaaggccaggctctgtggagccagaaaagcctgctcgcttcccaccttgggaaaccaagcccaaggtctaggccccccagcttccagcgaggggtgggagagcgaaaatccccactttacagatgaatgaaatgagactcagagctgaagggacctgtctgggggtctgcgtctgggtgagcctcatgtgccccactccacactccctatgggcaggaacccaaacccgagagagaccacaaagtctgtgagtgagaagcaccaggtttaatattaaaatctttcccttaaaaaaaagtacacagatagaaaaactcaacagcatacaaaatagcatttctgctgtataaatgtgagttaacgtgagtcctaaaaatatttgtaaacctaggtgattatatctttggtaccgtattgagaacccactctccctccttggaccaactctggggatcccagggaagtaaggtgccaacctgcaatgcagggttggtgcccagaggggttgagcttcctgcacccccttcccaaccctccccgtgcgggggcgtcttggctacaaccctgactcccctggcacctccaatgcccactgggctggggacaatgagatgtcactgctaggtctgggcagtgacaaaaccatacccccatggagcgctgcctcagggatggggcagctggtgggtgaggggcaaacctccaaagcgcccacctctcacatccttcttggggtacccatctgaagcttcttgtcttttacaagacataactgtcctcactgtccattctgtcttcgacgcagacctcggcacaggtgctggagtggtgggctgcaggaggtgatctcatttgccctctttgtcccttttgcccaggatacccccggaggtcatcgtgggtagtgaaagaggtcccgtggtcttcccatgtccctggggcagctgctgggggctttccaggacaccggctgtcactctaagtcaaggcctgtgcagctgtgttcttgagacttgctgggggcctggggaaggggcatggttcctgagtccccagagtgtgatgtgtgatctggaatctcccaggagcccagctgacccccaggatggaagtttagggtatatggccttgcttcatctggacaaatgtgcaaccacctggaatactctagaatgttagtgctggcaaggcactcagagttaataagtccgacttattcattttttgaaggggaaactgaggcccagagagggtgagggattcctccaaagcctcatagcaggtccaatgcagagccagggccatatactggcacacacacgtggccactccacactggcacatttacattctcatcacagatgcggggcccgtctggccttctagactctggtggatggattaagactgagggtgataaagaaaaagccccaggactgatgggcctgaaggacagggacacaggcacttgctatggctgcgtgtgctccaagtgccctgggcaagggctgcaggctgggggtgtcctgtacttggctcagcctccagcattaattaggctgcctaatggccccagaccagctcgggccagggaacgcagggactggcatcatagggaggagactggctttcttctggatgaggcaacactgctcaaggctaggccctagctcagccagcagccagggaggctagggtctcttccctagctcctgggtggataaaagtgcgaggagagagctatgattccttgaggggtagctggctgaacagaaaaaagt

SEQ ID NO: 317834 - DNA, 4001 bp, Homo sapiens
ctctttgaaactttcaaaggtgataatctgggttgcacaggaagtttcctttaaaaaaagaaaaataaaaaacacttgagtccaggcaagtgggtaacgtgggggaaggaagcaccagcatgtttctctactgcctcttagaactcagaggccaggaggcccactccaggacacacccactgacctgggtcaggtgacgctgctgccacccacgtgttccccaaggagtgcatagctctgccagtggcagccagagtcaagggcctgacttaagtgccagcctgaggttggccttctgggcagtcaaacgcctgcctttttggtcccagggcagagcagggcagctgggctgaggtcgtctctgggcacccagaaggagtggagtcaaggccacaaactttgctcccttcccgcaggaaggagtgcctgaggtccttgtccattccaagtagcctcccttccttgatcctctgcaattcaagcaccccatgtggggccagaggaaagtcctgccagaaggtggcacttgggcctgggcacttcctctgggccttgggcaggccccaagtttccttgggtttgccctcacctctgacctcattaaccataatgacaataatgaccaggataggagcagctcctgctggggagcactgtgggcttcagcgctctgtggctctgactccttgggatgaaatgggctgtctgcctcctctctggagggctaatcattacataactgttggcacagaaaccccctggggtcctgaacagccacagccatagatctctccccatgtcgaccccaccccctagattaagacattcctgctggaggccctgccgtaggcactcaccggggttggagggcagtgctgcttgtagtggctggccatcatggtcaaggggcccttgagcttggtgaggctgccccgcaggccctgcttgtacagctccaggcgggtctgtaggcaggtcggctcctgtggaaaatgtcgttcgtcggtgagcagtggccaagtgcccacagtggtacaagaactctccaccactcctttttgctgctgcccccagcccccaggagtagggcttgggaggggcacaggctgggtccagtcatagaccctgccctgtccatggcaggcacgaacctgcccttctcactgccccgcccaggccaccctcagcggcacctggagaggagcccagccttagggaaggaggtgactctcaccccatcattcagggagaggggggtggggcctcacctggacctgctgggtgggcaagggttgttcctgaaacccctctgtgcctctctgtagtcagcactgtctcaacaggacttggtctcggggcacagtgagcgccccaaacccacagctcctgtctcatgaagtgacccccactttaccacctgtcccctggtgactcctggccattgaatgctaggtctgcccatggccgctcagctgataaaggagctcatgtgactgccataggggcacggccagcagcctcttgagcacccagttgctaccccctcctcctgcagccagctgactggagagaaagtggacaaccctgtgtggtgccatctaaaatggagtccccacctccaccccagggcaggggcttctggaaagctatgtcagagagaagcatcttacctggaggtcaaacatttctgagatgacttctactgtttcattctgtagaaaaggaaaatgtcatgttatcaagctgacaggcgtggccagtcaggggccagctgggtggcctaggcacaggcccacattctctcacttaccatctcagcagcagtgtctctactcaggttcaggagacgccgggcctcctggatggcattcacatgctcccagggctgcgtgctggggctgggcgagcgggcgggtgcagagatgctgcaggccacagtgcccaagagcagcaggctctgcagccacatcctccagagaactttagcctttctctctgtgtactgggctcactggcaaaagagctcttaaatacacagaggaaatgattaatggtgaccacaaaatgccagggaggcgggggaactacctgaactgtggaatctcctggcccttatcagccacacatgggaacggtgagccttttccctaggtggtcaggcttgggggttttcattaatgaacctttccaagaaccgacagcccacccacccgccttcctgagggctctccagccctccctgggcagtctgaatgggcctgaggctgccccctccctctgaggggcacagtttggacttcctggcctggaatggctggggtggggcgtgggagacacttagatagggctccccatcctgcctgtaatcccaggggcctttgggcaggctatgcccgccctggtgcctcattctgactccagccttcctcttctctggccactgtgagagacttgagtgtgaggggagctctcacagacctgccccactgacagttcacatgggctcccacccaggacctggagcagggggcaacctcagtccagtaaggggggacccctgcccctgtgagcagagggaatgaccaccatgtgcacatccagcagcgagactgcagccactctcagcaagcttcagagggggtgtggctgggtcaagtcgggacccagagtctgactcttggctctggagccaccttcctgagtgactcccctctctggttatgtgaaccttgattccctctgcagagcaggtttgcccctctgaggttcggactacactcctatatgtagcccccagaagacaccaggagcttcaggctggctccagggctgtggctgcatccatctcaggtacagggacaatggcttccccagcaaggccctccaggcttaatttcctacataaccccagcatcccccaactccagaggcctttctgtggaagtgtggaagtaggaaatctaaaggctcttgaggggctgacaagtgtttgattttcacaatggagttcagagaagacagcacgagtttgtgtttgcacaaggtatctggctcaagctgccccatgcctgggtttcatagctaaaggggtgtgggcccacacgtgcccatttctgggtgtatgtgtgctgctgtgattggttgtacatacaggtgcctggtagaggggaggatgttttccatgcagatgcatctattgagtcctcttacctgctttatgaaaggctccaggcctctgaaggtgactctgatactggagaagctccctactccaggtgcagtgcctctgggccctagaggctgattcagcctaaaccagtggggttggacacaagcgagaacattctgctggactcaggttggcgagccttcagagagcaggtggagttcatggctttagcactgtggtctgagtctgcagccctggccagtttccctgtactgtgggagtttttctgaccttgcatagagaaaccaaaccttagtcctccagaccccactgtgaggccagccccatccatctgagcctgcgtagaacactcctagtggccaggctggggtgggaacatgaaatgtccaggccctggccctttctccaccttttttgcaaggccttggctcagctctttccagggagctctcgggggagagatgaggacatggatactacatgtagatatcacatgtgttggatagcaccctggaggctggagggcagggaagggagccatagatagtggttcagctgatggccagggaggcagagagcctgtatgacccatctgggagagaaggtcactttcctcctagaaatgagttgtcatagctcagacagtcagtcaacaagtctttccaatccacaccaggacctgttctggggaggtaaacgggaccctcccactggccctcacatttggcccttgaggctcccagtctggtaggaaacagactgcaatggaccctcccatggtgtgaccttgactcggcagggggaagtccag

SEQ ID NO: 317835 - DNA, 4001 bp, Homo sapiens
gctgagaaaagggcaggaatatggggttgagtcacgtcgttccgccattttctaagcggaggaggaagacatgttggaacaaaaacacaacaaaagagcagccatttcccaagccagctccaatagcaactcgaactgacactgccgggtcgcttcggcaccttcaaatccacttcactggacaaacctaagtacatcagaagtgccgccgtaaaaaaggcagcagccaacccttccgcgtagggatcaaagatgacctgcacgcataactgcaaatgaaagcctcgggaagagtgagaatgacggaagcgaaatggagcagtgtaatacaatgaaataagttggcaaactgaaatttactcagtaattgagatgactgacttacaggaaaccaccagctatagggaacccaggtaactaaaacaccaagacccggattcagctggtctcattacctgcctctacccacttccccattccgtgcttccctcagcggatcgcctatatgcaccgggttcttaccgtatgtgggggatgccaaccccaccttgaagaatcttatagagcttgctctcgtacagcaactggggatgcctggccttctgagattctagcttcactgccacttcctgcaggggaaagaggggatgatggcatcaacatccctacggattcaatgtcacttaggaaaggagggagacattagcaaaactccaagtcgcgactacaagaagaagtgaaaagctggaaagagaaagctctcggtaattataaaacgaggcaaccagcctcaaaggcctcttcagggggtagtgacgaaatccgtacgtcctctaaagtgcaggaaaatgattcatccagaaaaaagaggcaacctctgaacgtagtgagaggtttttaaggaactaggcgatcggaaactgttctaattggaacaagaggcccagtagaattaagaattaaaaaaaaaaaaacatgggaatcactgaaagaggattttgccgtttccaccttaaaagacggttaaaaaaaaaaaaagctcgactaagggacatttatgggacgtgtttaacaaggtgggaaactagttcccccaacctttctatcgggttcttgacccttttagggagacagcggacgaggttcgtaagccaggaaaactagctccctggactccctggcgagtgcgtgcgatgaggagaggcccgagcactttgggggtgcacggtggtggtggggggaatgagtaaaagcgcagcgttatcgtgaaccccaccccagatgattacctcgccgttggtgatgttgatcgccaaatagatgtccccgaaggagccagacccgatcttccgtaccagtttatatttccctccgacaatgaattcagccttggagccgctgctactcgccatcctgagagacgaagatggaggctggggccaagccccgacacctctgggaagaggacggaggcctcggggctcctacactaggcaaggctacggaggagggcggcaggaaacggaacacggaggcctttaccggggttcggggcccagaatcagcagaggggaacctgatcaccgccgctcagtcaggtttctttttgccaggccgcagtttgtgaagggcttctcggcggttaccaggctgggccacttgtttctcggcggccgccgctgcctcgcttgcgcggcgacgtcgcgggctggaaaaggggcgcggtgagctagggcggcgataccgctgccaccactgccgccggctccggcccagagggacccctgtcactccgcggacgacgccatcttgttactccagctccagccaacacaaaatgcccccagtccccgggagccgcttcttcacggcgcagagcactctgggaaagggatctcgggcgctcgctccgaaggatcggcagcgagagggcggaaccggatccgtgagagtcgcggcccacgctccgagcgtcaccctgtcaccgcccagctgcgcatgagcgctgcaactcctgctgactgcgcaggcgtgccgcggcctgtcctcacccccgtcccgggctctcttccacttccggtcggcggcggctcagcaggtgttacctgttactcgcctcggacccgccgggtctctggaaggctgagtggccccccggccttgatattgggaggagtcaccttcatgtttcgtggcagatgaaagcttaaggcctccttaggagttgggtattgacctgtgctctttgaggcggtttttaacctttgatctttcttctggccgttcccccggaccggcctattccaacccagtttctgtttggaaagaggctgtcgcctctggtggagaggaagagaaaagcagccagcgtcgaggaatctctcagggctctcggttgtagcagagcctagctaattacccttcataattagaattgtcctatctactacggagtgttatagaccctctttccacaggaggggaagaaagaaagaagccggaatccccctgccatcctatgtctttgcattattgcctcactaccacatatgatcttcagaagaaaacctggtatgttgctcataatgaagattaaggatagatggaatcaacagaaaattaatttaacaagagtgaaaaaactgttatgtcccctcaaccccaccaaaaaaaaaaaaaaaaaaaaaaaaaagaatcgtatgttggtcttgttgaaaacctcagtattaacctgaacagagtagaggtaactattacaaaatttaattgacaacatttaaaactacacggtaatttttttcttttttacaaaaaatcgatcagagaatcaaattttgaccacgttttgttttacaaaatttgacctgggaaaattgggcttagtaataataatgttcacgaaagaaaactccatggttgatgctatcatcttaagtcagacctcagtcgtaaaaatttaagctaagcctatcctaaataaaatttaattaaaatagaaatggggggcgggcgcagtggctcacgcctgtaatcccagcacttcgggaggccggggcgggcagatcacttgaggtcagttgttcgagaccagcctggccaacatgatgaaaccccgtatctactaaaaatacaaaaattagccgggtgtgatggcgcacacttgtaaccccagctattcgggagtctgagaatcgcttgaacccgggaggcggaggttgcggtgagactagatcacgccactgtactccagcctgggcaacagagagaccctgtctcaaaaaaaaaataattaattaaatagaaatgggagaaaaatgtgaagaattttaactgcaactttgaaaggtggtcaagtaattagtaatagggttcatctcggaagacaactgaagagagaggggaggagacttcccctgaagtttagcatgaagtttttaaagcccaaccaacactcagggtgcccaactcccaaatcagcactgttagacatcattctcctttggtgactctaaagcatgttttgactaagttaaaatctgctgttaaattctgatataaaatgcagccgggcatggtgggctcacacctgtaatcccagcactttgggaggccgaggcggctggatcacctgaggtcgggagttcgagaccattctggccaacgtggtgaaaccctgtctctactaaaaatacaaaacttagctgggcatggtagcatgtgccttgtagctccagctactagggaggctgaggcaggagaatcgcttgaacctgggaggcagaggttacagtgagccgagatcgtgccactgcactccagcctggagacagagcgagactccactccatctaaaaaattaattaattaatcaattctggtcttaaaaaaaaaaaagccaagtttaagcatcttgagttttccagagatcactccttttctgctaattttctcacacacatccaaagtttaatggattcctcagcttgaggagttctccataa

SEQ ID NO: 317836 - DNA, 4001 bp, Homo sapiens
tgaggcaggtggatcacctgaggtcaggaggtggagaccagcctggccaacacggcaaaacctcagctctactaaaaatacaaaaattagccaggcgtagtagtgcagctctgcaattccagctacttgggaggctgaggcaggaggatcacttgaacctgggaggcggaggctgcagttagccaaggttgcgccactgcactctagcctgggcaacagagtaaggctccgtttcaaaagaaaaaaaagccgggcacagtggctcatgcctgtaatcccagcactttgggaggccgaggcaggcagatcacctgaggtcaggagttcgagcccagcctggccaacgtggtgaaactaaaatacaaaaattagctaggcgtggtggcgggcgcctgtaatcccagctactcaggaggctgaggcacgagaatcacttgaacccgggaggcagaggttgcagtgagccaagatcgtgccattcattgcactccagcctggaccacaagagcgaaaactccgtcttaaagaagaggctccagtaaacagtaagtaccattcttacctattctgaataattttgcaaatgttattttagattattgctggaaaatagctgggctttaaactatattttagtctccattccatgaagaggatctttaatcccaaaagttaaaacattaaaaccctccaaagtaaagttaaccatttgacagaacaatgtctatctcgtcatcttttatcctcgttactgctatttgcactcaccaatattccacaccaacaaaggccccaatttctctgatgtgaagatttactgacaaactcaacaggttaaaattacttatcaaagtgtggctaagtgattaagatttttttaaatacaactgatatgagtaaattttaacatagttggtgctgctcaaactgcctttgccactacctatacaaatttagtcccgactgaaacgtgccaaatatgaccattcacgaaaagaaagagtaattaacacttttaaaagaactacgaaggattttacatagtgtaattcaacaatttcgtgtcacatctgctgcagagatcacaaacactgtcactatgccatctccttcctcgaacctccacaccgcctcctgcagctttattcttggcttttcaaaggtttaatccactcggggctgctaaaggaggaatcaaggaagcataatttgtgaactcaagctgagaaaagggcaggaatatggggttgagtcacgtcgttccgccattttctaagcggaggaggaagacatgttggaacaaaaacacaacaaaagagcagccatttcccaagccagctccaatagcaactcgaactgacactgccgggtcgcttcggcaccttcaaatccacttcactggacaaacctaagtacatcagaagtgccgccgtaaaaaaggcagcagccaacccttccgcgtagggatcaaagatgacctgcacgcataactgcaaatgaaagcctcgggaagagtgagaatgacggaagcgaaatggagcagtgtaatacaatgaaataagttggcaaactgaaatttactcagtaattgagatgactgacttacaggaaaccaccagctatagggaacccaggtaactaaaacaccaagacccggattcagctggtctcattacctgcctctacccacttccccattccgtgcttccctcagcggatcgcctatatgcaccgggttcttaccgtatgtgggggatgccaaccccaccttgaagaatcttatagagcttgctctcgtacagcaactggggatgcctggccttctgagattctagcttcactgccacttcctgcaggggaaagaggggatgatggcatcaacatccctacggattcaatgtcacttaggaaaggagggagacattagcaaaactccaagtcgcgactacaagaagaagtgaaaagctggaaagagaaagctctcggtaattataaaacgaggcaaccagcctcaaaggcctcttcagggggtagtgacgaaatccgtacgtcctctaaagtgcaggaaaatgattcatccagaaaaaagaggcaacctctgaacgtagtgagaggtttttaaggaactaggcgatcggaaactgttctaattggaacaagaggcccagtagaattaagaattaaaaaaaaaaaaacatgggaatcactgaaagaggattttgccgtttccaccttaaaagacggttaaaaaaaaaaaaagctcgactaagggacatttatgggacgtgtttaacaaggtgggaaactagttcccccaacctttctatcgggttcttgacccttttagggagacagcggacgaggttcgtaagccaggaaaactagctccctggactccctggcgagtgcgtgcgatgaggagaggcccgagcactttgggggtgcacggtggtggtggggggaatgagtaaaagcgcagcgttatcgtgaaccccaccccagatgattacctcgccgttggtgatgttgatcgccaaatagatgtccccgaaggagccagacccgatcttccgtaccagtttatatttccctccgacaatgaattcagccttggagccgctgctactcgccatcctgagagacgaagatggaggctggggccaagccccgacacctctgggaagaggacggaggcctcggggctcctacactaggcaaggctacggaggagggcggcaggaaacggaacacggaggcctttaccggggttcggggcccagaatcagcagaggggaacctgatcaccgccgctcagtcaggtttctttttgccaggccgcagtttgtgaagggcttctcggcggttaccaggctgggccacttgtttctcggcggccgccgctgcctcgcttgcgcggcgacgtcgcgggctggaaaaggggcgcggtgagctagggcggcgataccgctgccaccactgccgccggctccggcccagagggacccctgtcactccgcggacgacgccatcttgttactccagctccagccaacacaaaatgcccccagtccccgggagccgcttcttcacggcgcagagcactctgggaaagggatctcgggcgctcgctccgaaggatcggcagcgagagggcggaaccggatccgtgagagtcgcggcccacgctccgagcgtcaccctgtcaccgcccagctgcgcatgagcgctgcaactcctgctgactgcgcaggcgtgccgcggcctgtcctcacccccgtcccgggctctcttccacttccggtcggcggcggctcagcaggtgttacctgttactcgcctcggacccgccgggtctctggaaggctgagtggccccccggccttgatattgggaggagtcaccttcatgtttcgtggcagatgaaagcttaaggcctccttaggagttgggtattgacctgtgctctttgaggcggtttttaacctttgatctttcttctggccgttcccccggaccggcctattccaacccagtttctgtttggaaagaggctgtcgcctctggtggagaggaagagaaaagcagccagcgtcgaggaatctctcagggctctcggttgtagcagagcctagctaattacccttcataattagaattgtcctatctactacggagtgttatagaccctctttccacaggaggggaagaaagaaagaagccggaatccccctgccatcctatgtctttgcattattgcctcactaccacatatgatcttcagaagaaaacctggtatgttgctcataatgaagattaaggatagatggaatcaacagaaaattaatttaacaagagtgaaaaaactgttatgtcccctcaaccccaccaaaaaaaaaaaaaaaaaaaaaaaaaagaatcgtatgttggtcttgttgaaaacctcagtattaacctgaacagagtagaggtaactattacaaaatttaattgacaacatttaa

SEQ ID NO: 317837 - DNA, 4001 bp, Homo sapiens
gtacattctgctaagaatgtatgtcaaagccacacaatgtatttgataacatctttcttccaatgtccataaaggtaatttttatcttttatcttttgtgcaactataaaggttaactatacaaaagaataagacaatttatcctaagatacaactggagcaaagtttgtaaataattacaaaatacactaagtacagctcaaaaaaaaagaaagctattaatgtcacacaccagatctgatttttttggtgaaaaatattttcttaaactagtttcacatctaattccacattattctcacaatttctgtaatgtttttcttctaaatttaccgggaaagccaatattcttcaaagaaacatctttaaaaagaaacatctttaaaaagtatatacttttcattttatatcccatcttagatatagtttgccatctctcatatctgtggccaaatgtcatttgaatcggactaagtaattgcaaaaagtaaaataatgacttattttcttaattcattaaaaataagtacatttttaattctctaatttaaagtaaatattttaatagaagatttaaaaggagccactgaccagcctgggtgcttactacaaaagagttgaaagtaattcacacagtgtatcaacagtagctgtctcccacacacacaggcacactcactctctcccccatctgaacttttcctccctaaaacatgaggtgggagaaggggaatgaccatgacacaggcctcactacccccaccccacgagtagacacacatctccctcctcatcctgctgaaaagaaatgtggaggctgtggaccaagagacccgatgcttctcagtgtcacttcccctgcatgtgggataaacaaacaaaccggcaccatgagagtaaccatcagagtgattttgctaacctttgactaatgtcttggttaagttttgagctgagtcaaagctctaagaaacaggtaaatccctgtgtccccccacccaaccccttaaacactccaacgggaagtttatccctgagctgaacgctggcccccgtcgcctcctcccagcctatccatgcctccttcctgcctgaagcccctactccaaaggtaattgtctggacacagtcaaggagcaccgtgggcgacactccccacctcccaatctctcctaaggaagcccccgccggcccagttggcccacctccctcgccgccccagtcgcgccgcaccactccggcaacttttgcacccagcccgacccgccacccgcggcccccgctgccccctagccctccgcgccctcagcctccgaccgcggccccctcctgcccacgcctccgggccacccgccatggtcctcgcccacccctcccccgacacccgcgcctgcggcgccgcccccgccgcaccccaccccacccgcccgggaccccagccccacccgggagggagggcgccgcggccgcgccgaggcagccgccgggccggggctggcagcggagcacctacgcgcagggggctttacctcaaaggcgcggccgcgagcagaggggtcggtcccgggcgcgggcggcgcccccagtccgtcagcgccggcgggggcagcggcggcggcacatcacacccgccggcggccggaggaggaaagcgagccacgcagggagcgagcgagcgagcgagcgaggtaggggggaaggagcgagagagagaggtaacgcagcgctgctcggattcggtccctgcactgccgctggtgcctcctaccgccgccgctggccggagagtcgccgcccgagcctctgctgtcgccaccgatgcagcccggaatgaatgcacagcagcgcctcgcttatccggaggtcaaacatccttctgcctcgggcatccggatcgacgccggacccggaagtgaacacatggaaaaaaaattaaaaaggaaagcgtctgtttagcggcggcggcccccaagctgcccgcatcagcgaaaacagccgagtagagccgaagattgcaccaaccttcttggattggtcggatcgccgaccggaaaggagacggcgcggtcattggctggcaaggtgtataaagcctaagccgcgccctatccccgtctttctagagccgtgcgtgagggaaagtggggagaggctgtggatacgagtgtttctctggatgaagcagtgggcggagaagcatagcaaagtctacgcagagaactggaagagaacaccaccatgctttaggagagctactaagaactgagtgagcaaagagccttaagggtaccattgtgccaagtcagggtgctgaggctttccctgttgtgctcagcccgccaggttccaaaaaaatcttagggcccggcctaggagtatgacatcactgggttgacatttttccccgcttgtttgtaaccccagtgccatatcagggctccaactgcttagaaatgtgaattatggctcacatttgcgtctcatttgctgtttgtaagctgaggtaatcctctgaactatatagtgtggcattacctgtttttcaaattcacctcccaaagttctgagaagccaaacatcacccaagttatcaagttgcagcgcacaaactgaaatcggtgtttctgactcacacttaagtccactctgcctacatagaaagactgcattcctttcattttccctcttgcagttgcttccctgggatggagataagtcattttggtagacttctatggaaattgatccaccatgaaggcatggaaactataattttttaaaattgtgattcttatgtctcaagtcctttcaaaagttaggcattaaggtgtgcaggaagaagaatcagcctggtgccatgttttttaaatgttcattttatcaaacccgtttatattcttaatatacttactgtatcaagaaacttgagtcttgtgtatctctatctctcctgtctacctctcaaaacgaaaagactaatgaaacaaatgcactccttcattttcctccctgctttgctagattaacggtatagctaatgtgttacctttggaagggtagttagtatagaaatctgtttttgattttggtttgtaatacaacagtgccttttttttaaacctctcttctcacttcttccccaaactggaagttaagaagtgactagcatcaccagccttagaagggtagtgataagagctttgctccatgcttaccacaccatcattctgtaggagactcaaaagcagctaagatgtatgcatgctcagaattgtgaatgacttgcctagggcagatgacatatcccagaatttctgatctctcccaggacccactaatagacaagaaacaaagttaacaacatctcactcaatagaagagaagtgtctgcaacacaggaaactctaaatattgtcctcaactcccaacaaaccattttattctctctacctcaaaaaactcagttttgataaagaacacccactcttctaagttttcataaatggttgagaaagtcaagtgtataaatatatgatcaaaacacatttttaaattaaaaatgggctggtctaagtacggtggtacttacaacgaattgctcacaaccagttacagatttctttgttccttctccactcccactgtttcacttgactagtatttattaaattatattagaaacgtatgggaataaatgtttacatttttaacactgcagggaagacttttggttaaaatttggcctataagctcctatagattaaaattggcaaagcctggtgtagtggtgaatgcctgtagtcccaggaacttgggaggcttgaggcaggaggatctcccagtagtctaaggctagcctgggccacatagtaggatcttttctcaaaacaaaaaaaaaaaaaaaaaaagcaagtaacctaggtaggaggcaattaaattttcaggtcattctattaacttataagaaaaattggtttgggaggccgaggcaggtggttcac

SEQ ID NO: 317838 - DNA, 4001 bp, Homo sapiens
atatatgtgtgtgtattcacacaaatacatatgtatctgtgtgtgtgtgtagttattttgaaataaattatatgaatcagattctgaataaaaatggccaaagtatatgcaagtatagtgttggtctttttacagtatcatctaaatttaatcctcacaataacctaggaagtggtaataatcctgatataaagaaaaacgtgaagccctgagtggttaaatgacttatctgttccataaggcactatttttatattttaccagcatattatcaatgtctaatcatgcctggtacatgataaatatgtaataagtactggatggatgttggtgagaattatacacaataataacagattataaacacgtaaataatgttttctctaactccaaagtctgaaacaatttaagaatttcatagtatctaattcaatacccttcaaataataaaacataaaacattcaccctttcaaatatttgagtccctactaaatttgagtctgccagtcacatcatgtaacaagtatgtataaactatatcattgccttttattggcttgcttcattcaaatatttaatgtgtatcaactttccaaaactagtaagatgaatgagtcactacaaattagggtacttcacaagatgaaaagaagaagtagttgaatacataaacataaaattggatttatttctagcagcaggattgaatctaaaataaattgagaagtcagattttctttttacatctaaagttcactcttggtggtccactgaccagagccctcctggtacctgaatactgacttctatacaaccattataaccataacaccctccttcttagttttttgcaatggaaaagctacatcactactgtactggaagttaaaatacctagattttgatcctgagcttgttattcaattgttgtgaacatctgacaattcattttccctcactgagttccaattgccttgaatatagagttaggaagcttaattagaccagtgtttcccaaacttgcctaattataataacctgaatcaatactctgagccccttgttaagaatatagactcctgagccccaccccaaacatacttggggcagaaggaagggtaaaaggaaaaaattaaattacaatgatgtaaatttcattaattgtatgcagtttcagtatattaacttgactttaagccatacctatgccccaaaagttatcaattactaaacatttttgaatctgaaaaagtggcctaaatatcattcctaaagaacattgcaaaggctttactggcagctatttcagcctactgggctattttaatttaattgtttgttttctcataatctggatagtcaatctctggatggctaaagtagacactcctatactagggaattccttacacatgaaaatacaactacaaaagaaatttccaacatctttattctttaaaattaccacaaccattaaacaactaaacaattaaataactaaatcattttcattaaaaagtatcttccaatttttaaaatgtttctaacataatggaataaacaaaatagtcttacctaatcgtaattctccaaaattgccacatccaattttttttccaactctaaagttaggtccaaccattaaaactccagacgatgaagacccagttcctcgagtgttgtgtcccgatcgaccactaggtcgtgccattctatcatctgatttgtccttgtctttctttttattttccatatcaagtttgcggtactccactttgaattctttaatcaagacaagcacactgaaacagggtattgtgaaaataggtacatcactaggtaactgtaccagatgggtaatgttaacattcaaattgcagtaggtagtcaattaactggagcatgttcatcccattcgtaaaatttttcttagtgtcttttcagcaaaacatgtcttcaaaattatcttttcaatgatgtgagctgatattgatagagagctagaatattaagaaaaggaaattagtcaactaagaattttaaaatatatgtctgggaaattagataacataacaaaagcttaggcaagaattactgctatctattgatgcccattgaaatcaaaccacagtatacttttaaattaaccactaccctttatttatataccttaataacaaagatacgaaacaaagatatcagggattcaattacttcttaaaaattaaaggaacaaaattatactgtttcataaatcaacatacattcactaatataaacctcccaacttaaaattacctcaattagacaaaaagtactcaaaaaattccagtaagtcaacataagattttcaatttaaaagtagaaagagaatgaattataaaaataaaataccttaataaaaatatattccccatgttcatatacttaataattttcaaagtcttttttaaatatatattatcatatgattttcatttattcaagtattaccttataattacacatgggattggagcatagaactgacaatatcaagaacattcttcccacccctcaaagaaaacaattaattcttatataacatttaacgtgggccttaaaaacataaatgtaatttcacaagactgtgaaatgttgacaggcatcaaccttatcagatgcagaaattaggtattaaatttctaacatgcagataaaaacattaaagctcaaaatatttttcaaggcttttggaagagtctgccccattcatagtctctgggaattgcagtgatcaaatgtaccttaattctgtggtaattctgcacctttacaggatttccctacttttgtttgaacaaattgagtgggctatcattcgttgctattaaagaagttataaattcaaaatatagtcactaatgaagaaacaaggattgatatcaaatacttattcctattacaaaaattttctaattatataatgcaaccataaaaagggttgaaacggacagtattttctgattaattttcagcaacccccaaatatacaattactgttacaagtagtgactaactggggccggtggtgtaggcaataagggaatttaccaagacagttggtaaagaaaggcaggcttattagaaaaagtaggaaaacactttgcaagaaagcaatgggcagatgagcaagagaggagctgactgaaaagagactaaggcttggtggggattttataggatcgttcttgtgctggagagggctatgtgcagtactggtaacgccaaggttgcagtgagctaacctgcacttttctattagcagagggtctggtgataagttgcgtataggaagactgtgagttttttgcacaggaggactgtgagatttttgcacaggagggctatgtgtcctggactgtgaagaaaggcagacttacagtttatctgttttttctttttatgctcccctgctcccaccagcctgactccttttccctaattaggattccaccattagtcctaacacccaatctatttatgaagtttcttgttttatttgccatattcttatttgcagatgaaactgagttcctgtttactctgcttctagccatgacagagtaactatactgaacatctctgcctgttgtaaacaagtagaaagctggacaaaacatatgaagcacctgtttttaagcatcaaataaaaggcagcacagactgtgatcccttagaaaaaacacaaaaggtgagtcgcaccttcatccaagctctctggctaggagcaatttcctgaccacagcacaaagaggtgaggctcaggcaacacacagtgatcacagatcagaatttgcagctgttgaagtaaatggaatttgtagtacacagtatcaaaaatgaaggagttttgcagtggagtggtgcggtaaggtggtggtagggcagaaggctaggctacatgtgtacaagggaatagtctaaaaaaaccgaacagaaaatagttactacagtgtta

SEQ ID NO: 317839 - DNA, 4001 bp, Homo sapiens
ccccaaactcctatgcccttttatgcttctcatgactttctcccttcacttaaaaaaaactcgactcatgtttcatccagatcaaatgccaccacctcctgaaagcctttctggacttacccaagtaaaacttattagccccctctccgtgcctctacaagtttcttttgttgttactattaggtaagatttgactcagacaatagtttcattagtactgttaaggcacttactgcagtccgctctgtactacacctggggtgtgtgtctcccctattacactgtgagctcttaggtggattaaaaaattattctttcgctgaataaatatccagatggggtcaggcaccctggctcaggcctgtaatcacaacactttgggaggctgaggcaggaggaccacttgagcccaggagttcgagaccagcttgggcaagacagcgagacaccatctctaccaaaaatacaaaaattagacggatgtggtggcgcgtgcctgtagtcccaactacttcggaagccgaggtggggggatcacttgagcccaggagacagaagccgcagtgagtcatgatcgtgtcactgcgctccagcccgggcgacggagaccccgtctttaaaaaaaatgtttgttcaaaagtccagattggtaaataattaggcagaaactataggtaactcctacactcattcttcattcttcctgtaaaacaaaataacacatcctaattaattcgatttataaattccgttccttaaagtaacacccacctgtccagtatttaaaaatcactgctgactaaacacaaatattcgctccacaaaatgcctatcctgtcccaacaatgatgtaagcatttccttcatcataaatataaaatgccccgaatttagtcgtagacttgacatatctcgctcttttccaaataattgtaaattctgtacaaaacacacgcaccaaaaaaatgtcaccaagatgcaagaggacgtaagagggagtcaaccttggaactgggccaaccgccgcctgcattactgggaagccactgctgccaagcaaaggtcaggcattcattcaggcaacattttttccaacaagtgcttcacactcgcacgcacacacacgctcctttaaaagtcaacaacaattaaaaaaaaaaaaaaacctctctaatgccactcctgaaaactagggctgaaagctaagtgcgtccaaccgacaagaaacccaggaaagctgagtaatccccgagtccaagtggacggtcacgccaaaagtccacacgggtgtggcccacctacggcgaagctgtatgggagaagcccgggctccagcctcccggttcgccgagcccgcgtccccgccgccccatcgggaagtctcagcggccgggaagggggagggggcaggaacgcctcggagccggacgacaatcacttcccgggaaagcggctcccagacaagccgccccagggaaggaaggcggccgaggggcccggcgcggggctgccgcgcgcgccgaggccgcggtaacaaagtttggaaaccgcgagaaaacttttccaagaggaaacgcggcggcggcgctgggcctatagtttctcctccccagcccaggcggccccccgacttcccgagcgctgggaagcgccggccgtgcccgcccgggccccatactcgggccctgcgggggaagggaccgccggcccgacgcgggtcccacgcccgcccggggcccaattcccggcgacgtcgccaaagaaaccgcgccccgcccgctcgcccgcccgcggctcgcggggcccagcttgggacggcccggcccaaggaccctctcggcctggcccgagagaccgcgcccgcgaggagggaggtacgaagttacctgcggctagctgggcgagcgctaaattccagaggcccgaagcagacgggcgctgctttgtctccctccagtccggctaggaggaggaaatgggccgccccacgcccccgcccccggcccgccccccgcccgcggcccccgcccctgtcccggccccgcccgcccttcctggcacctccctccgactcgctcttcccggcgcctcccgccgccgccccgcccgctcctcccggccgttccggcctccgcttttggggaaagggaaggcccccaccgcgaagagagtctggcaacgccggaccgggacccccgagggacctcttcctccccgccgcccacctcagaattccttcctccccggcccctagtgggagcttaggccgggagtgacccctgagagggaggaggagcggtgactcctggaacagcccgcgggcggagagggctgcgcgagggcaggtgagtcaccgctccgcgcacaggtgaggctcaggggcggcctcgcgcgggcccccaccccggcggaatcccagagacgcgaccaggggtactgggcacgctcccctcaagagtgtcacaggtgtcccggagtcacagtcttctggaaaagtgatctaggccaactacctggctttacagaaggagaagcggaggctaaggaaaggccccacagcttcgggacacagtggaactagaatctgactctcaggacctttcataatgtgaggtggaagcgcccctagaattcacctaacccgtcccctcactccacagatggaaacacccgaagccctcttgatcaaggacttttttttttttttaagacggggtctccctctgtcgcccaggctggggtggagtgtcgcgatcacggcccactgcagcctcaaatccctggacaaccgaccctcccacctcagcctccggagtagctggaactacagacacagagtctcactatgttgccaggctggtctcaaactcatgggctcaagaaatcctcctcagcctcccaaagtgctgggattacaggctagagccaccttgcggggaggacatttacaaacacaaaagaggcaccgcagcagctgtccctttttgggcttgttcccgccccgcccccagcacgtcccccctcccagcttgtccccctcctccaacaaatttgagggacctgacttctatctctattcctctggtcatttggggcattttattcttaccctttcttatcttcatagtgaatactccaaaaacaaaagaaaacaaaattacaaagcaaacaaacaacacaaaaaaacaaaaactactacatgctcactatcatcctggtatagaaaaccctaatgatgtttcccctgctcacgggatgatgaataagatagatttcagtattggcctataaacctgaataatgcaagacgacgatgtccactgctggccttgtgctgaatagagagcagggtgctagggagacctgcccttaccgtgtttaccctctactcctcacatctccctctcccccaagggaatataaacttctggaaagcaggagctgtatctcctgcagcacccagcacattgcccatcccctagggagtgcctagtgaacatctgtgggtgaatgtgcccactgtaattcaaagtactgtgggcctgtgctagttaacagatgctgacaaagggcaataggaccatgaagtggggagagaacaacctttaagaaaaagaggatgggcacagtggctcacacaagtaatcccagcactttgggaggccaagatgggtggatcacatgagctcaggagaccagcctgggcaaaatgatagaacccttgtctacaaaaaaatacaaaaacatagctgggtgtagtggcacctacctgtagtcccagctacttgggaggctgaggtgggaggatcgcttgagcctgggagttcaaggctgcagtgaaccatgactgcaccactgcactccagcctgggcaacacagtgagactctgtctcaaaaagaaaaagaaaaaggcaaaccctgacaaggtcattcttgtccaactacccctgtcctgtttctggctgcagggtctttgctcctgtagtctcctctgcctaga

SEQ ID NO: 317840 - DNA, 4001 bp, Homo sapiens
aaggattaaggtcagagggggagtagcattccccgggtctaaaccaggacttgtttccttcccttctttaaccagcaagaaggaacaaagaggacgtactagtgcaggctcattactaaggactcaagagtctgttcactggcaactttggcttgggaatttccattcagcctacaaaatgtgtctaagaaccacaatgccaatctcatcttctttgcttcctctgtcccttcacaggtgtcagacctgccctgtggtacgaagactctcagagcattcctgctgccttctgtctccctttgtacttcgtaggcatttttgcctcttgtacttctaattctaccttgggatcacttctaggaggactcaaaccacacacctgcactgctgcagttttcatagcacctttacacagagccctaaggaagggaccttggagtctcacagctctcactccagcacaacactacaacagaaaaattttacccaagacaattacttcttagatctgcccagtgggatgaatccctcagaaccaaaaaggccaacgatgttcttgtttcacagacaccatcagtagttttaaagatgtctgtccttaggtctgagacaagacccacaaagggtaagtgccaatgatatgggagaaataggtatgttgggtcaaatcaataaggcaagatgtagaaaagggcttacctttgtcaggcctgaaaatataacatctagaaacatcttttgcatttatataacactaaacatggagctatacatccacaactgaggtctgaaaagtgaagacaccattcaacagggagaaactggagttagggcaagcaaaatcaagtcaaaacaaaaatcccagtccaaagcatgagtgaccttttgtattcacaagacaggttctaacaacagcagtaggctcagttaagtcagccacttggtggctgggaactagggtgcaaatgctctattatttcagtgtcacaaccaccaacctcagtaccagcggaggcttttagttatggagtaggtgagattctgaggtaaaatacaaggggccatgtcagaatccagctacacggtatcacttgtcctaaatcatctctgctttgctgttagggcatgtgcattaaaatgactgtatcaacctgccttgtcctcccaggaggacatttaaagatcaactcagcattattttttcaatcagtatggcgacaaaacattgttataaaataggagaaagagaaatctttttagagttcccctgaaattctcaaagaaaaaaataaccacatgctttgttttgcaagcttcccctccccctttattcttcgtttataatgttaagctcttgatgacaaacaagccaagcccacttagctagtttatcaacacatctaaagcaaatcatagtcatactttgattttaaccaagcatgacaacaaggcaactgaatagctttccaaactaccagtgcagcgacactaccttgcataggctggtgttaaatcagcacttcataaattgtgcaggcttctgcccatttagatgatctctctatgcagaatcggcagtctaacactggctctcacaagcattaaaaatcatcactctgctaacccaactcactgttcagatgggtcttcttgaatgcagcctttattacaacctcactgctgcttcctacactgaaggaatatcatgtttttaagtcaggagttcttctttctcgctttattgtaatcagggggtcctgcaacgaccccgatgctgttacaaagcatggtgctttataacagtaaagcttctggaaaacccaaacaaaagacacgtcatccggtgacgtcagcctatatacagttctgtgtggtcgcagcacataagcaaatccattcttgtgccgtttctcggaaaagcttttcagtaaatgcactcatgctgctccaggagctcttctctgcaacaagccacccatctgccatcaacaagttaagaccaagagaactaacggctgcggaaaggagactgaagctttgattaaccagctgagcagttagaggtggagaaatttaataacttatattcaaaactgatttagggatcagagcaatcacagaaaatgaaaccaatgctttccagagggatatcctaaggaaaaaacaactcgtcctggtggattcaattttacttggaaagcctgggacacagaaaacaggaaactggtcaaaggctcctacatgttagagccttttacagactcactgcgttgagtctaacaaccgcgactgaatgcagcctccaatgtgctcagaagaatgggtaagtctgtgcatttatatgtcttgtacattcaacaaggaatcacgcttttaaaataagctaccgaattcacattttatgagggaaatcaccatcatattttggattttgaggtttaggtaaaagcatatatcgatgatgacagagacatgttttatcttctttttaaatggcttaagttttggtccagtcataccaataaggttaatttttctgcagtaaatgaaaaataagttatatgcagtgaaatcttttgctataatgttggtggtggttgttttttttaaatagcccatatgttctgctgaaaaatatcctatcttcttgttttccttaaattatattctgcaggcttacatttcaagtggccattaggggcccctatgctggcagcaatatatgcaatgagtatggttttaaaaatgctgcctgccctgggtatggcgtgtccacccaaatgccgctgcgagaagctgctcttctactgcgactctcagggcttccactcagtgccaaacgccacagacaagggctctctgggcctgtccctgaggcacaatcacatcacagagctcgaaagagatcaatttgccagcttcagtcaacttacttggctccacttagatcacaatcaaatttcaacagtaaaagaagatgcttttcaaggactatataaacttaaggaattaatcttaagttccaacaaaatattttacttgccaaacacaacttttacccaactgattaacctgcaaaatttggacctgtcttttaatcagctgtcatctctgcacccagagctcttctatggccttcggaagctgcagaccttgcatttacgttccaactccctgcggactatcccagtacgcctgttctgggactgtcgtagtctggagtttctggatttgagcacaaatcgtttgcgaagtttggctcgcaatggatttgcaggattaattaaactgagagagcttcacctagagcacaaccagctgacgaagattaattttgctcatttcctacggctaagcagtctgcacacgctcttcttacaatggaacaaaatcagcaacttgacatgtgggatggagtggacctggggcactttagaaaagctagacctgactggaaatgaaatcaaagccatcgacttgacagtgtttgaaacgatgcccaatcttaaaatactcctcatggataacaacaagttaaacagccttgattccaagatcttaaactccctgagatccctcacaaccgttggtctctctggcaatctgtgggaatgcagcgcccgaatatgtgctctggcctcctggctgggcagtttccaaggtcggtgggaacactccatcctatgccacagtcctgaccacacccaaggagaggatattctagatgcagtccatggatttcagctctgctggaatttgtcaaccactgtcactgtcatggctacaacttatagagatccaaccactgaatatacaaaaagaataagctcatcaagttaccatgtgggagacaaagaaatcccaactactgcaggcatagcagttactaccgaggaacactttcctgaaccagacaatgccatcttcactcagcgggtaattacgggaacaatggctttattgttttctttcttttttattatttttatagtgttcatctc

SEQ ID NO: 317841 - DNA, 4001 bp, Homo sapiens
ccacataatataaatacctggattaaaaaaaagtaagtgttcaaatttaaaatatttatagtcggaaatataagggaatgggcaaacataatcataacatcaatgagttaacttaattgcgtttttaaactctttatttggatcacatacatatactgtgtcctatagtttgaagacttagtgtcacgtaaatctattagactgatttacaaaaaatgtgagcacccaaacactatattcctgatgtgagacttcatagtcatttacttttatagttcagcaaaattattaaattacagtcaatgtggaaaacacttccaaaggtcaaagttttcttaaatcactttctaaatccatagcattgagattgactttcacgccttaaaaataaaaagatttcctagctttaagacaataaacataaacttttacttttatttaataattagttgaaatgaaatacttagtaagagatgccctcagaataatatctttcttctgatattattctgatattctgatataataagggcctttcttcctcagtttctttaaaataaaaatatccatgggtaggcaattaacatattaaaacatgaaaatatgtttctgataaaattaaatcatttttaagtcaacatggtcattcttcacacttagtttataacttacaaagtcattcaaatttcatataatattaatcaaacataagttttatcttgtgtttgtcaaaattaaggtgaaaatcattttgtatcactattattattcatttgaaaatactttaagtttagagataaatacttaaggacttttttataaagactttataaatactaaagaatctctcaggcattccattttaccgcactcacaattctacaaggtacagccaacttaaatatataacaatctaaaatataattccacagattgtcattttattcaatcactggtttcaaaaaatcaatttgtttctttaatctgttgggtatcacaattttttttttttaactacagtggtggcacaggtgaaatctatgaagccattgtaaattttgggcaacaattttctcaatgagttatttgaataaaagcaatcttgaaacacttggtaaaggttttctataattaaggggtgtgtgcatcttatttacacctgcaccatttagagtgttcaaaacatgtaattattgtattctagttctagtataaacttatcactgagaaccaaataatctctgccaaaaagagaaagctatgcaacaagttagctgcccagtatattaaatttttggctacttcacatggtgactctggttgggtgattttttttcctttactctccatgaataatttctttctggatggggttattcctttaactgcgcatcgaaggaaaaaaaaaaaagacctacaatttccaaattaactcttacttaattctcacagaattgtatgtgattacttacatggataatcataactttcataaaatctaaagtatatatctatgacacaccaagtcttactaaaaacaataattaaatggttataatggttagttaatagggaaatgacccatgaattcttacaaccactttctgtttaatttggttatttggttttacaatttcaatgttcagatgctgaataaattgataactgtgaggtcagaaataaattcttaccatattttctatacagaactttaacctgcagttttaaaactttagttaaaattatcacaaaaacaacattcataatgaaagcattgaaaaaccaaacgcggttagttttcactttttgtcttttacctttactgtaccttttgaaataaatggtccttaaatacttgaaaactgtagtctaggcaaacaagacgactagtcccaaagatgaagggttactcttccctccttccccaggctgtggagcaggcggttcctggcatcctacccacctccctcctccctccctgcaccacggctaaaaggaaccacagagcagctcaaaaaccgagaagggagtgaagaacagcctcgaaaaagtcaggacgctgaattatcctatggtaatttctgctttcactcgcaaacagtttaaaagaaagcaaagcaagacatatcagagataccacaagcccagtggttgctgtcttaaaagagaaaagaatagagttcagccaggcacaaaggtctccatggcaacagtgaatttagacccccattggcattatttatgcaacatttcatcacaaaaggaccctcccactagcctgcctggcaaattctagttttctaatcttccgttcctttgctttgaatgtatctggattcttagctatctgtatgttaacattaaaacacacacacacacacacacacacacacacgacaacaacaacaacaaaaaaacacatcatgaaatgattatcaaactcaaaatagactttatttccttgatgaattcaaaagcaagaggcagattcaagattgtttagagttcatattcaaagccagtccggttttggtttcaaagatgaacagctgttcaacaaataagtttattcaaattatttggttttttgaaatagattacaattcaaagagaatacaaaatggcaaaatcctaccaacccaaaaggctcacaggaaagacagcttgctagatacggactttgaagctaaattttatataatgatatccatccccacccactcctagctattatagtacctcaaacaactcctttgagtcttttacctgattctttctattttagccacagcttccaaaaacataaattcggcaaagtattttaagcactttttattgacctttgtaccaaatggatcccaggtccacattttataattagacgacctgggacaagttatttaaaacagaggtaacgccccagtggaattaggttgctgtgagtattaacaagatgatatctgcagaagtactttcttcaattctaaaacaatatacaaatgtaaatggttaggataatatttgatggcactgaagggaaacactagtcttcatttgaaaagggctgtatttagtattagttcaaataggaactaaacaaggtgacttcttaaaaataagattttgtaaattttttttttttttttgagatggaatcttgctctgttccccaggctggagtgcagtgacgcgatctaagtgcactgcaagctccgcctcctgggttcacaccattctcctgcctcggcctcccgagtagcaggaactacaggcgcccgtcaccaggcccgggtaattttttgtatttttagtagagacggggtttcaccatgttagccaggagtcttgatctcctgacctcgtgatccgcctgccttggcctcccgaagtgctgggattacaggtgtgagccaccaggcctggccctgtaaattattttttaaaaacatacaagcttattattaaaaattcacagtacatactttgataaagtacagggtagtccttattccatacactcccagcatcaaatccattctcctttttgtaaggtcctctaagctggccgcaccatggtcaagccatcatgacatccccctgcccttgtgataatgtactttgtgatattcccccgtccttgtgaatgtactttgtacgatacatcctccccgcccttgtgaatgtaccctgcccttgtgacaatacaccctccctgcccttgtaaatgtactttgtaacaccctccccacccttgtgacaatacaccctcccagcccttgtgaatgtactttgtatgatacatcctccccgctcttgagaatgtactttgtaacatccactccctgcccgcaaaaaaactgctcctaactccaccacctatcccaaacctataaactaatgataatcccaccaccctttgctgacacctttctcagattcagcccactttcacccaagtgaataaacaggcttgttgctcacactaagcctgctcaggtggt

SEQ ID NO: 317842 - DNA, 4001 bp, Homo sapiens
gtattcaatcaacttgagccgtatagaccttgccagtcctcctgcaacactgacttgtgattagtgtaatcaaaggcctcccaaatttcaacacttaactccgaatgtaatcgtcttccttcaagccctgagcccttggaacccacagatcagtaatgatgccacttaacatttttccccaacaacagtaggaacattctccgtatggcaaccatatgctaataaaagacatttgagggcagtttaaagcatctagttcgtatttgaggatactcgcccctatatatcacacgtctcgtagcagaaatccccaaaataatgacaggttcaccgccataacttgatatgagtcacagcaaacacttctccatgggattttagaagtggtgcagccccgaagccttgtcattatgtaggtgaatgaccagcagcagagaccagctggactgccctcggtagcttcagcccctgatgaagtatgcacaatgagataactcctagggagtttcagcacctccttgttttcatggaagtcactgcagaaaatcccaagactcttaaatattggtcacatagttcttaaaagtgaaaatttacacctgtcaggcctaatactatgctgacaacattctctgttttctaaatcaacatatttgcttgagcacagtaaaaatacatcttaataacacctgccagagctaaggcgaatcagatcagctcaaatgaggcacacaagaaaagaaaagaaaaaaaaacaccttggaaacacaacctgcccctctatctctcatctcccacacccttcatacccccacggttacagcaaaatacaactttgggcattttggaagtaactgttatttgtgacacacacacacacaccccaaaaattcccaagtctgttttcctaccacaaacaccagggaggctgcatcacctttctagtgacttaattctgaaagcagaggctcaacctgccgagtggcaatcgaagaaaacacactacacaccagaataagatgagggtcgggaaaaaaagaaaaaagcagcttcgctttcagccattaattacggatcaccccaattttgcatcgctcatctcccatacacacgcacagccttccaaacctggctttcaggcggcgctttctggagcctggctgtctattgtcagcacgcagaagcccccgaaacctgtgaagccggctgcaaaggcttgctgggaagccgctaaatatagaccaagggggctcagggtctggcaagccgcgggagcctgaagacacggccatggacgcatatgactaagtctttccattttgttctagccaaacatcgtaatgacattgaacataagggcaaaagactggagggaagtcctccccacccccaccccgtctcctcccgtatattagggacgtcatgaatgcaccgagtatgttctcagggtggcggggagcagcattgtcggtgttgccctaaatacgcttcctcccggggagatgggtggcagggagggggagcacgcagggcagccacttggtaaccgctccaagaaaggcactaaccccggacccccttccaggcacagcggcttccgagggggacctggcgcgatcgcggtcctccccgaggcaggcagaaaccccgcagcagccgccgccgccgcctgccggccgggagcccaggaccacccccaccagcggcaagaggaggaggacggcgccgggaggaggctgcgcccggccccggccgcccagccccgcaactcacccaaaggcgcggcgcccggcggcttcctcgcaaacatgcaccctccgccggcgacagctcctcagtccgggaagaggcgtgcgcggcgccgcccggcttcagggcaaggtcctgaccttgcccaactgcagcatcttccgcttttgttgtctgagcgcggccgcgggacaagggatgctggcgggcggcaggggcgagcgccgcgggcgagaggcggctcccgacgcgagtgcgcagcgcccggcccggcggcccctccgagctcggcgagcgcagcgccccctgcccggctccgcgggctccacgggctcctgcgggctcctcggggctccgggcgccgccgccagccggccgggctgagagagcagccgccgcgcccgcagctccgctcagccggctgtcgccgcgggcgcgagcctggggccgccgcggcgcccggcgccgagcgctcccgagctgcgccccgcgcgcggcccgcgccacctgtgccgccgccgcctcagccgccgagggcgaggctcctcccgcggcgcgcggcagcctcagcctccacctaaacctcggcggccggcccgggcgcccggctagtgagggagcgtccgccccgccgccgaaaccggccccgggtgcggagcatgcccagtgccgccgcgagagcggcgcttcgccgcgcgcgttccacttctcctggttttcgcggcagcagcggcagccgcgggagagaggggaggaggccgcgggttgggagagggccgagcatccttgggaacgcacgccctggacctgagatgggtggatgctccggagctaggcgaaagctggaagggacccgggaagggatggaaccccaggttactccgcttccctaattcacgtgcaaggcgctgacagttgactctggtggggcagatgtcagcctgcaacaaaggaccagggtgcgaggggtcctagagtggccaggtgggttgggggagggaggctggcggaacgtgctggtgagcgcaggtagatgctcttgcagatcctgtgattccagagctaaggaggcacgaagtccagcagaggtcttctccacagcacctgcccaatcttgccatcaccttccctgttcagatggcatgtttttggcgggtagtgagggtttctccttaggcaaaatcacttcagatttgaaactggaatgtctgtaaacttcctgcaagaaagacccttgcccagtctggaacttgagcagattaagttctctctcctccccttcttgtgccaccttgtcctcctctcttggtatcttctgctgcatctctgccaccttctcttcctccttttcttccttatttcaaagtgaaccactcccctgatccttccccacagtcttccagtgcatctcgcattgccttcttcacgttcaaatcagttttccatatcacctcctggcttgactgctccttgaccccatcgggacttccccatgcgtagcctgctgtgaaatacagcaagtggaatcaccgtattcaaagtcttgttgaaaaacgaaacccaaaacatgtgccaaggaaggcctctgggccttcgcccctgtccctctgattcagcagcagtcaggacggggctcacgtctgctgcattcacaagccaagccaagcagggcacagcctgcccaggggccaggtcgaatgttcctcctaattatgccacgggcatgaccctgaacaccgcagactgtctgaggttgtgatctcctccaccccccccaccccccccacccccgcagagcttgtttctgaaacacaaataagcatgacagaatgcaggaaattgtaataaaagggatttggtgcttacgattctcagtaacattgtgcttctattttgtgttgaaagagattatccaacaaacttaaatgatttgaatattcaagtctattctttattatacttgggagtaagttgaaatataaatggaagtaagagtgaaggagaaaagcggtacagaggttaaataggtaacaaataattgctaggaggagcagattaagcagactattgacaacagtacaaatgttcgcttttattcctcctaccccaggtgtggacatgcacacacaggctttgtctcacctgcaaaaaacagttctccaagctaactccaagtgtcttaaagccagtttgatattaaaatatcctgagtcctgtgagggaagacatgcaagaccatttttttcatcaca

SEQ ID NO: 317843 - DNA, 4001 bp, Homo sapiens
caacagttctgaagttaactgtggaaatgttaacatggctttgaatgattcaagtaatacacatcctgatactgagcctaaatagaatccctctctacttttagcactaaaggaagcctgggctgcattcctgtttgtataactgtagtctctcaaagtacatttcattctccaacccactcacccaccctagatgtgtaaatctcccaaatgatcctattatccatccccaccacaactgtgagtcatctgtataagccacctcgttatctaagcaacagaatcaccacataagcaaatattattcccctacaaatcttttagaaattctgtgtattattctagtgaacagtaacttgcattcaggatatacacacaaagatacaaaatatttcatataaattcaaagaattcatggccctcttgcttaccagcaaagaacttcaggtaaagatttcctggctctttctaggtgtttcatagattttaaatcctcccactccccttgtttttggctcatatacacggcaacatctctatatttttttccaagtacagccctcctgttccaatacaatagccctgatgcttcaaaattcaaaggggggctaagggtaaatatattttatactctcaaaacatagactcaagtctactagaaagcctacgaacaatgatttcataaacatgaggatgtcttcagctacagatgtcaacaggcagtttcagaactgttgccagcccccactgctgcactgggaagtctgttctctgcttgtttctgcaaagtcagcctgcagacacgtctgcttgggctgggagtggaccctgttattctcaactcactgctgcttttaagctctgggtcagcaggagacctttgtcttcagcctcagccccaatctcagctttacttcttccccatcttcatcttcctcttaatatctgcttgaggaatttttaagggactgcagggcaaggctactgcctagctgagaacatcagaaaacaccatgagggtgcctagtcaggaatcggtggtatcagaaggcacccttaacgaactggaacttttaacttcaaataataagccctactgttccacctggttttctttgtctttctttgtgtgtttcatagtgaaaacggctacttgctgatatctcaaaaggatagtgctgcacacagcttatcagccagggacagtcaacgctgtcaatatgagtggttgagttgtgatcctttgtaaacaaatcagaacatccttgttacattttggaaggttggacgttttaggtgactgaaaaaaaaaatacgataatgggcaaacagctttcagaaataaattactgcagcttaggaaagaaaaaaaagcctgttttactacttcttcatccagtatcaataacattataaacttaaccatgctttaaaaataaaggcatcattacattttaccccctcgcttcttaactttatctagcaattgtttaattagacttatctaacagctagatctaaattcacaactatgatccgaaaggcatgtatgcgatgattgctcatgcatcaattgtaaagttagagaaaagcatttaattagcccgtcaaagatacaggttgggtcaagtacctggctctggctgaacaaacacttgatccatttcctggtggaacagttacaggtagttacaagcctctttagtttccattcttcccgaccacgctgtgtgaaagcagtagacagtggtagctgcaaggcagctgatggcacaccccaggtctaaagctgttgtttcaggcttagaaacttcccattaaaaccccgagttaaaggagcatcgtctttctgtgtgaggcatcattaacggccaatactgctgcttctttgaggtgagccatgatttcagttctgcctcagcaactcttcagaggattctgcttcagcgagtagaggcagtatcctagcagtgtgtctgaaatcatcttcaagaaagcattaacattcaaaaggagtacggggttggggggtggggaaacatcacaggcattcctataccttttcaaaatcaaagccataaatctaccagtgctctgtcctctttattgattgttgacactattcctctttgggagtgtcaattagcacgtcgcagcaagtcttcatattgattattgttgatgaccttcaggccaactcaattaacaggaagacttctggggaagggcatcaacttagcatttgggagagggagaaaaggctcattttcctaaagaaaactaaagtgacctttccaaaaagcagcatttatgggaaggaaagaaccatttaaaaatatcaaaatcatagtttcaccacctgtcacctgcttgtaaattagctgggcagttggttgccaggtccagtgtctctctgagcagcctgcataattgtggcattgggaaagcccccaccccacacagggcacctgagaccactcgatgaataaagaagattgatttttgtgagagaaagttgttctcattctgcagattctagttacttgctacaatgcttaaattactttcgttggataagtaaatttggaaaatattttaggataaaattcttcattaaaaaaacacttctctaagaagaattcagcctaatgcttaagacggagcatccttgttttttggcaactcaccactttctttgttgaagtggcggcacagttagcgacaacacacccacccaccaaatgatggggtgcgtgatatttaaagctgcctctgactgtgcctgtcagctatgctgtctcctcagctcttgtgagcaaccggccattacccaaaggctctaggaaactggaaccaagctcatcttctaagagggaaaccccatctgctcacaacggaccacaatcctggataggataggcctcggaccccaaaggaacctttcaaatcaaatgctaaatgttaggatcgaatgcttgatgttagagtctaacctcaagacaatatgcaggttctttccccatttgttttcctaatttttaactgaattttctttccaattcattttacttaccctattttcagacacacacataccacacaccgtaagacaatgggacacatgaaatccaactgagcacgatcatcctgtactaactggcatccctcttgcatttagtcaattctggcagagggagtgcctgttttggcaatgccaacagagtgtggttgaggaatctttccgacctcaccctccttcctataattatcattccatgcggtgagaaaatatcatagttagacatgagcctgggtgactgtagcttaccctgccaaagaggccttctcggatatggtttagcctacagactcgtagagggagaagggaacctgaaaaggcctggggctgtcctctagctactctgcaggctgaaaccatcccagagagatgagtgcctggcctattttaaaaagtctccagagaagtagatgccataacttcctctgacaacctctgtttaaacaaactcctctgctgcttacttagtctaaatgtgttggcgcatttcttttcattctgtccttgctgcaaaaagtcaggcactaaccactccaaaattttgttagaatgccctttcctttcagagaagccgaactagataaaccaaagagtatttgatgaagatctggtgttatgcttggagctaaatttaaacctttcttcttaaagataattataatggaaattattaaaatcagcccttccccttatgcagctatattatgtgaatcatcatgaattctaaaacaatgaataagggtttaccaaagttccatttgaacattttatattagatcctatttctttcgcttttaataatctttatatctcttctctgaattcttaaaatttctgctctctggtgcaacattaaataggaagcctagaatactataccgagctgtacacagctcagatacacacggaattgtgatgaaac

SEQ ID NO: 317844 - DNA, 4001 bp, Homo sapiens
ctgggattacaggcatgagccaccatgcctggccattttcagaaagttctttaggaaaacaccatataatccaaaaaggaaatataagaagagaaaagaccattaactgtataactgatgtaaggatttctggatctgtgaaatccaaaaattcaggtaagaactagatagagaaccttttgagtccttgagaatgacctcctcagcacaagcaggctgactaggacggtgataccttgctcagtccctcccttcccaccggggatctccacttgatgagcaacattgtgaccccaggagtagtcttccccagccttctcttccatacagggcaaatgccaaatccttctctcctggatcaactctcatactttctaggcttcacccacaactcaggatttacagcgagcaaaccattcatttgggggctgcagtggtaggcaaccattccagaaattccagcaaataacttattcatcctgattcagattatctgccatatctgcctcttcagtcaccctaggaatgactctgggactcagattctgcacgaggatgccaagtattagaatgatttttaaaatcagttttaatttgaagttttaccatcctctactgattaaaaggcaaggtacaaaggaaaggttaaccctctttgcattgagaagcctcctaaaatataaatatgtgtatactccaatgtcttcatcaccaaacctttcctgatataccaaattatgagcaaatagaggtgaaagaatttttaaaactctgtagcacattgggagttgtaatcctctcctctcccagcacactgtggtgcccaagttcctataaaaataactgcttttggtcaaagtatcaacgtctcctactaaattgcaatattttacctaggaaagtggcacattaatgtgctagcaggaatttgtgaggaccgttcccacctgaaggaggggaaagtgtggtaagtagaaaggcgattgaaggaagacctagctgggaatgagggactcctggacaggacaggaagacaggcatggtggtgtgaacagggggcccactggagagccctaggggagggatgagggatggtgggtagagacaatcaggaggtggttgctaaagggataaagagatccagaaaccaatgctgactaattcacaattttgcccaggactgattgaaatccctggaagagtctgcttgattttaaacctgcaatcagctaatcaataatttaccgatttagaaagctccaacagcatgtataagttgaaggaagcatcagctattataaggtggagaaaaagaaataaatgtaatcattttgctaccacaatacaaaaatatctcaagacatgtaaatttttaaatgtctgtctcgcagtaaaatgtccctttttggtaaaaatgattcttagaaaatgtgcaagtttgcttttaactgaataatgacatctttcttttagatgaccagggaaatctgtgcaagtctattatttcaaaggattttgataccaccatcagaagccttcataataacacatggcagctattttaagtataaagaaggaccacagttactcacagccatattttaatcctgataggctttcctcatcacgcagtacatctgtgtcttccctttgtcaggtccatttgtgggtgctcaggaaatagagtctaattttaatactgaaaaattaaagaaaaccttaattaaaagatacccttttcaaaagtcatataatacattcccttgctcgagtcaagctcccttgtgatactgacaaaaacagaagacacccataattacttacgaagcccagcaggcgtagtcattgcagccagggtcattcacactcttagtcacttgctttagttttagtaattttcaaagtggcgttcctcatcccttgcccatgcttcctacacactgcatctcgattcatctttttaagcccagatctcaccactcttcccctcagaaaacctttgcaccccagtgtccacagcccattaacccccttgtgggcctgatgcccagatgttttccggaccacagattaggacctatgctgacaatggaatttttaagatctgagttttatttttataagtttagaaaggagtcaacaccaaatcacatttagttctcagtaaaatggccaatgtgttgatcagaataaacttccgtgtaactgagtctgtggacacctgtggagaatgtcctcattttgtctgtttttcagcttgatccaatacctgctgtgctctaacacctccaggtttcctacctcataatacttgcctcctctccttctttccatctgtggagaggaggggaggcaagcactatgaggcaagcatctttcctctccttctttccatctctccctcccttagggttcacaccaaatacccacttctcggtggggccttctttgtttcccttcaccaaggatggggtgttttttactccatctccagagacatcacctgtactcggtggcagcactgattacagtgcgagtcttgacagtgtttatctcctccttattacacaataagctccttgaggaattatttgctgttctgggatcattgcctttttaaatataagttaaatcaaatcttcaaccccttacagtccagggaactgaattcaaaacccgaggtgccagctaactgatgcagagaggaaaaacaaaagcacaagtcatcaagccggactgaggtgctggaccatcacatttgaagtaagtcttgtttgaaagaaagacagctagttcaagtcacaatgacactttaaaacccacagatcttgtaatttgaagagccataagttatttggctcattaaattttccttggcctccgtgttgatgggtggaatctgaaatataaaaatcagccagaaattgaaagttacccttttatttaagaggtcaattctttcttacctaatctactttttggtggggaagggcagccatttaaaatatcctgaatccaaatgtcttacacaaaaactattaatgtcaacatgtacccttctcaggcttggatcccttggacattttatttcattagcatctcattatacaatttcacagtaaggaaaaaatactttctctgaagaaaatgtatcttaaagcaatgacatgtttcttttcttttttttttttaagtgacagcgacagaattacttaagtgcattggacaccttgttctgtggagccacacacagggacttgattctacaggtcatcaactcaagagcccacccttttgcaatagggtgcaatgatctaattaatagttgcagtacctgtgtagtcctgcctggcacatagtggggatttgataagtaggtggggatgaatgagtgttttctttttacaccatttttgtgcaaaatgttatttatttttaatttctattatgtgatcaagcacactaaggtatgaaaattataaataaactgcccagaattataaaaatcgttaccaaaaaggtagcaccaccccctaccaccccaacgccaaatgatggtagatccctagtttttcactggcacgttggaatgaattgaaggtgtcatccctcaggtgttaacggcctgtagggtgcagtgaagcaatgctgtctgtattttaaatattcctaaaccacataattgcagtacctaatttttaaaacttctggatcagaaacctagttacgtgacttgacgtggtttcaaaagtaggtgtcaaaacagcccatccattgagcaaggacactcttgggcttgtccagtttccattcacatgtgatagacaggacactttatcctgcaaagatatactatcaaccttatttatatttatctggcagactagcgagaccaatctttagactttaacaggaacggaattgcctagctaggcaggactgaatttgcggtgaccaacagagacaaacttactcaaaatgctgcattattctgcaacagt

SEQ ID NO: 317845 - DNA, 4001 bp, Homo sapiens
tgttgaatgaataatctattcaggaatgtatccttgttaaagcttttcatctatatgaccatgtcaaatcttgctttagaataaagcaattaagtctgtccttgaccagcagtataacctcaaactcactgatgcttaatacttctcaaaaactaagaaaaatatagtattaattcatccatccattcatttattcaatacctatctgaactccttctatcatgtatcaagtactgttccagatgcttgtctctgcccttatgttccttacattctatagggggaaggtaggaggaaggatacagtaatactaaataattaataaataccatgaaaaaaactaaaaaggttaagggggccagagactgctgggatgcaaggcatgattgaagtttgctatttcatagaaagtagataagaaagggctctttgctaaggtcaacacttgattagacagaggaacagcaagtgtgaaggccctgtctggcaggatggtaaatctattcaatctctaccagtgtttattaactgggggtgatattgccctcaagaaacatttggaaataggaggaggtaggtattttgggttttcacattgatattaaataagataggtgaggggtgggatggacatactaatctacaatgcccaggagaagttcaaacaaagaattgaaagaattggtctgcccataaaatatccattacatttttgctgggaattacagcatttttggtttcacttttaaattgctctcattacattatcaaatgtcaatgaataaaagactgtataaattatttatgatgcaatcatgtaacaaacaggatggtatgttgtgtaaatttagcttatcttaattcaactatatacttccaatctcattttctccaatatgctgattcatcaaatttcatatgtgatataagctaggtctcaatttaagaattcaggtgacacttattccacaacagactcttctgccttgtacagcatacaaacatcttggatgggaattggcatacattagccatcaaatcaatcagagaaacctttccccattctaatgtggtaatagtccccatttcccactttctctgactgacagtcatctcaggttttaaaaccagctcaaaagatatcttttccatgaggcttttcctaacttccccagttgttcactactcagtaccgccatagcaacctggtctcttctccacaagcacgcttatcagacatacaggcttttgtttacctgtctgtctcacaaactaaactataagcttttccgggaaaacaactaccttacccatccatctttgtatctccggcgcctagtacagtgcccagtgcctcgcaggcgttcaattaatgattgtagaagaaatggagaatgaatgaccttagttaagcaaagaatatatcaaactcaaaaatgtctgtttaaaaacctaagaccccagaaatcggctgcatgagttgggttaaagcattaaataggaccggaatgctggtaggtagagaaatctccacttgacttcttcaagtacatcctgaaaagtaccaacatcagtgtttcgatgcaacattgtccacatgcaggagtaaagacaacacttctcgtggtctcttcctaccacgagatcctgaaacccactccccaccccaaatccgggaaatctcactttggggatcccaggaccccaagttccctagatgaggctctcaccttcccattcgtgggaggctcctggatgtagatgttgctcatcttggtcagtacaaaggactctgctccttacgggggatgagagcggccggccggccactaaagctgtccgcctacgagtacactcttccttaagtccagtggtgcaggaaagcttcagtttgtcaatatcacgcaagacagggacaccaaacactacccctgcccaaaggagcccctcacggacgccgccatgttgttaccggacccgagcaccgctaaccctgagaagggttattccaatgtactccagggaacgagaaaagtccgtaaagttaccatagcttaatgttatttatgttatttgtattacaatattagaagggacacttcataagtgttggcggtgtttacactactctcgtgtgcagatcaaactaactccccctccaaaactatcagtaatggttcggaccatgtgtcttctgcaatatgactcgtccggaaactgcatccgcatctactggttctgccgtcgctagaggcgtacaggcccttcccgaccgtagcgagggtgctgctgcgctgggggaaggaaaacgccgctttgactgtgccttgttctcacagctggcgggaagcaagcgccttttcgaaagccagaggctcgagttacccctcttaccaccgtcatggcagtcccaggtaaggagcaattacagggcctctgcgtccgagctccgaagggagcgcaagggagggtagggtagggtgcggcgtgtacggagcagcgcccatggggatttaggcggaggccttaaaattcacaggtttgttttgtttacatgaaaaagtttacactccaaacataaactctgaaggaaagaaaataactatcttccccccaggagccaagccccagctgcttgggattacagggaaagtgtattgtggaagggagggaggagggagagactgtaactgtaggcctaagggggcaagcggccgagaaaaactaccttaactgtggtatggcttaaaactaaaacttgaagtgggaacacttggccgacccaggtaaccggaggcatcgtttgtcttagaagtcgctaggacccaccgggtgtgcgggttctactcctagctcttcctgttgtatgtagctgctccgtggccatagattggtcgctttgtgcttctgggcctcagtttccttataaaaagaaggagctttgttgaattatatataagatttcttctaactctcaaattctatgtccagaagttactgacctaaaaacggtgaactctgcagaataattacttaaaagattttctcgtcctcaactaccagcttacttggaagttctagtagcggaaagcatctcctcaaaccagctttgccactgcagaacactgattgcaggagacattttcagaaatacacacttctccaccccacctcccaacttggaaattcccagcgcactttagtaatagaaaagattctattctattagaatagaatactatgaattgctatagaattactatgaactatagaattactatggttcagaaccctaactttgtttaaacctgcacttcccagtattatttgaccaggttctttattctgtggcagcctttttgaacctccttctacagatagctgttattggaacactgtgcttttgtactaactgaagtttgcggaggagtacatctggagctgtgagagaggaaatgtacactctttattaagcctactgtgtgccaggcactggtactgggcattggaaatacagtggtgagcaaggtagacatggttacgcttcacacagaacttagaatttagcagtgaagagagagaaatttacagaaagtgggacaagtgccatggcaaggaaaatacaagaccttagcacaaagtaagggcaccaaacacatacaggatgggcagaaggactttccaaaggaggtagcacttaggaggagatctgaattgtaggaggggtggcttgaagggagaggagactgcagtcggaggaactggatacgtaaaggaagaggaaatatgtgaaaagaggaaatgaaagatgttttctatggatggaactcaaatacagatgggagataagtgagaaattaagtacagaggtagtagctgtagctaatattgactaatatttatgtgtcaaatatgtcagaatgaaagatgttttctgtggatagaactcaaatacaaatgggaggtaagtgagaaattaagtagatagtaactgtagctaa

SEQ ID NO: 317846 - DNA, 4001 bp, Homo sapiens
ggagctcctttcccagctcatttgacacttggcccccacccaaaaggatttttgggtattttctttgaatttggtctgcaaggcaaggggtagggacaagcaagttaatttaggtgtctgtgaaggaaggcagtggggtcagctcagttccagtggatttctgaattcccctaatttcagcctgacagtgtagcccctagacggggatggggggtgctgggtaggggtgtgcactgctttcgcagacactgtgaaggcctttgcgccggtgggggccagctggtggagggcacttgcccagactgagaataaagtgcgtcctgtttctgggggaggggaagaggggccaatggtctgtggcaaatatttggtagccgctttgccaagggctcccttcctggccaagagcatattgatgaggaggcagcggtgctggcctcaagtggttaattgggaaggcggaggagcaagaaactaagtgttctctcactctgccccagtttttccaacattccccacatccccaccaagcagggctccagccatgtggcacattaaccccagcagagcactttctgcagtactgctccgtattggggacccacaaggagtacagtcggtgagggaagctcgtggagcgttctcaaaataaaatctctaggagccaaaaacttgcggtccacttgtctctgactggaacaaggctctgaaggagactcaggatttaagatagtgtttgcattagtcctctatccagtgacaggaaggcagcacgcctcacagtttgggtgtgagtgtgttttaagtgatttcagtctaggttttctgagttggcacaagggaaccctttaacccttgatggccctagcagagtgggtggcccatggtacaaatagggagactgctcatttgaatcctagcaagggtgaacttggaggcgctgttccggagcgggacagtgaccccccttcccgactgtcttccagagtgtctcgccagcgtcctaaggactctctgggcaattacaaaggcttttccagggccttgacaaagtcggagagaaatgtttgttagcccgacccaggcccaggctgtgccctggcattgggttgacagcagtgcgcaccccctcaaggtgaggagcgagaactcacataaccatcttctcctcgcagtgcgggtactttggcttcatttccagcttcttcacgtcgctgtagcggatcttgggtcccttccgggagcacttgcatttggaccctgcgagcgagcgcggggcaacggcttagttgctaggcggtctcctgcccctcgaccaccttggtgcccacccagaccaccccccgcgggatcccaggatgcctagaaattggcgcttgggttccccaggacaggacaagacgagacggcgacaaggggagctccccgcactcaccgtccacacgcgcggtgtacagcgccagcagcagcaggagcagcgcggccgccaggagcctcatgctgaccggaggggcgcggcgtgggagcagggacatggggagggcgctggcccgtcggagcggcggcccggagacgccacccagctctgctcggctttctctgcccggggcgcgccttccggctctgctggctccggctgcgccgtcggtggatgcccagggctgtctgtggccgtgcgctgcgctctgcgcttgtctccgcgctctctccacagcctccctccgcccgccctggcctcttttaaatccgctcctgccctcgcagcgagcgagctcattaatatgcagaaccactcggtgactcactgagatttctcaatgtggtgaggggaggagaccttcccagcccgcccgtcgcccgccccgggaaaggacccgctatcgcagcggcgcacacccggagccacgcgcgcacacgcacacacacatccgctaccctctcgctcacacaacacgccgccttcgcacacttgcacacccataccacagcgcgcacacatttccagcgtcccgctctgcctttggggagcccagacggtggagaggctgctgaagggcactgcttttctgaatcgtgtggttctctctctggcccggcaggccagcttttccgagccggcgggagacccaggcccagggctcagatcctcaaagacctgaaagggttttggagcaggtgccaagtgtgagtgcctgcaggcctgacccccaagggcccctgctgggccagaacacaaggccagttctggacaggggcttgtcatagactgtccagcagcaaagtcattgactgtgatcactggaactgactcaaagagggtatgtgtgtgtatgcgggggtggggacgggtattggggaggagttttggtgactcccaaaggaaagctccttaaagtgggtcagtggcctggtggctgtgtgagtgtctgggtggtggggagaaccaggaggagtcctcactctcacactactctccaaagccaggtagagagccctagtggagagcgatgacagtggtaaccatctggatgaaggccttcccatgttctagacattgtgccagaatgcgaggtatagtggtgtgagcccagccatagtggcagaaattccctcctcactactttccagcacaagtgactttaccgctctcagcttttgtttcatcatctgtaaagtgcagatcatcacagtgtttctgatagggtggctgtgagaactatagaaatcatacatgttgtcagtacccaggaaatgttacttattggcaccatcgttttatgtctaatttatctattactttgattcttaccaattggtacttttcttccaagttggtacttttaatttctttatttgacaggtgtggaaacatgctctgagagaagaaataacttgtccaaggtcacagagctaggaagcaggtgactaggccaggagggtcctcagtatatacggctgcagaactgggactcctgtccctggaccactctgttgctttgaggcctgtctgcccttcacttcttgctgccttgagagacccagagacaggaggtggatcatctcaagctcttggagtccctgggcttggctgtcaggagagagctcacccagctctatgccatcagcctggcagttccctggaggcaaaaatgcccagagggcttctggatgatggggacagtctgctgaagggtgcaatgggaagaatctgtgtcgtctcttcccaactggagagcccttgctgcttcaagaagaagctgagccatgaaaagcaagcagcgcctatgcgtgctgttgtgcctatacctaaagcaaagccaatagctggacatttgcatttatgcatgagatgagtatgagggagtgacttttggcatttatgttagtttttaactctaaaaataattttttaaaatatagaaacaacacgtttgcccagaaaaatcagaaaacccaagcagaagaaaactaacattttcacgcaagtaaaatcttgggtgaaatcttcccaaagcatcctctttttgctttgtgtgcacatgtacacatgggatcaggctgcatgtagtctttaataacctgcttgctatacctattagcatattgtgaacatcgctccatgtggctagccttgctacaacaatagctcccttaatggtttcatctgaggccgggtagtataatggctaagaggctggtgtctggagtcaaattgcctgagtatgcatcctagggactagctgtgtgactttgggcaaataccttaactctatttggtattggtttcctcatctgtgagatggagatgataataatatgtacagcataggcagaattaaatgagatagtgcatgtaatgcttttaatgtggtccccaacacagagtaagtgtttgatatgtgctgaccattgcggttatcatgattttagctgcagagtattccgtcatacagatgtaccagaattaatttgactactccttgctggacatttggattgtt

SEQ ID NO: 317847 - DNA, 4001 bp, Homo sapiens
tcaggagggggatcaggtgaagcttaggccagtaggtcccccaagacgtctaatttaaatactcccaactgcaaaggacagacgccccccaccccgcggcctggggcagctgaggtggagccgggcgttcaaatcgcgctccaaacaagtccgcagcgaccgcgctcgcagcccccgccaggcggccccagcggaaaacttgaaagggactctgtttgccggcggccctggggcggctccggcgggggcgagggccgagcgatctcacacacgccccctccccaacgcttccaaagaaaatgcgggggtgggggggacagggcccaccacaaatccaagggctccaaacagcgcccgccgcgcgaggaaaggtgggggtcaggagtctggtccgctggtcacccccttagctccccccccatccgaaggcgcgactctcagaccacccaaagtccagggggcaaaggagggcgcggttgccaaaccttcagacccccgtcgcgggagacttcagggagcgggtctttccgaatgagtcactacagaaccccccaaatttactggtgcttccttgcagcccgaggcaccagcccaactccgcgcaccccttcagattcccgggggggaaaaaagaacaaaaagagatcttgctcccactttgggcgtttcagctcttctgacaggtcccgaaggtggccccccatttaaaaaccggggtcactcgctttccgtcgatcctacaaataaacaaagccaggcgcaccccgcgctccccgccggaaagcagcccattccgggcgaggacaacttcccccagccagaaaattaacacattcctctcgcggcggttcagcccctcactccgctccggggaagcgaaggggaggggggtcgggccgaacttcatgggtaaatttggggccagtgcagcgtggcaggcgccggggacgtacgccccccacagttccgcagctagaggaacacccccattctccctcccaggctctgcacgctgcgtggcccacgcggggctcgggagacagctcaaaagactccccaaggctgggaaaggagggagggaggggccgcggggcaccgtggtggtgggggagatactttgatggaaaaaaaaggtcaaacttcatcagcccgccgggcaccccgcgggcagcgggggcgaggagccggaggaaaaatgcagaagtagccgccgcttcttccaagtggtgggggaggctcagccacgcgtggtcgagggcgcccagagcagttaacgtcgcccctcaacacagggctgcgagcggggtctgatggggggagtgcgcgccagagatctacaagcagccgcccccgcaggctgagcgcccgcccaacgccaagaggtgaggaccccgggcgcccgctgccccagcgcccgcgaactggagtagtgggggggaggggggcggcaccccgcaaggagcgtcccagccccactccacggcgcccaagccgccgtcccagaccctaaaacccctctttttgtctgaactcagtgatctgcgaccgagcatactgcggcttagggaggcttgggtatagcagcggccaccaagcgatcaccggcgctaggtctcccaggctccggggctccgcggcttacggtgcgggcgccccccgcccctcccaaatacggacccctccttccccgtccccggctctccgcacctgaacttcgggggaacccgcgcagccaaactttccgccgacttgcagcgaactccggccccggccgcgcaccgaaccccgggggaggagagggaggtaggcggggaaggggagggggccggcctccggggggggtcgagggagggccgtggcccgacacctaccggctctccgagtcgtccaagccgccaccgccgccgtcgccgcgaggccgagggggaggggcggggcagggagctgcgctccgctctgggcaccaccgccgcggtgcgctccgctccagccgccagcagtgcccgggtccggagcccgagtcgcgccgccgcggctggcccgaggcggggaggggggggagcctgcagcacctgcccctcctccccctccccgcggcccaaattaaaaaacaacaaaaagcaactaatcacccccgagctgagcgcggctcgcgggcggagggctcagcgtgcggcgcccggactcagcaggcggcgcgcatggctgggcgcgggctgggcagggctgggacgcggggcccggcttcaggggataaggctctgccgctcttctcgctcggctcgggcgtctgctcttgccgccagtgccgcctctgctgccgccgcctctacatccccgctcaggctcagccgcctctgccgccgccgccgcgcgcccgcccgggcaggagctatgaacgctgcccgggggctgccggcaaaacccggaccggactcgccgctccctcctccccccaaccccctccacctcggctcccctccctcctcccgccgcctccctcccagcgcagctcgggccacttggacgccgcgggctctgaggccggagctgcagccgctgcgcctcgagctccccgcgccctgacgcggtccacccaggctcagctcccttgcgcgccccgtcttcgcctatttcccgcaactttacaaaaaaaaaaaaaaaaggacgacctccccgctttggtgaggcggtctgggtttagagacgcacctccggggaaatctgctatctttctgccccctctagagcggggccagaagcttcgaggaccgggagggagaatttggccgcgccccccagctcaggtgcgcggcgggccagagattcctagtcgagggtcctgggaggtagacgcgtgttccaagaccccacccttccaagagctccttaatggattcagtgggcactagggccccgggagaaaaggggcggagattcccgttcccatttctcaggtgaggaaactgatccgagaaaggatattttatctctcaggcaggcatcagcctcaactcttgagtcccggggctaaaacgactacgtacatttggtgccctgagaccatggcctacgcactcaaaacccgaaacaatgcttggaacagcagcgctcaataggtactgattgaaagacagaaggaaaactcagccttgccagagtaggcgcccagtggggacagagttgggcccgcatatcccgctttcactccatcagtggcctccatatgcccatcttaggctaattaatcctgctgctgcagatgtcttcacctcacgtacccatggtgcaagccccgggctcatataatcccaactgcatataatcccaaagtggaagttttctccaattctttgggattcgtgggggcggatttgtgcaaggccgaccttcctctgcgaggcgaagaaaacgcagtccccagacccaagcaggggagggagagggggagggcggttggggaagtcagcctagggttaaacgttacagcctgagatcgattggggcccagataacagggagttaactgtggcgatccgggcgcctgcagccacaggcgcggcctcggtgggagaagcgaaactgtctcccacctcgctgcttcctctcctctgctctgcgcagcctggctgtctccgaggctggcgcgagggcttatggagcatggatctcctggcagcagcagctggtgcccaccttccacgccttctatatgtggccttggggccttgacccagccggggtggggtggggggaggtgtcaaagggcagagctcatctggaatgtgttgcctctctgccactcctgatatccaagaccacacgaagtgacccctccccagacatcgtggacacctgctcccaaccagttccttccgaatgctgagaagtggtctcccttaactactatgccaagaaatggctcccttggggaggcgtttagtctctctcctccttgccagcagtccttttaatgcccccctccaaacaaacatcccatg

SEQ ID NO: 317848 - DNA, 4001 bp, Homo sapiens
caaagggcagccaatgccaacgaggaaccctgtgtacacaagtttctcatcccgaaagtggacactgggtgctcaaaaaatgccttctggtgacagtaacacctgaccagtcaaacaaacatgcacgcatgcacatgcatgcatacacactcttacagcattcctgcctgcagggccaaagctgcccttgccaaatacagagctgacagctgctagatattgtcatttcagggacccgttcccaaaagaactacccagctccccacctccacttccagcccactgtttgaaattctaccattagtgatagcaaatatttctacagtgtttcccattaaagctttgtttcccattaaaatgcctccatcctctgtttcttttccggtcaaatgacttgtaaagcacctgctctgcatcaaatgggaacttcttttgtatttagctcttcaagataaacacaatcattggctcctttcttgaaaaccatttctgacactggagactgggggaagggcagggcactgtatggaagtggaggtgggaggccaccaggagggccacagagagagggtctaatggtggagaaagcaaccatcaaggccttcacaggcctgcccaaagatatggacctgatttttgccctctaagatctcagggacccaggttgctggcacagcctgtatccaagagtaaggtgagacccactgccctaactgggacacagacaggaggcaggaaatgggaacacaggaaccgacagtctcctgatttgcccctcctgccagcaggcctgcctccgtctccctgcccatgctgagggcacaggcacccaggaactagcagaaaaagatccttgtcccattcttggcctagctggaaggacagctgatggctcatcagccctggtgagtgtttccactgtgctggggaaagtaggcaagcaaaggtcaaaatcagattccctgtgctggggaggcacctgggctgtcagtgtcctttccagccgggttctggatatagagggccatacttatgtggaacatgctacctgcccccatccccaagcagagagcacctcctcctcttcttttgcacataggtgggctgttctttggggtgaggggtagggctgacctgaaaagtagacgccacaacagacaggcaagcatcttcctggttcttcagagctcaagaaaaaaaccaccttttcccccaggagtcagcccactcatccccttcccccacttccaccgtgcccgcagccagcttggtgagcgatgctagtgtaggccagaaagcttccaagcgggtcagacctgctcctctctcatcaaagccctccgcccccaaacatcgacgctgcgcccctcgccccacccatcacacgttctgtgtgcccgaggcggctgccaggcgggcccaggcggctctcgctggccctgggggaggtgacggtggtcacggcggcagaggcaggggccagcgctctgcagtacctggactcgaggatgtcgccgctgccgggctcgcggccgctgcaggtgtctccggtccctgagattagcaccgcctcctcccgggctggcggctccggcccaggccgcgcacctgctgctgcggctcccccgccgccgcgccggagctccgcgatgtgcccgcgcctcccgggcagagggtccgtgccgcgggacgcacggtgggtccgagggggaaaggggccgcgtggggcctgaggccgggcctcgggctagcccgggcacagcgccgagcgccccccgcgggccgggagagggggcggcccttcgcgcatcctcacggcctcatccccgtccccggcggcatcctagtccccgtgcccggcccgaggcctgcgagggccgcttacctggctctgcggcgggtccaggggaggggcctgaggctaccgcagggccccgcgccggggcgcaggatgctctgccccgctccgctgcgccgcgctcggccccgccccggccccgctgctccgcccgccgcggctccgcccccacccagcgcccgccccttcgccgcagcggctgtcacacaaagggcaggaaatggctgcggcgagggtctctccacgctctccgctgtaccgccggcgcacccaggacctgcctctcggtttcggaggaccgctcagcccccaggcttcctgccctgggggcgggaaagggagggaaggcttcttccacggcctccatcaccgggaaccacacctgcagcaacccgaggacgagagcttcggccgcgttcggatcttattggccccacatgatttccaagtgctcttttatcaacccagtctttattgattacctatcctgttccaagtaccgtgccaggacttgggtgtgcactggtgtacaaaagacagggtcctgcccccttggagttttatcacctgccaggagaaacaggtgtaaattaacctagcaaacgtccagttacagcccaaagtgctctgaggagaaggagcagggtgaagtgacagaagatgcaactggggctaggggaaggggccttccaccaattgagcttggtcgctgatagggctccttcgcttaagaataagttcttccgctcccttccagttccctggagaagagtccctgaagctgccacctcttttacaggggcctgcctcaacttcattctggaagaattgcctaacggacaaataggtggcaggaagcactgagaggacaggtacctttctcttcaaggcttatctgccgtgtcgggctctttaaagaagcaattatctgcccagcggtggctcacacctgtaataccaaaactttgggaggccgaggagagaggattgcttgagctcaggaattggagaccatcctgggcaactcaacgaaacttcatctctactaaaaattaaaaaaaaaaaaaaatagatgggtgtggtggcatccaccttttgtcccagctactcaggaggctgaggtgggaggattgcttgagcctgggagattgaggctacagtgagctatgatcctgccgccgcactccagactgggtgacagagtgagactctgtctcaaaaaaaaaaaaaaaagaatgaaagagagagacggggggagagagagagagagaaaggaagaaagaaaaagaaagagagagaaagaagagaaggaaagaaagaagagaaagaaagagagaaaagaaaaagagaaagaaacaattctcattgaaatccagcctggtaggccttcagaccaggctgaagtcaggctgcaccaaattctaaccttgagacacctgagcaggtcacttcaccactctgctccacagaggtcaccgtatctgcaacacagggaataacagttgccctttataccttacagggtaaataatttgaaaacatttgagacattgtggagtgtatgtagatataaggagtggtttcctaaggcccacaaatttatacttaatcactcagctgttcctaataagggcaatttgtggaggagccccgttattcaagctccagcaaaggacttgtggaagcctttgctttcctttactgatctcaccttatttcccacgtgctcagaatccataattccttgtggtttgatcttaaatcgctaattccaattcaaattgctatttcggaaaaaaatgacttatatatatatatatatacacacacatacatttcttccctggttcagtgtgaaaagctgtgggggtgtttgtggaggatgggtttaaaaacagaactgaggtttcctttttaaaaaatgtttcattttccaccgtgatccttgggatttcaagttcagtgattacaaatacttaacaatgagaatcccaataaatcagattttcattctaaggggcatattattgcagatggtatagttttttggaagacgtatttctccctgttgttccttccctgtcttttcaccttcaggaacaagttgcctaaaaacagaaaagactattacatatatatttgg

SEQ ID NO: 317849 - DNA, 4001 bp, Homo sapiens
acactaaagcaaatgaccatgactacagttgagacattccatccaaagggcttccttaaagacatgtgttaaggatcatgcagaccattctctgtggccaaggtatacagggcataataaacctgtccaaggatactcttcctttgtgcctttgctcaaactgtctccactcccttatggactgtcttcttcccttctcaaatcttaccgatctatcatggcccacacgaagacatgccttttccacaaaggtctgaccagccaagccccttaatgacctttatttctctcactcccttagcactcacagtctagagtccacagtttttaactgcacgacaaactgctttatatttcactaattctttggattgctaagaatgccaaggatagtcatcttatctgagtttgacccatagcaaccagcacagagataggcacacaccaggaattacttgcttaattaatacttcatgaatgatttgttgactgcatgagccaatgaccaaaattcttaacttctggtttaaaaaaattaacaagaaagttaaaatatcatgcttctctaaggtcccatatccaaggctgccttgtcaatataagaatctgaggagagttctttagaaaatccttctgtcgtatagtttccacttcaaaccctaagaagcaggtcctcatttctctttcccatatggaagtataacagacttggagatagggggctgacctctagttctgaattcttatcttgccattcatatcttgccaaaacaaatcttaaagcatcatattttaaaagcacaaatcaaaaatagttctcggatattccttaagagttactgcatgtcttctctgagggtcagccctgcaaattctctttgatctcagccaggccttcagtgaagttagacaattctctcattcttccccagtttatttcttattccacccacataggcaactgttccaaaccctgaagtctcctgaagtttcctaaccagtccatcacctttatttcctgcagaggacctcacctcctgccttacttagaaaacagagaacatggacagactaaacacacctctgttttacctagagattaaagcctaagaaccattgctctacaatgaccaaataatgacgcaaacagaatcaaaaggtctactgatgaagtcatcactgggtctttctcaggcatctcgcaagaaggtcctatttacttccctctctcactgcctgtatctgagttgcccaaagtctatcaaaatgccacgcaaccagaatgatccctgcaagaaattctgcctgaactcaagctctgccttctcaaaacaatttctttcaagaatttgcaccctctgttgccagggcccaagtatggcttaaatggctattttttgaggtacatcacacacagcccttagcataatgcccatggctagaaagccaatatctaagctctttgcatcctgggaggcgtcccatacccactgactgaattctgaagtgtctttgtacagacaaggccatccaggggccttgacagaatctgtgaatcacaaagtgcctttaagcttcccattggctcaacagtacagagaggccacagatccatcttcttaaagtgacacacaatatataattaataaattgtttcttaaggaatggagggcatttacccaaaagagtcacacattcaggaggctccttctctatttccacggcttttttttctcagactgggatttacagacattacctcatccgcaggctttcatgatgacaggcaggtaacagttgggcaggctgccttccattgctcaattttgaacgtcagagaggtagtggctggtttaagggcacacagcaagtcagggatcctgtgtcccatgctcactgtgctgctctgtctgccctggaagcaaagcatgccctcaacatttttggatggttgcaaaatgctgaattctcacagaggaagaggcccttccttaactctacgtgttgaaatgtgagaatggccctgggcttctgcttggcttgttccctcccacttctccctacctactcaggttccacccacctctcttgtgctacttaagagcacttcccacctgaagcctttcacttcatgccctatcactcttaactttcccttccttcggccggtaaacttggggctgggtttactggtcacagagaccaacttccctcaaaaaagcaaaattcaggaaagctctggagggagaggggctggtaatagccaagggttgattacatacataagccaaattcttaatgattatgtaattaatacattataacaataaatacataaatatgctagtacttactatgtgctaagcattctgctcggcactttcatgcaccccttgggtagtaagagcatccaaagatattctagttcctcccctgcctccattcactgccaagaaggcagcagcctgccccccttctcccaccatctcactactgatgcaggggccatcccctggaccctaggcatggctttgctcctcagaatgacaggaccaaaagcctttcataaagactccagtgaggtgactgatgtctggctttgtcaattacaagtgaataattaatacttgccagtaaagaaatagactcattgttacggtggccacatggaggctacaaaaggccattttgtgacgcttttggtggacccctggggccaacagtggtccaaagaagctgcgttgagagtgtagtccaatctttaaacgtagggactgggacccgtactgttttccaggagcgcttttcccgttaattagcttgtagccgattcatcatctcattcagctttctggttgatgacagcagcagaggccactgaacatcagagagggcatgatttatcagaggggtcatgtagtgttctaccagggccttttaccggtttttgaattcatgtctacttccttctctgggccagcatctgatttgagtaaaactctccaaccccactgggttgtacatccgactcttggcctaatgcctaaagcaagtttttcctttttcattttccagcagggactgaacaaggcagccttgggtgcctacagaaccggtcagaactggccaggaaatataataaagaagcttagtgagcagagagctaatgcccccagccagaggctcagtgcgcacaactagctagaggcactgactttgtaagcaacaacactatcttcttgaggtctaataattgccttggcaaagggcagccaatgccaacgaggaaccctgtgtacacaagtttctcatcccgaaagtggacactgggtgctcaaaaaatgccttctggtgacagtaacacctgaccagtcaaacaaacatgcacgcatgcacatgcatgcatacacactcttacagcattcctgcctgcagggccaaagctgcccttgccaaatacagagctgacagctgctagatattgtcatttcagggacccgttcccaaaagaactacccagctccccacctccacttccagcccactgtttgaaattctaccattagtgatagcaaatatttctacagtgtttcccattaaagctttgtttcccattaaaatgcctccatcctctgtttcttttccggtcaaatgacttgtaaagcacctgctctgcatcaaatgggaacttcttttgtatttagctcttcaagataaacacaatcattggctcctttcttgaaaaccatttctgacactggagactgggggaagggcagggcactgtatggaagtggaggtgggaggccaccaggagggccacagagagagggtctaatggtggagaaagcaaccatcaaggccttcacaggcctgcccaaagatatggacctgatttttgccctctaagatctcagggacccaggttgctggcacagcctgtatccaagagtaaggtgagacccactgccctaactgggacacagacaggaggcaggaaa

SEQ ID NO: 317850 - DNA, 4001 bp, Homo sapiens
gagacagagtctcgctctgtcgcccaggctggagtgcagtggcgcagcctcggctcactgcaagctccacctcccgggttcacgccattctcctgcctcagcctcccgtgtagctgggattacaggcgcccgccaccacgcccggcttattttttatatttttagtagagacggggtttcaccgtgttagtcaggatggtctcgatctcctgacctcgtgatccgtccgcctcggcctcccaaagtgctgggattacaggtgtgagccaccgcaccaggccaggtctagagatctttgatctacaatcaacaaatagtatgggactcctttcagcgaatccaatgccccacatgaatgtttggatgctggttctcctttaataacttccccctattaaatctcttaccagtcatttggggtttgggtttcaccctagggatacaaggtgtttgtaagtcactctgaaacctctgaagggcaaagtgttgtggacgctataatctccctgcatactgaggggggcatagctcccaaccagtcattaaatcccgtcaaatgagatactcgaaaatgagctgcccttgggtgggtcctttcataaaaaggaatttttaaaaatctgctaacatggttactccacaaagtttacatgtatcatattgtataaatctataaatatgtacaattattttttgtttaatttctaaaaatttgccaacaatggctgaaaaaggcacctggctgcctgagcccctacccttgtcggttacaagtatttcataagcagggtttgaggaatcccatcagagaagagtgttgtcacctttttgccggaatgtcacaccaacttcctcagtgttcccctcacaccaacttcctcagtgttccccctaccccaatctagccaacgtttcaatggctccccacagcacacagtgcctctcaggtgggcactcaagggtcctttcctaatcctccctaacctaattctccaaactttttttcccccaaaacagcccagcagacggtccagtcagtccccaaatcgtttttcctcatggtctccttccccaggggtcctcccctccttctctcccccctgcaacctccactgctaccgggagattagttcccacccgtcaggaccccgctcagatttcacttcctccaacaggtccgctcagatcccaatccacggctctcaacagcagccgggattcctttcccccgcaacgccttctctgaacaccccggcctccgagcgccggctttgcgttccctagttacttccagtcactagttacttccgctccgctcccacccgcgggactcgcgacctgccccctgcccccggctggcccagctcggaataggcagagcagcgcctcagaaatcgcagcccaaggcgaagaaatccagaagcctcccgcggacgtcccccgggacggggtgtggcgagccccgctccgagcccgccgactcctcgtgagacgagaaccgcagcgacgcggagaccctgtgagtccaccgccgagacgcgcggcgcggcgaccaggagccccagagtagccgcggggcgccgggagggatccagctggcggcagcagcttccctgcctccctgcccctccccaggggctgcgcgaacccctgcctgagccaggccagcccgggtgccccccagttctcagggcgctccccagggagcccggggacgcgccctgtccgtgcctgatccccgccctggtcccagctgggtcgggccaggtccgctgcacctcacctctcctctccacgaaccgactggataacggtcgggtctgaacctgaggagcccggaccagcccgcagtagacttgccgcacctgtctcagagcaagtgaggagcagccgggcgcctgacgtcacggccgctcccagcgccgcgaaccgggagtcacctgatcaccctggcaacgcgcgcggcgcggggcgaggcgaggcttgcgtcacagcacgagccccgcccccaactgctcggcctccaagcgccgccggaagcgctctcttgcagtcggcgcagtcgggaggcggggtcggtctccgacttcccaacgtgggcctcccagctgcgctggatacttaggactcccacaggcgtccccctcagattggattggttctccgagactccacccgataccccaactccgctagttcaggcgcctgggaggcaagaccagcgtccatgcggaaccctgctcagtgcgtggcatgaggggtcggctgtgggctgctgcctcctcgtgtcttgttggtccagacccaactagggttgggggcttacttcccgagctgtacctgagcggaatggggctgaggctgataactggattgctctctggctacttttccccataaaccttgcaacaagtagtcccgccagtactttagagtgtaatgagacttcattcacatcaggagggggaagggggacagaatcttctgtcctgaaggtttccttcttctgttccaacaggaagagaagttaccgaaaagctcccagagcaaggcctagaatgagcttgcaagtcctacttgcaaaaaattttttatttttcattttagaaattgattttctctccatattcctccccttgcttgctattaggttggtgcaaaagtaattgtggtttttgcattttttttttaaatggcaaaaacagcaattacttttgcaccactctaatataagtatatgcctacaacttttgttactctctaggcttcccagataagactatcagcttcgaaatgaaaatttaacatcccctggaggtctcagtgtgagagtcactgcctatttcacaccttcactatttgctgactttcatttcagttttactctcctcatccctgcactgccaagaaggtttcatatgtattgaaaccttccctctcaagagtttaggatcttagaccaagaagttagtttatagtcaacttcttgtgagcatcttttagtgtcaggcaatgggccatgggcagattgagatgtggttctcgaagatcaaacgtgtatgggtggtatgtctcacataagtacaacttgtactgtttattatgacttaatcattgtatttaagtggcactttttaattttcacacttaaagaaactcatataagtgggaaagaagacagctgtgaaaggtagagaagaaccatggctctagacagagctgtactaataggagagaagagattgaaaatgtgagcccaggtcccaaggagcacagaggcatggtcagaaggttggtaggaacaggacagaggcagccaggcctgaggtgtttggcagatctgaggagggcagggatagagggtgaggggaggagtggggccagaatgaggcttgagggattcaatggagggcgaaagtgctgggaagggaggagggattggaaagaaaggagaagtatgcagtggtttgggaaggagttgctgaaagggagggcagggtaaatagagacccaggaaagggtgctaagagcattaagagaagggaggctgagaggctacaaaaaaggactgagggggaggaagaagcaggtgggagactctggggcagcaaacatctcagaaccagtcagtaggtggtgtccttcagaggctgttggagaagagcagcattgtctgtttgcctctgaagagtgaaggtgatccatgcacaccccaaactacctctggaccatctgagggtaagagccaccctttgcagagcactaatgcagagggaagagcagaaacaggcacgtccataactacaccctgatagtactcaaggcagtcaggctttttggctggacagtttttcaggcctgtggtacatgcctccgtgcctctaatctgggcagggcaaggtgaggatggagtggaaggcaggggtaattcccttagaagggaggcaagcttctcatggcagctgggtcatatgaaggctgtgctagggaagaaaagatgc

SEQ ID NO: 317851 - DNA, 4001 bp, Homo sapiens
actgactaaggatttggaagaagtggtctgtcccagaaatccacattggcaaagaccactaggtcttcttcatgctttctctagaagactttcccattgtactcaaatactcccgaattctcaaggcaataaactttcttacagtgtcactgagggccatctcccttccaagaggggagacacagaacctggagtgggcggggcacctggctcagagaaaagtagcctcccaaagtctggctgctggggtaagaagcatggtgacaagccatttggtagctgcaagctccctcctccccaacagccagtaggtgcttttgtgtgagaagccaacctcaagactgtaaggacaatcaagtatacatctcatcaaagccattccaagaggcttatcagacatctcaaaggcattttttgtagatgcctgctttccactcccattacttctgtttgcattagttatatcttacctccttctcccccatgcccctgctttgcctgactaaggccagaaattttttcatgaagtcactttatagagcaatagcaacatttactattcgtgaagtcgcccctccataatttttaagtctttccatgtgtctggaagcttgtttctgctcttctcggtttacagagcggctctcttccttccaaacaaaaactaaaaagaaaggggaaaaggtggggggtggttggggtggagataacacccagattccttaagtgtttttaatccagttgaatttccctttggactcagctccctgctgaaactgtctgcggaccagaattccaggctcagaattaagtcaagagggaaagacagcagaaacaaataacagagtcagctctatgctatgaaaaccgctatgttgactgaggctccacggttttaacccattcatttttccccccttttttagaattcttacttaatctttttaaccagcttacaacaggcaggcaagcaccatataaaccatgctccctgcgccgggggatataaaacaagtttcttaagtcccttgggtagatacttccttaggaatgccggtgtaagacaaaagttcacattttaatgccatatgttgtcagtcaccaggaaaaagctccttatgggcacaagccaggtccccagcctttgtcacacagcaaaaataaacacccttcgaggagttaattaggcggtcagcagccacctcagtgtcctaggagggctgcccgcagaccttttacacacacacacacacacacacacacacacacacacacacacacacacacacgacacaaaaggaggcgtttgttaaatgtcacaagctgggcatctggagtcggattcgaaaggtaaatacattccgcggaagcattcctcagatgtcaggccacaaaactgctggtttccccaagcacagggtctcatttctaagattccccacagcccaaggtctgtactcaaagaagggtagcggggggcgggggggtgagagagggggagcaaaggagagaaggagatctttaaaaaaaaaatggagccagagggaagaagggtttcgaagctactcaccggctagctattgcctccgtgaagcgagcatgacttccccgcgcccggagcctccaggctacagcgcagcggatgcggcgggcctcgcttaaatagccgccggccgggagcttcggagccgcgcggccactcccggcgagagatatggttctaatcagatgctggcagctgaggactccccaggaatgtgccaggatgtttttgctgcctgggcttggtaactccccctcaacgtgtctgcagagtcttccaaacttaactgtttattaactcgcgctgcagcggcgcagaggaccccgctcccctgagctccgcgagccccaccagctgggggcgatcgcagggacccagcgacgggaggggaaatgtgttcggggagaagtcaaaagccccagaccgacgcgggcggggggcgggtgcaaataaggacaggaaagggaagctctggaggaaaggggtgggatccaccgagcttcgtttcacagatccgttccctggattgccactgcgagtgatgtggcacacggagtcatcctaaccaacccgttggggccctttgaacaaaggactgcctttactcctgacttttctgacaagggacaacggttcctgcgcagatctgcagtttctaaagttgatcgcgcgattggatttgctccccttagaagaaattagtgtctccctcattgcagatgcaaatgcgcttaagttagtgggaaatctatgtgtgcatatgtgaaacatactgtatttacctatgaaatataatcatatatatggatataaaaataatattctctctgaaatcgatatgagcaaaacatgttcacgtctatgtagcctatcaaataagttataattctgatacaatcagagattctatacaggcttcccttacagtgtatatacacctatatgtagacacataacatgactttatctgcatgaatttccatagcacttcctataactctaggaaaaacatgaactgcaagaaataaaatatttaaaaatgttaacgtagagtgctgagcggtagaaggtactccgcagcaaatcctaatgagtgttaacaagctgagaattcattttctccatattttaaaatcaagaattattgtaaaacatccacagaagctctgttgctttttggagaattctgaaattactcttgtgaaagacgtgtctcttttccctttttttaagaaaaaaatttaattgtttaaagtcagaggcagcacgtagtaaatgtgaaaatgctaaattgtatctcggatgggagggggttattgattttatcgagtaagcaacacagtggatttgcattttacctctggaaactgagggttcaaatagggctcgtgggacatcaaggatatattttgtggtccgtgcctagcctcgactgcaaagccactgtgtaatttggggtagctcaatgtgagtggcaatgtctgctctcaagtaggtcaggcttgaaacaaccgttgttcggggagactgaggggtgcagagcagcacagctggcccagaattctacttccccagcctctactatttctcatcccctgacacacctaggggtgtggaggcagggagggccatgctggcagttttcaatattcctcagaggtaatttgctattttaaaaaatgactttgtgtgaatgacaggaagtatacaaattttagtcctaggatagtattctatttataacatttatgcagagaaatgtaattctagtacattttagaacacaaggctttgtttctaaaatctagaagtccagtttcatttctattggctaggtagctggaaaaagggctgctgacttcaggcaaatagagactttgataattagaaagacatgggtgtctcttttaacctcaatatgtaatattttctagactaagaagtgctcactcaattctattttttttttttttgaaagactcttaccaagaaatactaacttatgtttgctctaccccaccaaatggaagggatttgtctaagaagccagaggaagaaaatgatttcatctgctatgagttgtagtttcaagagaagactttgatgaaaacagttcatttaagagcagtgggctcacacttacaacttaaaatagacacctcttattttgcacagaaatctgaagagtcgacagtggagaattctggtttgaactgtatttttatatctctagggcaccgatattgcttctggcagtaattcaatgtcctgctcacattaagaaaaaaaaagaaaagaaatttaactctttttatccctcgtgaaacattgtctctgtctcatctaagttgttcacttttcaacaagtctaaaatgaacatctttccctctggagaatcacgccaaagcccacccagatatttaccctgcctaaataatggtcttttcttatcaccac

SEQ ID NO: 317852 - DNA, 4001 bp, Homo sapiens
taatgtaacccatgtcctggggagtggagggccagagcaggtggctgctgcagttcctggaggcagccctgcccggggtggaaatcaaggcgctcctccccacagtggacagggacccgctgtggtggaatggaagtcagttatccttaaaagaaatcccatcaaaaaaaaaactccctttgaagtactttttttcttaaaaccaatgcaacacaaattcccccaaaaccattttccatcacagtggaatgattttctaaaaccccatgcctcttaagttctctggcatcagttagacatttttctttcccagtgccagttagttttgttgtagagagcctccgtcaccactgaaaaatattgcctactctggactgcaacatatttaaagaacggctcctattcattgtgctggtgcagagaattcccgccctatagcggaggacagcagagaaggataatgggaatcttttttttttttttttttttttttgagatggagtctcgctcgctttgtcgccaaggctggagtgctttggctcaatcttggctcactacaacttctgcctcccgggttcaagccattctcctgcctcggcctcctgaatagctgggattacaggcgcccgccaccatgcccagctaatttttctacttttagtagagatggggtttcaccatgttatccaggctagtcttgaactcctgacctcaagtgatccaccctccttggcctcccaaactgctggggttacaggcatgagccaccgcgcctggccaggaatctttattgtcaagaaaatggcgcaaatgtgccaccaaaagaagccatgtttctcaaagacttctgttcctacaagactgagtttatgacactaaggcgtgctattaagacctaaaagaacctcacgcatccatacattgaagtgacttggcttctgagacccaaggcctttgatcttctcaccagtgtccctccatatgggccgactgccactggaaaggagagtagaaacggaaacagacccgtctggacagaatccaaagtgcaaacaggaactgtgcccagagagaggaggaggtggcagaagcatgaaggctgcttagatccctatgttctaagaaagaccgctctttcctggctttaacttccttggctcagaagtttaggatttgctcaaaatcagaaaaagcaactttgggggaaaaaaaaaatctggatgtggaagaaactggcggtgaaagtcatattgagtgattaatgataaaaattatttccgctccttggttcttgagtcggtatgaaacgctggcagcctctaattaatcatcaccatgatattaacaccactgacttttcattgcttctgctactttctttctagacatctgtatcctctaagtaaatattatccgccaaaactttgttataagttgtgcaactgggttcgcccaaggcaccggagcctgcgcgcaatcgcacaggtacgcggccgcccgcggtcctcaggaagaaacgcttcgccgccgccggcaagcggggccgaagctccggcgggctcctcccgggcctgggcgcccgacctctccgcggcccgcgcccctcgggcgggcatcaaggcccggaacccgtctcagcgctcgccggggccctccccgcggagcccccgcccggcgcccccgggttcgagcccgcccccggcacccgcgcgtggagagagaggaaaagagtcagtaccggcgggcgggtgtccagctttagtctctagtttcccttcgggaggcgaagacatgacgcggcggggcttccgcggggccgaggcggcggcgcggttctcgggccgggcgggcgtgcgcgagtgagctcaggtgtgagcgccggggagcgagcgggcgggagaacgacgcgcgcgcgtggggcgccggggccgcgcgagccgggtgagtgccactgccgttaagggggcgcggccgccgcgcgccgacgtggcgcagccgagcccaccgacggcatgcgcactgacgtcaccgcggcccgcccgccctgctgggccgcgagccaagcatacggtgcgtgcgcagccggccgcgccacgtcggatgctgtggccgggggcgggggcgggggcgggggcgggggcggaggagggaggggagagaaggggtgaagaagtgagagggagaaggaaggagagggaggcggggtccccgactggctgcggggactggagttgcggaaagttaagtagggcccagctgaggatggctcctgcagcgaacgcgctcagccgggctcctggctacgcggcgacggctgggtgactgcgccccacagtgcgggccagggccggggcgtcccggcagggaggcgaccgtcccctgaggccctcagcccctgccgcggcagcgcctaatgaagcgcggaaaggagagcccagatggcagcgacgggggccgagagagcaggaatttgttaaaagacgatgcgaggggagagcctgctttccgagtgagggccagcgctggggagcagagacggtggcttctgtccctgccctcctcgttatgaaccaaaaataaaattctaagccctgcagccaacggatggaccctcccctccgcctgtggccttctaagttatcttgaaaaactagttcaggccttgatgggaagcggaagtcaaacatggcctcacaaacatccgcacggagaccctaagactaatagaggactctgataagaaacatttgcagtgtattcccggcttcatctgcatgataacaccttggtctccacaactccttcatgcaacccggacattcccttctactgagtccaggtctttagatgataactctcaaccagttgccaatcagaaaacctttaaatgtacctatgacccggacgcctccacttcacattttacctcctaaagagccaacctacatcttacgtattgattgatgtctcatgtctccctcaaatgtataaaaccaagatgtttcctggccaccctgggcacatgtcatcagaacctcctgaggttgtgtcaatgcacgtccttaaccttggcaaaataaacttcctaaattgagaccactctcagaaacttttggttttcaccatcatcttcctgttgccgtggctgacccctggctctcgtgccttggatcgtgttcttcccgcctgccccagtgttttgcaactgctgttaacttccgcaatgccttgctggattcgcattcagacaggcctaatctctttagcgaaggaaacaccacccctcgcttggctgtacttttccctttgacaacaaaactgttcagggaggctgagctcctcatctcttgtcactccctccagtccagtttgtctggttttcatcaagttctgctgcactgccctcaaccatgggaggtccttttgtggaagtcacttataacctatgtgctgccagatccaatggtcattttctactttcattctatttgagctcttagcagcacttgatgcagctggccgtccccctcctcctttgctccggaggtgccacatcactgccttaccctccagttctctggccaccctggctgctcactctgtcagcttggcagttcgccctcttctagatttataaacatttgagtatcgcaaggctcagcattggccttcttctctatctagacttcccatagatagtcacatgcagcctgtggacgactatcatgcagatgcttacaggtgccaaatctgcaacctcatttctctatttctgctcctcccctgaactccagactcaccaccaccaccacctgcagacgcttatgggtgccacatctgcaacttaatttctctctttctgcccctccactgaactccaaactcaccaccgccaccttggcttctctatttgttgtctaactcagtgctgcgcaactctgtgcatcagggcacacatggagatgcacatagcatacattggtcttgcattccccactcca

SEQ ID NO: 317853 - DNA, 4001 bp, Homo sapiens
tacatgtgtgcatctgtgtgtgtcccacacacaacccagatgggggctgacgcacaccagtgatgaataactcgctttggccacacggatgctgctggggtgggtgggggcaggcctgtgttgagcaggatgtggggcaacaggggttgtgtggccttggcaataggccaccagagctctgcttttaggagaaaatggggtgttggtagacaacacccctccaggctggagggcaaaggaggtgttctggggtgagctgtgcttctccccaggcggggccttatcccaaagccagctccttcaccaggccaagccggccacttgcccagagctcctcccatgatctcagcccccctggggcagggctgggacaatgggtgggccgcctgcctgctgagcctgtgccggcctctcctgtgactgacctgcaggacacgagagcttgtctctcgcgtccatccctccaggcctggctgctggccagtgctgcagtaccatgccatggatgcccagccatctcatcctctcctccagaagcccccaggtcagagtccccacctggctgccctcccagtgtgcgggtgaggccagcccaagcggggtccctcagacctgccctcctctttgcctcagtttcctcaagaagaacctgttcccatctgccagcagggagaggaggcctaggaaccagatgggcaccttccctagaagaagagtattacgggggggttaaaggattccaggatggggctgtgaggaacccctcggtttcctttttccaccaccctgggccgccagccccagagcaggtggtccatcccctcccccagctcagcgggagacaacagctggggggcggggtgaggggcggcccagctcctcccccatcagggaccgagtgccccttgctgggggccggtggatctgttcaccccttcagccgtctttgggggctccctccacacttgttctccagagggcttcctcccagggatctcagctggccccttaggcagctcggtgccccccagcccagctgcctagtccccgcagtccccttcaggtaggggaggagagctcacccctgcctcctccgcgacccgcggcggtaagggagtcacttcgcggtcgccatgtggcagcaaacatccttccacctcactccagcccaggtttcggggggagggcggcccactccgagaggccccccggtgggcggggcgcccggcccccagcccgctccgctcctcccccgccctcgctttcctttgtgctgtggccgggccgggctgagccgggcaggctgcgctggctccgctagctcggtccccgccccgtccccgcccggacctcgcccgctcgaaggtggcgaaggtgcccttggccgccccgtgcacacctgtcccccgggcccggggggtagggtgggggatgggctcccgcagggccacgcggccccgggccccacatcgggaccccgcgcctccgggccgcgtccggccgccgctcccaccgcgcgccttgggccgcctccgggcgctcggggcccggcagtgccccgcctggcccgccggcccctcccccggcgcgcacaaaggcagcccctcccggccctcccggcccgctgcaccatttcggggtccccctcccttcccggcggcggggcggcggggcgggagagaaacaaaggcgcggcggcggcgcggggacaaaggggccgggggcgggggcggggggctcaccagtcggccgcgctctcctctcggatcacctcctcgtaagccgccagcagctccaggcggtggccgctgaagctgacgccggccatgcttcgggccggaccgggccgaacggacagacgcgcggacggacgggcggacggaggaggagggagggaaagagggagtcgccgccgccgcctcggagcctctgcagcgtcgcgagccgagcgagccagcggccgggggaggggagccggccggcggggggcggggggcgctggctccgcccggctcgctccctccgctcgctcggtcctagcgccgccccggcccggcccagggggaggcccgcccccccttcccggcctgccccgggcgcccctcacccaccgcccctgcgcgccgctccagggccagccccacccacgtcccgaaccctcacctgccccgtccgtaacctcggcgctagccctccttccagccccgaacccagtcccgtccccacctccccccgcccaccccccgtcccaatccggttccgccccacccattgcttcattgatctccattcctggtgcgtcccacctcatgttaaacccattttcatcccaacccagctcacacaacaccccacccctggcccgtctcctttccctgagaggtccttgcctagtctatcccatcatatccactgtcatctgcatcccaccctcaaatccaccccagttgctttcccatcccagcttcagccccatgcttagcacgtgtcccccccaacatgtgtcacggcacatcttcagtccaacccatcccagtctcatcctgatcccagttcccaattcccaaccacagccccccatctcggctccatgaccacttattccaggccattctcagcccctacccagctcattatccctccattccaggcctctcctcccctccacgcctgtgccctctcagatggggccagctaggagatcctttgcattctctctcaagcctcacgcctcccagaggagtcccaagtagagttccggaagcagcatctaaccccagactcccacggcagggctcctccaaggacgctcagggccagcctcttggcacctttatctcctaaagctctaagcacagaacgggagggggcctcagaaaagtaccccctgcaagggagtggacaccatgccagggccttccagaactccgttccttgctaggttgggaccctgaaaccgtccacagcgcttagaagccttttccaccactacaaagcctccaacctcgacctccctgagcaaacttcacctggtcccaaccgcaccgcggaggaggaggtggttctagccaggcctccgagttctgcgttgggtaattggctatgccaagagaaggagagcagggctgcctatgtggcagtgttcctggcgctttggagttgggagaaccctcttaaaactcaaaatactcacaggcccctgccttgggaagtcagtgcccactatgtctagggaccacaggccatggcaatttctccatggccaccactagagtgaggcacccaggcagggacacagccaggccctgtgccctagaccaactggccagtaggtgtggttggcctgccatggggatccctaagggagtgggtgacacatggtggggaagggaagtggggagagccatggagggacagagcttcagccatcccccacccttaggcatgaagagcctgattctggtgaggagggagaccctgcagccggggaggggcagcagatggctggccatgagcatctgtggcctcagcctcttccagcttcctttgatttgtcctagctcacagctcctcgccccccccgctcccctcaccccccagcctcctgcacactcaattttgcatccaaaaaacagaagccctaaatgcatctaagctcttccttcctcaaattcctgcctccccaccagccacctacaaactctccagccacgcccactctcacctcttgccatcaacatttttaaataaactttctattttagaacagtgttagatttacagaaaagttacaaagatagtatagagagttcccatacaccctgcactcagttttccctattttcagggaagcaagggtgttccctgctggcatgccctagagcccactcccctggtctccgcacccgtcacccttccaggttatcttcatcccctcatttctataggatgcagacagacatctgtcctctgtctcctcctccccgcattttctctggcac

SEQ ID NO: 317854 - DNA, 4001 bp, Homo sapiens
gaatcaggatggggtaggcgaccaggcatctacacatctcaccagctccaactcctggagacagacactgcccccagctgtaagcctggtgaaggcaggaacgctgactcagtcaatcagcacatcctgctctctgggtcctggggtccagcacaccgcataccagaagtatgtgtgatattgacaccaactcaaaagccatctagccagataaactgaactagcgtgaggtgggagctggaatgtggcagttccagagaccctggggtgagctgggatggggggtgagctggggtggagggtgagctggagtcgggggctgagggcaggtggaccccgcaggaccatcactctcaggatggtggtgctagaaaggccttcagtatccgaggtagtgctgggcccaatcccttttctttccaagaggaccaggaacttgtgtatgatcacagtgagtcatatcacaaccaggacaacagtggcccttcccaccacacaacctcatttcctgggtcccctgctccctgtgccagagtagtggtgcacttcagaggccctgccacctaggagtgaactcccccaaccacccctccccattggaggcaaggtaagggtcggggggcagacagcaatttacccaagacacccctccctctggacctatgtgcagggtctgcctctgagtcttcagacctcactgcacccctggttccatgctgggccctggggtattcatattctcttgtgtagaaagtgatcctcacacccctttttcaaaatgttatctgggcccttagtgaacgaatgtgtgcatgtgcgagggtacatgtgtgcatctgtgtgtgtcccacacacaacccagatgggggctgacgcacaccagtgatgaataactcgctttggccacacggatgctgctggggtgggtgggggcaggcctgtgttgagcaggatgtggggcaacaggggttgtgtggccttggcaataggccaccagagctctgcttttaggagaaaatggggtgttggtagacaacacccctccaggctggagggcaaaggaggtgttctggggtgagctgtgcttctccccaggcggggccttatcccaaagccagctccttcaccaggccaagccggccacttgcccagagctcctcccatgatctcagcccccctggggcagggctgggacaatgggtgggccgcctgcctgctgagcctgtgccggcctctcctgtgactgacctgcaggacacgagagcttgtctctcgcgtccatccctccaggcctggctgctggccagtgctgcagtaccatgccatggatgcccagccatctcatcctctcctccagaagcccccaggtcagagtccccacctggctgccctcccagtgtgcgggtgaggccagcccaagcggggtccctcagacctgccctcctctttgcctcagtttcctcaagaagaacctgttcccatctgccagcagggagaggaggcctaggaaccagatgggcaccttccctagaagaagagtattacgggggggttaaaggattccaggatggggctgtgaggaacccctcggtttcctttttccaccaccctgggccgccagccccagagcaggtggtccatcccctcccccagctcagcgggagacaacagctggggggcggggtgaggggcggcccagctcctcccccatcagggaccgagtgccccttgctgggggccggtggatctgttcaccccttcagccgtctttgggggctccctccacacttgttctccagagggcttcctcccagggatctcagctggccccttaggcagctcggtgccccccagcccagctgcctagtccccgcagtccccttcaggtaggggaggagagctcacccctgcctcctccgcgacccgcggcggtaagggagtcacttcgcggtcgccatgtggcagcaaacatccttccacctcactccagcccaggtttcggggggagggcggcccactccgagaggccccccggtgggcggggcgcccggcccccagcccgctccgctcctcccccgccctcgctttcctttgtgctgtggccgggccgggctgagccgggcaggctgcgctggctccgctagctcggtccccgccccgtccccgcccggacctcgcccgctcgaaggtggcgaaggtgcccttggccgccccgtgcacacctgtcccccgggcccggggggtagggtgggggatgggctcccgcagggccacgcggccccgggccccacatcgggaccccgcgcctccgggccgcgtccggccgccgctcccaccgcgcgccttgggccgcctccgggcgctcggggcccggcagtgccccgcctggcccgccggcccctcccccggcgcgcacaaaggcagcccctcccggccctcccggcccgctgcaccatttcggggtccccctcccttcccggcggcggggcggcggggcgggagagaaacaaaggcgcggcggcggcgcggggacaaaggggccgggggcgggggcggggggctcaccagtcggccgcgctctcctctcggatcacctcctcgtaagccgccagcagctccaggcggtggccgctgaagctgacgccggccatgcttcgggccggaccgggccgaacggacagacgcgcggacggacgggcggacggaggaggagggagggaaagagggagtcgccgccgccgcctcggagcctctgcagcgtcgcgagccgagcgagccagcggccgggggaggggagccggccggcggggggcggggggcgctggctccgcccggctcgctccctccgctcgctcggtcctagcgccgccccggcccggcccagggggaggcccgcccccccttcccggcctgccccgggcgcccctcacccaccgcccctgcgcgccgctccagggccagccccacccacgtcccgaaccctcacctgccccgtccgtaacctcggcgctagccctccttccagccccgaacccagtcccgtccccacctccccccgcccaccccccgtcccaatccggttccgccccacccattgcttcattgatctccattcctggtgcgtcccacctcatgttaaacccattttcatcccaacccagctcacacaacaccccacccctggcccgtctcctttccctgagaggtccttgcctagtctatcccatcatatccactgtcatctgcatcccaccctcaaatccaccccagttgctttcccatcccagcttcagccccatgcttagcacgtgtcccccccaacatgtgtcacggcacatcttcagtccaacccatcccagtctcatcctgatcccagttcccaattcccaaccacagccccccatctcggctccatgaccacttattccaggccattctcagcccctacccagctcattatccctccattccaggcctctcctcccctccacgcctgtgccctctcagatggggccagctaggagatcctttgcattctctctcaagcctcacgcctcccagaggagtcccaagtagagttccggaagcagcatctaaccccagactcccacggcagggctcctccaaggacgctcagggccagcctcttggcacctttatctcctaaagctctaagcacagaacgggagggggcctcagaaaagtaccccctgcaagggagtggacaccatgccagggccttccagaactccgttccttgctaggttgggaccctgaaaccgtccacagcgcttagaagccttttccaccactacaaagcctccaacctcgacctccctgagcaaacttcacctggtcccaaccgcaccgcggaggaggaggtggttctagccaggcctccgagttctgcgttgggtaattggctatgccaagagaaggagagcagggctgcctatgtggcagtgttcctggcgctttggagttgggagaaccctcttaaa

SEQ ID NO: 317855 - DNA, 4001 bp, Homo sapiens
cagccagagggtctgtgctgtccctgctgaggcctacaggaggcagagacattcacctccacttcctgtctgcccatggcttcgcggccttctcaccccagctggccaactggcttcccaccactatgggcctcgcactgcccatgccgggcctgaggggcctggctcagactttagtatccaaggggactgctgccttgaccaccagagcccccccgtctgtgcatctgtcctctgttcagctctggaaaggccaccgggaacacaagagccaacaacccatggcctttgtctgcaaggaacttgaggtctcaccgggcagacaggcacggagtgagtgctccaccatgggcctcccttcctccaggttgcatccaggactatgctgtctagcgtgtctgctgtgacttcctcatggcagagccccacactgtggctgtttatggagcatttgcaagtctccctcgaggggagcccgtgtctctcacggacagcttggcaagattcacattcttggaaaagcagaggaatgcgagggttaaaataccttaaagggcaaggagatgatttctagatttccagacaatgtctcagagaattgtagtgctctggggtatgcctgaatgtaactaatgtagctccttttgtgcctgagtgtagactgggtccatgtgcctacatgcattcagttcctcccaccaaactggacagtgatagctaaccctgttgacccttatgtctgggtgccttaaatttgtgatgcctcaaactgaccttcacaatgactctaaggaggtaagtactgtgaactttcccgttttctacaagaagaaactgtggcacggagagattcagttacttgtccaggatcacagaactatagtaagtgggggtggggacaagaattctaacccaggcagcagtctgaccagagggccctagctgggagcagcgttcatgtgcactgtatgttcgtgtttagtgtatgtctgtgcatacttgcgtgtgtgcacacgcacacatgttcactcaggcacgtgggctgccctgcggtgggagctgagagaatgcagtggaggttgttgggaggaactcacccgcctgctctggctgtctgagcaggtgagggatagtgatatcaagtgcgaagaccaggccctgaagccagcctgacggttccagctgttaggagaaagtgaaggtgggtgccatggatctgatgatttcagtgattttctactcaagaaaaatgaagtctcggatgggcagagcttaactgccttaaaaacttggtacagggcaaggtgtgagtttcccggtgagactgtgtgaactgtgaacgggtagagtctgaaactacaaaccagatgtttccgggctccctcccgcctggtctggcctgtcttccttctgctgctatgcagttcatcctgggtccctgagggcctcgcagatgcttcactcgaaagattggagttgcagagtcccctgtggaggaattgaactgccccctctcgcaggaccccagctggcaaggttttgttcctccctggagggtagagaccctcactgaggccctggagaggggcactcaggggcagcagctcattcccaaagttctctggtggagctggggagtggcaccctgggaactctggggtttccccaccagctcctctctccagtctttggtgtccaggtacagtctccaggccgtggcttctcgagttctgtatgtgggttgctgctccgtaatgcatagttgggggaccattttggtcagtgacagatcactgctgcttttcatcagaccaaaatacatgtggcttcttctccttgccagccctaccagggcatctcccattatactaaccctgcctattggaccttctgatgcaaggagcagattaaaatcccctccctgttgcctaccaggtccgtggctacaactaaatccctagttggggaatcacagagcacaggtaagcccttgggttctggagccagcttactggggtgtgagtcttccttagctccgtgtggatggtgagccctcctctctcaggtctcatgatagtagctaacccttattaagtgtgtgctgggcactgattgaatgctttacaggtgtcaccttctaagaccctcgtaactctagcaggtagtactattatcttacccattttccagcgggagaaatagaggcaagagcagactaaatcacttgcccaaatcgcatagctactgatggtgtgatgttgggcaagatatgtaacctttccaagtctcagtttccttatctgttaagtgcagttaatacacacagcacctagcagagtgctaagcacatggtaggcactcaacaggcaaggccacttaacaagagaatgtgagcccagctggaggagagagaaaaatacaatgactatagcactaatcatagtagtgatcaaataagtaatgcactcctgaatgcttgactttcctgagtgcaaggtaaactccctgagggagtttgccttattcacttctggttcagttccgtggctttgcacagatctggcacaaggtgggtgcttggtgaaggtttgctgaatgaatgaggaactgctttgggggtcccaaggggtcattcacagcatcagagagccccttcctagcagccctgctctccctgccttgtggctgtgatctgagtgtttttgcttcatccctattggagaggaagcttcccacaccagggcaagcctgggtcttgcccacctctgttttcctgatggagaagatgctcagggcctgtgagtgaagttggacctccttgtagcttgccctgggtgcaaaacgatcatccttttgggcagaaaacagaaattgttgacagctacagacccagagattcgagtcagccaggggaacagggctgtgcccttggtgcctcagattccctggagagtggggtctgggatcatggtgaccatgtagatccctccctgcatcacactagtgaacgttgtttctaaaccacactctccccttctcagcatggcgtggcaaatagctgctgcccttgttcaccgagaaaatcctcctgcccttggcgtacctggctcctaacgagtcccttatttggaaggaattcccccacccccattggtgtgtgactcaccctgagcgaaataactgctgggctgagttcttacacaaacccccaccccatcccctcattccctaaagaccttgccctcaagtcaaccaaggccttgatccagaagtgacagagaatgcggagtgtgaggatgaggatgataagggggacaatgaatttccaggcaggcccagctcccagctcccatcctcaggaaaccctgagccctgcctgcatcctttccagaaatgtgagtcccacctttccaatttcctcttacacctcgtctatatttcccacccccacgtctgcatgacagcgtggcgtgcatgtggcccatctggggatcagggaatcctattgggtatgccagcttaatgaaatacttgcagtttattacactcaggctttcctaagccccgcgtgcctgtgggtatttgaaagctgaaggtaaccccaagctaccacaaatgtaattgttacatgtgtccacgcattcctggtgcaacctcaaactcctgctcttaagcagcacacaaaatgaaccacataaagtaactcctagtcagacaacagggagaaatgtgtggaaatgctgagagaggctccccagaacccctcagggcctctaaaagtatatgatgttcccattacattgcatagctctggccacagagggtgcttctcccccctgggctgtttgttcggtgtttgcagaattggttcattatgagcaaggcagccagtgggttttgcttgtcaaccttgcatgatgcagctcaagtatttcaaatcctgtttcatctagcaaaggcttgctctagtggcagggctagcagagtgcactgtctggggg

SEQ ID NO: 317856 - DNA, 4001 bp, Homo sapiens
cagtttctttttcctttttttttttttatttgggacaagaaactaaatgccttttcagtggttcatttgaatctaccatacttcaaaaattataaatctaccatcaccaaagaagtacagcgccatttgtattagttgcaaaattaggctatttacttttctgtatgtacttttgtgaggtttaaaacgttaggcttattacttctccttggtatgagagaaaaagcacaggcactggaaagaaaaaggaataggtgtgaaatcttgattttgtgaattaggatgaatgtgaccttatgtaaattacaaagttcctgaatctgtttgcgcagatgaaaatggaaatatactaactgcacctaccaaacacggctgactgaggattaaataaaacaatacatgtaaaggtagtgcctggtgcacagtagaaactccaggccgggcgcgatggctcacgcctgtaatcccagcactttgggaggccgaggcgggtggatcacgaggtcagaagttcgagaccagcacggccaagatggtgaaatcccgtctctactaaaaatacaaaaattagccgggtgtggtggcgggtgcctgtaatcccagctgctagggaggctgaggcagagactcgtttgaatccggaaggcagaggttgcagtgagccaagaccgcaccactgcacaccagcctgggcaaaagaaagaggctccgtctcaaaaaataaaaacaaaaaaacaaacaaacaaaaaaaaccccaaaaaactccacaaacaccagttctttactttccattaaaaaaaactgcatgaaggagatacaactactaaaagcctgccttttaaaacataaacacagtaactgtgaacgaaaaggtgttatcacttgtaatcacaatccacacacacttggcgacaactccgggtatcactgcactccaaattttaccttcggaaaataagcatttttaagtatcctacacgtgtttggctatctgaaatcagagttgacaagggggaagaatgcagaaaatttctcatctgaagtatacaccctgagttaaaaccccgcggttgagaatttcctttaaaataggattattaaggataaaaagaaaagcagcgctacactttttccctctctcccccaaagacaagtccagggatgagaaaaaaaaagtaattccttacaggaatttacagagaacgccacggacaaataacacgcaggcgtcagaataagtccgaaaatttgctccttgcgcaggtccgcgtacctgggatcctaagccttaaattactaccctgggggtcttccttcagaatcggggaatgagacacagggaggagggggtgcacggcgtggaaaagtcacagaggcagaaaaaacaatgggagagggaggcggcggcggcggcaaaacgctaagacccaggctccggcgaagcggctacgcctgcgggaaagcaaaatagttgagtaacttaaaaaatgaggaaattccgggtgttctgcggggaaggacggagggccttgagaaacagggaggctgcggcggaaagaggggcggtgtcgtcggagagcagggtcgacgatggaaagcgagcagcggcgggagcggaaagcgaggacatggacgtgggcggggaagaagacccagaggcctctgggggtccgcgaaactgagaaaacccgacgggggcgaaagggggtcgggtagcgcggtacctgcagagatcgtccaggacgctgccgggaatctccacccgtttggtctccatgatgaggacccacagcaggaacagtgcatcccggctccgcgcggccggggactgacggtacggcactaggactccggctcgccggagagctggcagccgaggaagccgcggcagagacgactccaacggagacgagaaggggaaggggcgggacccgctcacttccgtcccgctccctcagccttggaccccaagactgggccaaggctcggggcggagcccccggagtcacgcccctgctcgcttgaaaggcccaatgggaagctgaagaattgggactctaagcactctaagccaatgagacgtttgtttattggtctgctacttccaatccgtcttcaagctgctcagttgctactcagaaaaccaacttcccgccgcctttgaggtggctacacgcatgcgcaccatgcctcctgcgcgcttctgggaagttcagaggggtcggggcttaggtgtagaccccggacacatatccgggactttggcatgttgtgcaggacctcgcggtgactgagctctttcctctgcagggccgaccctgagaatccgtacaacacaagagtatgctcgcgattcctgtcaccaagtatcttgcacttatcgcagcccccaccaactccaggccaagagctgtgcctctttcactacaaacccttggagagggtatccattttggaggtggctctcctctgtgcttccttaggcacctggttccaaacatgaagacaaggactttatctcagtatctggcacctagcaaaatcttagaaaatactgatttaagctgaactctgatctgtattccaccctctgcacaaagcaatccccacctgctcgtccttattcattcctcgtcttgcttaatggagaccaatccatttgggatctttggagaaactagatccatctgttctttttcctcttacatcagacccacaggcccacacacacctgctccgtcacaagtttagtctgttctaccatttaatctcccatcttttgtctaaatttgtcacatgccactgtgtacttcagttttgcatcatttctccatactacagtgagagctgcctaaccactgactctgcctccattcttggcctgtgcaactgcctacattttgttttgttttactcagataggaacaagttatcttttcagtttctgctgtatgatcaagcccaagttcctttggcataagaggcccgtcaccatctattttgctcccgttttccatcttttttttcccctctttcttggagaattcctcaaatttatcttcctgacaactacagagtttttacttatttagagttctgttttgttcttcaaatgcccctttcttgtggtgtcacattcttgctttgtatattttattttatccttctgaggatattaataatagattttgacgttttcttctccctgagtagtcttattcctctcagctgctttttgctattatcttgatctcatctatcctattagaagcctctgtagtccttgactattcactcacacttaagagtaaggccttaacctggagtcaagtgccttgaaagctaattggaagctctcaccttgtagatggtacttgtttcctgagagcttcactgtaggatgatctggctgagctgttggttggaaacacatggtatcagtatctgtacgtaattctttctgctgatgaaattccctaaagagaaaatgcttccaggcacagcttcatgtattctgggagtccagtacagaagcacaggctgcagtattccatttgctttattcagtactcccagcacagtccaagtcttattttagatttcctaagaagcaggcactgagacaagattttgagtgcagatagcctgtgagggaggtgatcttgggaaacattggtaggagagcaggaaagtgagtcaaggaggggaggaaagccaaaaggtttattatcaaggaaattagcactgtggttaactggagcttactgtcactggagaactctggtggccagtataaaacatatacctcagagttatcccactcaaggggtgagggagatggggatttatataccaacttccttcattggttgaaggcagctcctggggtctgcactctagcctgctacatgggcagcaagatgggctctggtggccagaaaaagtcctacggcaaagaaatgcagatactagcagttggacctccagccagtgtagtggat

SEQ ID NO: 317857 - DNA, 4001 bp, Homo sapiens
ctttaatgtaggtcctatttgacaattatagaactctagtcacctgcaaatgaaaagacaatcactggaacataaatactatgatagaaactggcttttttcatcatctgctataaacaggtcaatttgaaaagattaataaagttgttgctcaaataatctccaggaacataaaatacaatattgctaactaacctctgcactgactcatcaaaaaaggcaaaatacaagtcattcctttttgccccctttccaaattctgcttgtccgttcatgtgcagctccagacccagattctccattagaacttcactgcctgccccagccctcagagcttcatctttccctaaactctaatggcctccatatcacaggtacacatcaggctgtaaaagatgctgtcacagactggatgtcctaattgaagagagtcttagagacagatcatggagactgagcactctattcaccacaggagaatatgatccaataaattctggaggtggagctggaatagggaatcatcaaggagatacacataaggaaagtgctaatggagatgagaagaaaaatcgatgccatatttttaatatatacgatttttcttgtattatttaattgcttttcttgactattcctattatgaaaagtatcttcaataaaataagttattaataacacataaaatggcttatagtatgtgttttcatatgcatttattttaacagtcccgggatcttcagtaaaaaacactctgagttaggctgtttagattcaaatccaggtcctccttcccacccccaaattactggctgtgtgacttacagcgaacactctgtatctgtttctttacctgtaaaaaaaattttttaaaaaaagtatccacttaaattggtttgaagattacataaagcacatgacatatagcaagtatcgaataagcagcaactattactactatcagctttttcttcactaagactatggcttattaaacagcgcattttatgtcttactcgccttttaatccctaaagcttactgaataaacaagatgtgccaagcgctgcagaagttttggggttttgttatttggtgactttttactggccggggtcttctttttgaaaaatccaacttcggacgcccacttgtgccagggaaggacagcattgtcctctagctccataaatacactttcagcttcttacatgacatactgtattctgagcgcttttcacataactcacgccgccccaacctcttcccggctgcaggccttggcctgagtcaggaacagggcaaggcagtctgacgagggcccagtttctggacaaaagaggaacagaactttcaggatgggagaactatgaatgagaacgcctgcgcctccctccatcctcgcaataaatcctggaaaggcagtttttcgccccttaagtggcctgaactaagcacccccagacctttctccgtagtccacccaattaccaagccccatcgcagacagacacggtccctaagtcaagtttgtccaatcagaggccgctctagaaccagaagatccgctcagtcccacccgaggctgctcctcctttccaagtgacagattagaagcaaattaaatcgcaggcaaacccgagtgacggaagacataaccaatcagtaaggaaggaaaatagctccagccttccggtggcagtgactagcatgaacgccgcgccccccccaccccacatactcgctatagggcgactctgttacctcgtgagacacacattccagcgaccgcagttcgctacaatagcggcagaagtagagttgcgagagcggggcccgaaccttcttttctccctggactagatagagaacccggtccgactgcagcaaggacgccatcttggggagggaggaggcgatgacgctcccggcgcatcacgtgacccgagagccagcgtcttcctcgctgccttccctacgacttcctacgtagactttgacgttaggtttcccacctcgtccggctctgcgcccgtcgaaaaccagagcgcgcgtgcgcagctgggatccctgttttctccccaactctgggcccgtcccccagcgcttttgtgagcgtccactgcccttactgccattaggtctggactcagtgagctccttttattcttttcttccagaatggaagcctgatcttttgtcttatttacgacggcctcctctgccccacttaacaggcgagcatccaggagacaaatggaaggtctcaaagggacagggctccgtggggactgcaagacaggagtcacaccagcactgtcttctgagtcttgccaatggcctttgggaactttcacatacattatctcatttgaaacgcaggtttttgagtacatagttagcgttaggtctaagtctgtattgtggaccttcaataagtatgaaaaggagggaatgaaatcaatgaatgaacaatgttggtaggcgtctacgtttttctaatgtgtaaactaaggctcaggtctgcctcttgggtgagcagcgactacgtgagactggtattacatgggtgggaaaataatttatcaacagttttaggtaaagaaatgcagatttattagagaaggtatgaaaatacgttgaaaggttgcaatgggcagaccagccagagaggagctgacttcaaggaaacaaaggcttgctggagattttatccgatggttcttgggctgcagagtgctgtgcagtaccgagaactccaaggttacagggagctaacttgcatgtgtctcgtgatagctgagtgcaggaagattgtgagttatttgcacaggagggctacgtgtcctgcaccatgaagaaaggcagacttagagtgcatctgctcttcttgctatcccttggtcccactagcctgactccctttctctaactgggactccccagtatgtaaaatgaccacctagaactgcctagcagaaactggagcctctgttgcctgccaccaggtctacatttttataattgtagtagtgttgtattattacctgtctgacgttagagttggtgattgagaagaaagggaactgaatactattagcaaacatttattgagcacttattaagtgcagcacactgtgtcaaaactttacatacattgtctaatttaattcttacaacagctccaaaaagcatgtggctatcattatttctattttacagagcaggaaactgaggcacagggaagtgcagtgactcctctataaggtttcatagatggaggtagaacccttttctctctgactctagtgcttgcaggtataacccctatgtatactccctccagcatattttctaatatggtgatgttaataataccttacatttatatagaccttttcagcttatacagtgctaatctcacaatttatgtcacgctttaccaattgagcctaaaagtcattacttgttcaccaagcaatagcctggcactaatttagtttcataggtgacatctgctcctaggagagaatatattactagccaactcatttgcaattatttctttaggttaatgaattcgttggttttctggtttataaactagtctctactgagtttaaattcccttttctggactatgctgttaaaatgaagtcccagagcctgcaggtacagaaaggctggagacttgagctgaatccacataaaacagacactttttagagcactgattttaaataattaagtggccaattatcttgtccctgctacatgccaggtactggggagggaactagcgataaatgagatactttccatcctcaaaggctcagggttctagcaggatcgagtcctagttatgcacaatggtgaccagcttgataatgtagccttgtgttgctttttcactctacccagccctggactcaccctcattcacttctcaatcctggcttcctgcctgcagaatctcattttgagctctgctttctaggggga

SEQ ID NO: 317858 - DNA, 4001 bp, Homo sapiens
aggagaactcagtttaacttgtgtatatgtcttgtcaaatagtgaattttaaaatatgttatactgtagcagaaagtagactgttttctgcttagggtttattcttcttcagtcacctgttttttttttttcttcttcttccggatttaaaaaatccttctatttttctgatctttcctattccatcatcagggttttatgtgttaaaagttgtttatttaacaatctacaatttccagttgaactccatagaattctatgattaataaagagattaataaaataatccaatttgtaacattgtgataaaatatcctcctgtctaggctagctttatatgactataaaacttgaccatacttttaggttttgaaggacatttttttaaagatttctcattattgaagtaatacaggttgactgaaggcaagcataaatatttatttacatagtcagctatggccaaccaattagagatttttaaacaaattaatgggacagtcttattgtacttaaaaaactggagtctaaaatttaagttcattttattttttaaaagtctgaataattattttctttaatgtaggtcctatttgacaattatagaactctagtcacctgcaaatgaaaagacaatcactggaacataaatactatgatagaaactggcttttttcatcatctgctataaacaggtcaatttgaaaagattaataaagttgttgctcaaataatctccaggaacataaaatacaatattgctaactaacctctgcactgactcatcaaaaaaggcaaaatacaagtcattcctttttgccccctttccaaattctgcttgtccgttcatgtgcagctccagacccagattctccattagaacttcactgcctgccccagccctcagagcttcatctttccctaaactctaatggcctccatatcacaggtacacatcaggctgtaaaagatgctgtcacagactggatgtcctaattgaagagagtcttagagacagatcatggagactgagcactctattcaccacaggagaatatgatccaataaattctggaggtggagctggaatagggaatcatcaaggagatacacataaggaaagtgctaatggagatgagaagaaaaatcgatgccatatttttaatatatacgatttttcttgtattatttaattgcttttcttgactattcctattatgaaaagtatcttcaataaaataagttattaataacacataaaatggcttatagtatgtgttttcatatgcatttattttaacagtcccgggatcttcagtaaaaaacactctgagttaggctgtttagattcaaatccaggtcctccttcccacccccaaattactggctgtgtgacttacagcgaacactctgtatctgtttctttacctgtaaaaaaaattttttaaaaaaagtatccacttaaattggtttgaagattacataaagcacatgacatatagcaagtatcgaataagcagcaactattactactatcagctttttcttcactaagactatggcttattaaacagcgcattttatgtcttactcgccttttaatccctaaagcttactgaataaacaagatgtgccaagcgctgcagaagttttggggttttgttatttggtgactttttactggccggggtcttctttttgaaaaatccaacttcggacgcccacttgtgccagggaaggacagcattgtcctctagctccataaatacactttcagcttcttacatgacatactgtattctgagcgcttttcacataactcacgccgccccaacctcttcccggctgcaggccttggcctgagtcaggaacagggcaaggcagtctgacgagggcccagtttctggacaaaagaggaacagaactttcaggatgggagaactatgaatgagaacgcctgcgcctccctccatcctcgcaataaatcctggaaaggcagtttttcgccccttaagtggcctgaactaagcacccccagacctttctccgtagtccacccaattaccaagccccatcgcagacagacacggtccctaagtcaagtttgtccaatcagaggccgctctagaaccagaagatccgctcagtcccacccgaggctgctcctcctttccaagtgacagattagaagcaaattaaatcgcaggcaaacccgagtgacggaagacataaccaatcagtaaggaaggaaaatagctccagccttccggtggcagtgactagcatgaacgccgcgccccccccaccccacatactcgctatagggcgactctgttacctcgtgagacacacattccagcgaccgcagttcgctacaatagcggcagaagtagagttgcgagagcggggcccgaaccttcttttctccctggactagatagagaacccggtccgactgcagcaaggacgccatcttggggagggaggaggcgatgacgctcccggcgcatcacgtgacccgagagccagcgtcttcctcgctgccttccctacgacttcctacgtagactttgacgttaggtttcccacctcgtccggctctgcgcccgtcgaaaaccagagcgcgcgtgcgcagctgggatccctgttttctccccaactctgggcccgtcccccagcgcttttgtgagcgtccactgcccttactgccattaggtctggactcagtgagctccttttattcttttcttccagaatggaagcctgatcttttgtcttatttacgacggcctcctctgccccacttaacaggcgagcatccaggagacaaatggaaggtctcaaagggacagggctccgtggggactgcaagacaggagtcacaccagcactgtcttctgagtcttgccaatggcctttgggaactttcacatacattatctcatttgaaacgcaggtttttgagtacatagttagcgttaggtctaagtctgtattgtggaccttcaataagtatgaaaaggagggaatgaaatcaatgaatgaacaatgttggtaggcgtctacgtttttctaatgtgtaaactaaggctcaggtctgcctcttgggtgagcagcgactacgtgagactggtattacatgggtgggaaaataatttatcaacagttttaggtaaagaaatgcagatttattagagaaggtatgaaaatacgttgaaaggttgcaatgggcagaccagccagagaggagctgacttcaaggaaacaaaggcttgctggagattttatccgatggttcttgggctgcagagtgctgtgcagtaccgagaactccaaggttacagggagctaacttgcatgtgtctcgtgatagctgagtgcaggaagattgtgagttatttgcacaggagggctacgtgtcctgcaccatgaagaaaggcagacttagagtgcatctgctcttcttgctatcccttggtcccactagcctgactccctttctctaactgggactccccagtatgtaaaatgaccacctagaactgcctagcagaaactggagcctctgttgcctgccaccaggtctacatttttataattgtagtagtgttgtattattacctgtctgacgttagagttggtgattgagaagaaagggaactgaatactattagcaaacatttattgagcacttattaagtgcagcacactgtgtcaaaactttacatacattgtctaatttaattcttacaacagctccaaaaagcatgtggctatcattatttctattttacagagcaggaaactgaggcacagggaagtgcagtgactcctctataaggtttcatagatggaggtagaacccttttctctctgactctagtgcttgcaggtataacccctatgtatactccctccagcatattttctaatatggtgatgttaataataccttacatttatatagaccttttcagcttatacagtgctaatctcacaat

SEQ ID NO: 317859 - DNA, 4001 bp, Homo sapiens
aatggcttgcgcctgtaatcccaacactttgagaatgtcgcctgaactcaggagttggaaaccagtctgggcaatatagtgagacttcatctctacaaaaattttaaaaaataaaaaaaaaggtaacatgttatttcttttaaaaagttccaagaaaagaaacatgataaatttatattagtattttgggtattttaatataaacttcacatatagatcaaattcaactaagacaaaagattgcatattttatatttttgtctaaaataagaacttccactaaggcaaaacttgaaatcagaaagtgtcagaactgacatacactcaaactggaaattctgaaggggaacaaaaaaatcaacttgtagagacaccatatagtaagtaacacatgcaaaaataatctattatcttttaaagtaccttctattcatctttttaaagccaatttccaagtcagaactgaagcccaaaaaacttaccccactgtcccctaaattacaatgtaactccccaaatgccattaagaaaaaagatctgaagattcatacaaactgatgttaccaactcaatcagcctagtatcatttatcctgagaaccctccttgcacaaaatcaattttcagaatttaaaatatctcccaaaacgtaattattgttttcaattttccatacaagcgtctttcactgatatcaaccacatttgcccaagtttgctttcacctgaggaagtcctaaatcattgagatttaaattaggtcattaatatttttacatctattttagcttttaattatcaaattgcctcaagctattgtatcctatacgaggcttaggttgtctcttattccccatataatagttaataacaatcacatggagataaacactgacacagactgtataatttagaactctcaccacagtgattttcaactttgataaaatccgtagcatttaataactaaactttaaatgttattaccttctcaaatatgggaacataggaagacatatgagggttgatttctgcttcccaatcttcatctcccatggtggcttcaagttctattcataaaaaaaaaaaaatgcacatttggactcaattagatcagaatcataactttaaaagcataaactcattgtttcacatacatcttgaaactacccaactaggtgctgataccccaaaagttttttccaaagaaggaattaggtctcttcttatctaaaggtggcatttatctccatcctttcttagctttagaaactagttgaacctcttacctagtcattctagcaatcgccatgtccccagcaagacttaggcttttcccaaacatctgttcatagactttatctcctccctcaaagggtccccaaacgacttactgaatattaagggagaggcaacttttttcagaaactacttaagatttctcccttcgcatgattaacatccaaggtggataggatgtttgctttggggtgtttgtggcgtgcgtgggggcggggacaggggtacgggagtcgactgggtaggggggcggcgactcggtgaagagggaggccttggattttagtggggaagggaagaagggtatggttgcccaaatcctgccgacaaaggacaaccagcttcatcaagaaggatttgtacacaaatggtactcggaccatgtctgttcagagaaaacgcagtgaagaagccaggaataaggccccttcgcctcctctgcaggcctcaagcccagactttgggcacccgtgggactctgagaccccgaggcagaaaggcttcgaaggacggcttcaaaactcctcctactccatccacactttggccaaaggtcggttactggggagcccgtacggccgagttcaggccagttcccgtagaaaagcggcccactcacctctccgcggcttgctctcccaagccctcgcaggcgcccacgcgacttaaacggctgcacgtgcaagacgcccactgcgtcaggtgcgtggctccaacaacaaatggcgtctgttgacgattggctggtgactagcgccaccagccaatcagcgctcagacgaccagtggcgtcccgcctccacttctagcctgcggattccctaaacgctagcgttcgggcccctatggcgacgctctggcctcatagccaagtggcctgttgggcctgtgggtacaaggctggctgagggcctacttgtgtccacgttctctcgtgggatccttattctggagacgctctggattttccttgtgcaagcttcgcaagctaaatatgtccacctgcctttttctaacaaaaaataataataaaaggggaaagggataatgtcctccctacttggcctctttagtgctctctccccttttacccatcacagtccatgggttggcccctcgggttctgcatttcagagactcgctccacatccggggattccaggtgcctcaaagtgcagctgaggctcatggaggaggtgcattcccttttcctcccagtaaggggggcagggatgagactccgtccagctgggaccccaggaaatcgtaaagaaagttagactcggctgggcatggtgactcacgcctgtaatcccagcactttgggaggccgaggcgggcggatcacatgaggctaggagttcgagaccagcctagccaacatggtgaaaccccgtctctactaaaattaaaaaaattagccgggtatggtggcggctgcctgtagtcccagctactcaggaggctgaggcaagagaaccgcttgaacccgggaggcagaggttgcaatgaaccgagatcatgccattgatctctacctgggcgacagagtgagacagaggaaaaaaaaaaaaaaaaaaaagcctgtaagatttcgggggtccaccactttggaaggaaacaggctctgatccagaaggagggaggaaattggtgctggcataggtcattcatcaaggcttggatttgtggcccacctgtttatattcctacgggcactagccaaagtggccaagggttattttgatacttcatgctgtcttcaatcagattttcttgttctgcccccaccccccaccccaaaagcaggtaaaatccctcagtatttccccagcccttcaaaacgcgtgaccatgggctgttttaaaagtgtagttctcagaggccgggcgcggtggcttacgtctgtctgtaatcccagcacttggggaggccgaagcgggcggatcacgaggtcaggagatgcaaccatcctggctaacacggcgaaaccccgtctctactaaaaatacaaaaaattagccgggcgtggtggcgggcgcctgtagtcccagctactccagaggttgaggcaggagaatggcgtgaacccgggagacggagcttgcagtgagccgagatcgcgcgactgcactccagcctgggcctcagaccgagactccgcctcaaaaaaaaaaaaaaaaaaaaaaagtgtagttctcatttttgttgtcgtttctgtcattttcccttctctgaatctgaagaaattcctatctcattcaggaacataaatagcaacacagtttgatactggtacataaaggataaagcacttaataggctcaggcttgcttcatactttttatctctagaaccatcaccaccaagaatttcaggattcatctagttagcaataaactttgtcagactattctcaagatgatcaaaatgaatatattttttatttatttatttatttatttttgagacaaggtctcactctgtcacccagaggggagtgcactaatgatcatagcttactgcagcctcaacctcctgtgctcaagtgatcctgccacctcagcctcccgaatagctgggactacaggcacaagccaccatgcccagctaatttttaaaaaaaattttgtagagaaagagtctccctgtgttgcccaggctggtctccaattccgggcctcaagtgagcctcctgcctcag

SEQ ID NO: 317860 - DNA, 4001 bp, Homo sapiens
gcatcactaatcgttagagaaatgcaaatcaaaaccacaatgagataccatctcacaccagtcagaatggttattattaaaaaatcaaaaaataacagatgctggcaagcttgcagagaaaagggaatgcctatacactgctggtgggagtgtaaattagttcagccattgtggaaaacagtgtggcgatttctcaaagaacgtaaaacagaactaccattcgatccagcaatcccataattaggtatatacccaaaggaatataaataattctaccataaagtcacatgtacacatatgttcaccacagcactattcacaatagcaaaaacacagaaatcaacctaaatgcccaccaacagtagactggacaaaggtaatgtggtatatatgcgccatggaatactaggcagccataaaaaagaatgacataaagtcctttgcaggaacatgaatggagctccattattctaagcaaactaatgcaggaacagaaagccaaatactgaatgttctcacttataagtgggagctaaacactgagaacacatggacacaaagaagggaacaacagacactggggcctactttagggtagaaagtgggaggaggtacaggatcaaaaaactacctatcagggactatgcttattatctgggtgacaaaataatctgtacaccaaaaccccatggcatgcaatttacctagataacaaacctacacatgaacccctgaaccaaaaacttaaaaaaataaaataaaagagtgaaaggaggggcacccactgaatactcactcaaatattaaaagcagaaaacatataccaaagtatttttcttcaaaggttttcacgatcagtgtttttcatccagctccttcaaaatcagttttaccagtttagtgtctctgtgttaagtacaaattgttccaaaatgtggtccttaccgcctctcttggaaaaccctctgttccgtgttggattatcttcgcagtcattactagactcttcaataaaaatttaacatgtaaatagcatttaattaacttaaatgatgcaatatataaagaatagcactgtcacaagataaattagtaagaagacaaaatattttcataagttaaaatataaacatatttcttcaaataattttaacagatatataaagacattactcagagtcgattccctatacaaatcatctcatgtatctaaatattaaatgtttattatatgaaattgagaacctactatttgccaagcattatactacgcaaagcaaaacaaaacaaaaaataagaatttcataaatttcagtttgaccaaaaatgatttcaggaacatctaagctattaagtaatcaagtggttctcacataaggtccatagaccactagactcttctatttataatgtcatatcttttctgtaatttactttatttttggagatggagtcaagctgtattgcccaggctggagtgcactggcacaacctctgctcactgcaacctccgcctcccgggttcaagcgattatccccacctcagcctaccgagtagctgggattacaggcatgcgccaccatgcctggctaatttttgtatttttaggagagatgcggttttgccatgttggccaggctggtcttgaattcctgaacctcaggtgattcgcccaccttggcctcccaaagtgctgggattacaggcgtgagccactacacccggccaatttaccattcttaataaactcaagacatttgtgctttcttaaatatatgcaaactttcccccattcatgctaatgaaataatttggggatatcctagcttctccatttttgatattagtaagtaacattcccagagttttaaaatagtagtatgagagattactatactgaaggctgcctgaaaactacctggagagttggttaaaaataaattcctagaccccattcccagaaatgtttattctgaaaggaatgatttttcgaaatgtaaaagttctatgttattactatgacatcaggctttccagaagattccaaaaaaagtcacatttgggaatacaaagatggtttcaagggatctttgtacatatcattaatatttaatatctgggaacattaagtcaaaataatgacagcaagtgaccaaacagcttgcaggttattagctaagttcctgtgtgaaagtcccaatccatttaacaactaataatgttctacaataaacagtgacccaaagctcttgttgcagtctcctatttcagctgcagctgacaactgacaaacaatcctgaagagccattaacaagacaactttctggaaggcaggacttaatacaatgtagaagggcaggaaagaaataagttttgaaaagttggccctggaataacaatgatgataactaatatttactgctttcgagaaaaaaaaaaaaaaaacaaaactactaatctgggacctggcaagggaaagagtctcacaatatctttggccaattatttccctaaaataaacctacagttattttgatcacagtgggaataaaaatagaaaacattaagagaagttgggtgatgggtacatgaaaaacctctgtactatttttgcaacttcttatgaataaaactatttcaaaataaaaaattactttaaaaaataagtgatctctatacagttaggaaataaagctaagcacaaacaaaaatgagataatgataccaagattagttacaacctattaattatacaaaaataacatatggcctggcgcagtggctcatgcctgtaatcctagcactgtgggaggccgaggcaggcagatcgtgaggtcaggagtttgagaccagcctggccaacgtgacgaaaccccgtctctactaaaaatacaaaaaaaaaaaaaaaaaaattagtcgggcgtgatggcgggcccctgtaatcccagctactcaggaggctgaggcaggagaatcacttgaaccctggacgcagaggttgcagtgagccaagactgtaccactgcactccaggccaggtgacagtgcgagactccgtctcgaaaaataataataacaacacataaagtatgtacctggccgtgttctaaatgtatcacatgtattaactttagtctaaagtttcacaaaaaccttgtgaagtagatatagtcatcattatacaaatagagaaaatgaaaagcagaaagttacaggctttttcaagataatacaattgccaggaggaggatctgagtctcacacctacgtgttcaaatccagtatctgagttccttatcactacaatataccagcttaagcaaagtagatgacaggggaaaaaaatttaaaaacatactatccatttgtgtccagagtaaaaagcttctaccgtgagctcagaacttgggcttgctaacaactgagacaatgaatgaattcaatccatatatatatatatatatatatatttttttttttttttttttaggggaactaaaaacgaaaaaagaagaaagtagatcaaaacaaagcaagcaggccacttcggagagaagttctctcaagtgccatgagaaactggaatttgtattcaaaagctccctggcccaccatctctacaaaggggtcaagtaggtagaaaggtctgtgtataagtagaaatgatcttgaatattaaatgagttaaaagagatcagaacagaaacacatagaaatggaaaagaataaaaatgatggtatttttcttctctcacaaatactagttctacatcatatatgttttcatttgaacgggataggagaaaaaaagagaagtagggagaaagagactggcaatagtttggagaaacagtctcatttgataattaaaatccggccttataccaaaagtgttttaaggtgatcaggtctaggcttggttttgactttgggaatcaaagtgtttaataagatcagcttcaaatatttaatgaagatagatggatgacatctgagtgt

SEQ ID NO: 317861 - DNA, 4001 bp, Homo sapiens
cctcttctcttgttccaggcagaacatgatgacgggcaacgtgaacaccagtgtcttgcctgaacccgtgaaagcgatgcctatcatgtcacggccagatagactgttgggagaggatgacccgagggccaatttcaacagaagatgaaggacacctagccattgctcctccctgttccagccctcctcaaggaccccaggtccacagtccacactcacatggtggggatgccctggatctgaatgggtgttgggtggtgaatgcctttcttcttcaggcctctcaggatggctatgaaaaccaaccgacatcgtcttcatgactcacaggtactttctcagagccccaaagcctgtaaaactggcactacccctacaagttgcagatgatgaaactgaggctcagagagagagagagagagtggaaaaaaaaaaagaaaaaaagagacttgtccaaggcccacaggctaggtgcagccaggatttgtacccagtgtctatgcccaatggcactttcctcctgaagctttgtaacagcagagaacaatgaacacgtacagctgaggcaacaaggaacctaaagaaactcctcctcaaatccctccagccccagtgactggatccaatgcagatgtggctgagctcagtgggagccaggacataacctcacaggcatttgattataaaagtgtggtatctctctccagcccctgactacctgcaggaaacttcatttccttgaagctcttgatgggtggtgggataccgtctccctccaccaggatgtggtatttcttccgcacgcgctcatgtcgctcttcagacatgctcagaacataacggggtggagtccagctgtggatgggtaacagggatcaagagagccctgggaatagctggcctgggagcatccctgcatgtaccatcctaagcaagggcaactgcagactgtacagacatacctggttttgatggggtcatcatacgtaatgcccttagccatctccttcactgacatcaatgctgaagagagagacatggctcagggctggctcctgcttctgagaagccagatcccttgagatataacatgcctggggctgggaggagaagactcagtccaccttctcactatcctggctacaaccatacctcggccctcggcaacactctccaggatcttctcttcttccttcagctgcttctccttggcagactctttgcgcgctgagaaaagaagtggaagatgtcagacagataccaaaacggtgtaccaggctcagcttcttctttctcgcccaggcagtgctgcccagcccaccttcagccttctctttaaggtgctggtgctgatccaggaggctgacgttggactgagggcctagcgggatgtcgtcctcatctccccggggttcactaccgctgtcctgctgctcttcctccgcagctcccttgcgtcttcgctgcagcagcttctggagctgaggttccacccgggatccacagataggatgggcatggagtccacaaggtcagcgtcaggatcctggctttggggcgaggatcctgtgcccgaggcgcaaagctgccctacccctcagatcaagccgtcggtccctcgtttgtctgggggccgcgccctggtgtactgaagctcactcctcagactgccctcctccccacggaggccgaggccacgcccgccccctgcgaccccgcggtcacggccccatccctccccggacgcgtgcccctcaccagtagctgccggcgctgccgtaacggcacatagggcacgtagtcctcgtcgtcctcatcttccgcctcggagcggcttcctccggcaggcacctcgtcggtgcgagcccgctgcaagcacacgccagtcaggcacggcctgctcccctcttcacgcccgctcccacacgcgcggggtctcgcctctctcctaccttccgttcgggttccgactcctccattctttgctgcacgcatgcgcgccacggcgaaaccccgcctcatccttgcgtgagacccaatccgatgtgaagaggcgaacgacggcgcgtaggaacgacctcggagttccggatcgcgcagagggacaaatttgttccggagatactatcgcacggcgaggcatggacgctttcatgggtggttacgcgacagttgccaggaccgagggcgaaaccggctgcaaggcattgtgggacattggaggacttggaatatgcgctagaaggctcaatccaagcccattggaagaggaagacgtacgcagcggagacagctgatccggagtcggggcggcctgccaggtgcccaacctctcccagagcatggcgtcttgggcacgcccctgccggcggacagtgcgtcctctagggccgggagctgcgggccgagttcgcgtgggccctgcgctttcatccctgccggggacgccggggttgcgggataaaccgctcgacacaccctgcctccctgactgcgcctgtgtgacacatacgttcactggtggggcacgcatcagatacggatggcagtggttttgaagtgggaggccctgtataaatgtaaacggttattactgtaaatgctctaacagagctgcctggggggcgcttccagggaagcgtggcaatctcaggccgggagaggagaggcgtcctgggccagggcgctgcaggaatacaggtctggcgatgtgcaagtacacagattcaccaggcaacagcattgcggcaagggtgggatggggaagccagacctaaggccagaaaaggagattgcgaccagagcatgcctgctgtgactgtcagagtaagtggtttcaactttattagagacttctaaggaatgacttggtcagctctgtgctttcttgccttcaagagtgtgtgctgggcgctggcactgcgctcaagcagatgataatcaagacacatacctggtgtgcgaggagcttatgtagattgagactagaaatatagacagataactggtcttaaagagaaagatcctaagacaaggtaccgcttttcgaagtgtcatagttttcacagtacaatggcctcttagctgggatgtgaaggatacacaggaattcatgaagtcttctttagtaaagaaagcttaggctgggcacagtggctcattcctgtaatcccagctctctgggaggccaaggcaggaggatcgcttgaagccaggagttcaagaccagcttggacaacatagcaagaccccatctctataaaaaaaataagctggtgcttactgccagtcccatggtgggtctcaacctgggagggatggaggaggacatggtttctggtcctgctcacaacacccaaatacatggcaatctcaggccgggagaggagaggcgtcctgggccagggcgctgcaggaatacaggtctggcgatgtgcaagtacacagattcactaggcaacagcattgcggcaagggtgggatggggaagccagacctaaggccagaaaaggagattgcgaccagagcatgcctgctgtgactgtcagagtaagtggtttcaactttattagagacttctaaggaatgacttggtcagctctgtgctttcttgccttcaagagtgtgtgctgggcgctggcactgcgctcaagcagatgataatcaagacacatacctggtgtgcgaggagcttatgtagattgagactagaaatatagacagataactggtcttaaagagaaagatcctaagacaaggtaccgcttttcgaagtgtcatagttttcacagtacaatggcctcttagctgggatgtgaaggatacacaggaattcatgaagtcttctttagtaaagaaagcttaggctgggcacagtggctcattcctgtaatcccagctctctgggaggccaaggcaggaggatcgcttgaagccaggagttcaagaccagcttggacaacatagcaagaccccatctctataaaaaaaataagctggtg

SEQ ID NO: 317862 - DNA, 4001 bp, Homo sapiens
aaacaaaaaaacaaccaagtaataccaatttcacctctgtaattcccttcacattatatcacctccacagagttccaaccgtcactattctatatcagacatatctacctaggagattcttaaagactgtagtcttcctgtttctattacttttccattaaatcttactcattgctgctaaggagaattctgattctattacacactttttactcaaaatcttcaaaggttcacaaacaaattctgatcttcaaaatctacaatccacccgctttctgggcccaagtcctattcaggacctacctcctactacttctcaaaaaagataaaatcccttcatgaaacctacatatgcagaaaaattgggctttttagctatttctctaacaccttgcgccttcccacctctaagcctttcatgattccctgaacaaacctagagcacaggccatgcacaccagagaggtaaaggagaaggctgacgggctagaatggaccttcttgtgaagggccttgaaggctgtcatagagtttaaatttcatcttggaagcagtagaaaccaatggagactaagtcaggggcatgccatcatcttatctctacttcagaagtgtcactctggctgtagtgtaagggatctaacaattaggagagcaacagaggaagacaatcaattcagagaatcaatttaaaacagatgtagtagtctggacaataaataattagggcctcaattaagtcagggacaaccagaatgggcaaaggatgtagaatctaacaggctgtgggtagtgagagagaagaatgagtcaaataaatatcactttcagatttctggtctggacagccttccggagatttaaaacaccgtcacaggaattttctgtagttaaagaaatattttttatcttcatccaggtgatgattacacggtttatatatttgctaaatttcatcaagctttacccttacgttttgtccatttccctgattgttaattgtacctcaacaaagaactgttagcactaacaacaaaagccttcattgttcctagacataaaatatctttcagtcattgctaaatacatagcaaatagtcatttttaacataaaaatctcaaggttcctaacaatctatcaacaatctaaagttgtgatgagatctaatgagttctaataagagctcatagtccacaacttcaaaaggacagaaaagcaggtaacaaagttacctgcttaaatacgaaatctatttgcgaagtaaatgcccacgcaacaagtatttattgtagcccagtaaaagcctagtcgtgtatagtgctgtcgatgcggtaaaaatgtctgcccacacgctcctttcaagtaacttgggaaaagatcatacgcgcacaaagaactaaaatacagaatgacaggagtcgaggaaatgttggaaacgcgaagcaataagcaatccaactgggatcacttctgactgaagtaatcagggcaggctcccttgaagtggcgggatgtggtgcccaatcactaacgtcctggagggttgttcccgctccaggggctcgaaccctctgatggtagtgcaggggaagccgtcgctggcccaaacacaaccattccctcagccgaggtcccccagcccttccaatgctcgcggggcagcgctgaccgcacgtggggccgcgccaggcctggcccggcggccacctcaactcccgcctcttctcacgaccccaagaagccgctcgcccgctagcccgctcggcgctctgcctcaccgtgactcccgacccatgctgccgaccgcgggaatactggtgcccttgagtaccacgcacaggcgaaccggacaaacaaggaggctgagctgccctcaacgcccggcaaagaccagcgctaaacactagcagcacctacagctgtggcggccatcccagcgcggccaacgaaaacaggacgtgctggcgccggcagccgaaggaagagaaaagccgaccggaagctgccgctcttccacagcgccccacctcgactggaggacgcacagcgccggccccatcgaaaggtgatgccttcgccccgcccagtcttcccggcgcccgcaccacgcccggctgattagtgcgatggagcgcagcgcgtcagcctcgccggcccgtgagggtgtttcgcgccagagccaaagaggcgtcctgggcaggctgatgtctgccttaatttgcgctaaataatgcggcaactttctccgtacacgctctttattcatgtatacattcactcatttatttatgttgtcatatgccaggcttgtgctagatcctggggagctcacagtctatccgggaaacagatgactaaagccagcacagtggctcacgcctgaaatcccagcactttgggaggctgaggcgggaggatctattgagcccaggaattcaagacctgggcaacgtagccctcgtctctgcaaagaaaatagtaataataatagacttgactaaaaacacaagcagaagtaatacagcaaggagagtccaccattggagacggattcagaaaacacgtttcccttggaagtgaactctgaggtgagatttgaagacccggtaggtgttaacctagtagagaacaaagagctaaaaatactttggcaaaagattagttctcaacattgcttgcactgggaagcttaaaaataaaacaaaaaaacaaaaaaagggccagccatggtggctcatgcctataatcccagcactttgggaggccgaggcaggaggatggcttgagcccaggaattcaagacctacctgggcaacatagcgagaccctctacaaaaaataagcaaaataattagccaggtgtgctggcacgcctgtggttctagctacttgggaggctgaggtgagaggatcatttgagccagggaggctgaggcaagaagattacttgagcccaggagtttgaggctgcagtgagctatgatgactccagcctgggtagcacagagaaatctcatctctaaaatattagtaaataaaatagaagcctgggttccacccctatgttctgatttaattggcctggagtgcttcttgtgcactgggaatttttaagcttcccaggtaattctgaagtacagtcaagattgagaacattattcgagagtttgggcaccaaaaaaatgtatatgtattgtctcatgcaacacacacagaaatgttgaattttttttgttttttttttttgagacggagtttcgcttttgttgcccaggctggagtgcaatggtgagagctcagctcaccacaacctccacctcctgggttcaagcgattctcctgcctcagcctcccaagtagctgggattacaggcatgcaccaccaccccagcttattttgtatttttagtagagatggggtttctccatgttggtcaggctggtcttgaactctcgacctcaggagacctgcccgcctcggcctcccaaagtgctgggattacaggcatgagccaccgtgcccggccatgttgagttgtttttgcaaaaagctataatggagttggagaaaggctcatatttttactttacttgcctctgtactattttactttcttacacctaaagatgatggaaaagttctgtgtcttgattttagtggtcattgaatagatttgcacatttttcaaaattcactgaactgtaccctttaactgtacatgacttattgtatgtaaattttacctcaacatagttgattaaagaaaaaaagcaaaccaacgagtgacactccaagatgagtttatgctccccacgccccccgtggcttgctgcccacctgtggtagctgcgagaagcattgaagagggatagagactggaggttctggcagtccatgccaagggtaagaaggcctgagctaattaatgagtgacaggatggacaccaaggagggttaggaatccccctgtaaattgtttggatgtgggctgcaggtagg

SEQ ID NO: 317863 - DNA, 4001 bp, Homo sapiens
tagacttatcaatattcttgaccccagatcattctggtgtctatactgtatagagtgttcgcaaagatgagtgcaatgattcttcccatcctctccacatgcacctctgtggctttgccaccctgcccatcaagaagtggagttgaatttctagaatctggatttagctgtttaacttgctttgaccaatgagatttgaagaaaaagtcacaagctgaaacttccttttagctacgttggaaccatgagaccactacgtgaagatgcctccgataacctgttagagatatctggcccaggtaacagccaggaccaagtcaagcagccatcttccatcatccagtaatagccaagtcacattatttgtggcacatgagtgacctccacaaaagaaccattgacatgagtctagcccagattactgatccaaaggatgagcaaataaaatgcttgtctttatgccaaataaaacaatgtcacagactctcccaatctccttattatttttttttttttttgagatggagtttcgctcgttgcccaggctggagtgcaatggcgcgatctcagctcactgcaacctctgcctcccaggttcaagagattctcctgcctcagcctcctgagtagctgagactataggcgcatgccaccatgcccagctaatttttgtatttttagtacagacggggttttgctgtgttggccaggctggtctcgaactcctgacctcaagcgatccatccccttaaatcatgtaaaatttcatgagtatgtgccatgtgcagttttctgtgaagaagatccttaatcttcatcagattctcaaagcgatctatgagccaaatttaaaaagtaaagacccatcagccccaactatgatttctcttccagaagctggccttctcagctctggcttgacttactggtatagtgtgtggctggctttggaaagaaaaggaaactctatttacattatctgtatcccagcatcctcacctcttccatgagtctagctgagtaagagtttggatgttagttcccatcttttcctgtgtattcattataatgcatggaactatgagagtaattcccatgttaaatgtggccagagaggtcggcagaccaaggagcaagttactgtcctcccaaattaccattacacttccacagaaagtcctctaaaaacttgccacagacattaccaaactgtcaccctttattgttccaagtcaaagcagaccaagtacacctcaataccaaagcttttctcccagaaaaaaaaaaaaaaaaaaacaggaactcagagtcggcaaagactctcctaaaacatctgtcctggccagctcttcatctggatcggtgctgacagaaacagaaacgccaggggccggaaatgcggccagcgcgatgcccctctgttctgggcaccgtttattcgaataccccgtcaggtatcatcaggtgtcactcaggaaggagacacgccctgcctggactgccgcgaacgctgagcgttacggggtacgtggtggcccctcaggttaccgaccgggtcggttagattccagaggacaaaaggcagggaacagcctggtcttggggtctttaaacagagaggcgccatctactgccgagaacccagtcaacatctcatggacaaagctgcactaacccccggccggctgagctctgggccccgttagcctttctttgaggctcgtccactaaaaggcagccccagtagtcccagctgaaatgctccacacccgagccccgctggcctgcggaagcgaagactgacaagcactctgtccgcgcgctgagtgggggctcgcggcaccgggtgctccgcccaggccccagcacactcactcaccagcctggtagctcggtacggcccgggccccacgatgcgatgctccatggcgcgtaggcagcagcggccgcagccgcgccagcgctgatccccgccagccggaggagcagcagtttgaatcccaagcccgcgggctgcgggcgctgattgggcggcgcggcagcacgtcaccggaaatgcgcggggaggcaggcgtcttctccgagacccgcggcgctgggagctccgcgtgcgaacttgcccggggcgaaatctgttgcccaccctggtcccaccgtgcgagcacacctaggcaggtgcgactaaggggccgggggcgtctccccagcgctggaaaacgctgtgcagcgcccttcccagatttctgcgtccgcgcaacacaaacacacgcaacgctatctctacaaaagggtcaataataggtgttatccagcgaccgaaacccagctttgggccgcgtggataaatacctgtcctccctaccaagtgcactgtgagcctggaggtgctgctaacgctgggagaagcggtagtgaaatgaagcgaggcgacagcttttaccagtgtagggacatttaaaaacgggatagagagcacaaggagcgtagacagtgtgttaagggcaataaagagcgggaagggagccccgattcctcttctgtttgttctcatgatagtcttttcccctttaatttgagttctatgttttgtattgggctgatacttttagtcctcggcaatagggttgtgagtccttttttgactgcttagaattttccccctgggaattgctagtccgatttgcaatctttcagagggacaaatgaagtaactccatatacttaggactctgtacacctactcaaatttggtcatctcggtaagtacccaggacaagacgttgaaggagtgaaggtgtgccattccaaaatatgcctaattggtatattgattatttcgagcggaaaacattggagaaatggtagtttcagaaagggcaagctgacctgcctcttcgatgcagcaggccacaaagatttctctgggatgggcatcctctccctaccacggtgagaaaatagcctttatcaccaaaggcttggaattgaaggctgcagtggacctgaataaacattcttaacgaagtaaccctatcttccactaggagatataggagattttttacatatatcttctagtgactccctagaaaatgttactgcctttgtgagctgtggaagttaactcgagtcacagggcaccaaaatatgttagcagctgcccatatccgagacacggccccaaagtatgttacaggcagtgaattcctacagatctgcagcaacctcaattcttgactcctcagaagaaagagttcgactgaggggcataaggcaaaaggagagaccaaggcaagtattagaacagaagtgaagtttattaaaaagctttgaatgaaaggaagtacacttggaagagggccaagccagtgacttgagagatctagtgcgtagtttgaccttttgacctggggttttatacgttggcatacttctggggtcttgcttttggggctttgcattacttctctcctgattcttcccttagagtgagctgtccacaggcgcatacttgagcccacttgcccaactcctaagatcttatcgggaagctgctgatcaacagttcaagtgttttctattaggagactgcctttccctggtgccggctgtgaccaactattattttagagagacaattaacaaccacctgaccatcacctgatggctgcctgacattcctgatgtgtgtgtgtatgagggggagccctctcctgccctgctcatgcctgactagctacctactgtaacaccttaaccagattttctttgtcatggcttttcttctcaaatttatctctctttacctaaaaaaatgaataaaagcatcttactttggccacttcttcagacttcactctcttgtgaagatccccatgtgcacataaaactaataaaatgtgtatacttttctcctggtaatcttcctggtgtcagtgtggtttctagatacaactggagagctcattaagaggtaaaagggagcttggaggtgatctctg

SEQ ID NO: 317864 - DNA, 4001 bp, Homo sapiens
atttgtgtactttgtagattgatattaaatcatacttttaaaaataggtgcttaatgttccactcaattaccttaaaacatgtttaattatgtctctatcctactcttataacacttctataaaaactttttacatatagcgtccacttttggttcagtttcttaggaaaataactttgagagtcagctatctgaaccaaagaaacattaacattaccagactatattgggatttttgagactggcttttatcaattctttagctacgggctcttgtcatcatctctaccagtgacctaagtgtcaaacccaaatgccttgtatctgtcccattaaagagatgcagcatctgctcctttcttactgtttccatttcctctgccatgcctcctcttacaaccataaatatccaggtctcttaggttttaaacggggcatctctcaacccccacattcttttccttggttattcccttccctccaacagttcaattcacctagatccccacgcctgaaattatcctagatgtcctagaggcgcctcatcattacaatggtacattattctccactcctttacatgtcacgccagctttcaaactgaaaatctgagcgttcatccctggtgcatcacctttaaattcgagatctccaaaatccagggtcatgtaaccttaaaaaatttttaccctctcttctccactgcccttgttcaggccttatctcttccagcagctgttccaaaggcctactctgttttcctttcggagtgctcacctccaccgaagcctccacccagctgccaattctgccccatgcctgataatttgctcgtgcgttgacatacataaaatttctaagacaaaaattttttaataatggtaaatgaaccttgggaactgcatacagatcatacagatccataataagagaaaaggtcccagattaacacggaaaactttccatttaactaacatttgcactggtaaacttcatcaagcaagaccctacttaatcccacattaccttctactgaagaggttgtggtcattctctggaaatatctgaattcattcctacaagttagagaaacagcgttactcgaaacattatcccttgggctcgagctctaaggcacctgacaaacggagcgctgtgggtaggggtgaggtgttttctccagggctgggactttgccctgggcgagggcgccgcagggcaaagacctcaccgggcagcagaatccgggcagaaatcagcaactgggcctcccgcgcagcagaaaaggggaatccagtcgggcccacccttcctgccagcgcagaccgcaagtctggccccatcctctcgccgggagtcggccaccccgaccgtgggcagcctgcgcccgtttgggtcccatcgccccggcccggcagatacctgagcggtggccagggcaggtccccgttcttgccgatgcccatgttctgggacacagcgacgatgcagtttagcgaaccaaccatgacagcagcgggaggacctccgagcccgctcgttacagcagaacgcgcggtcaagtttggcgcgaaattgtggccgccccgcccccctcgtccccatttgtgcaggcgaggccccgcccccccgccccggcgcacgcagggtcgcggcgtgctcgcgcccgcagacgcctgggaactgcggccgcgggctcgcgctcctcgccaggccctgccgccgggctgccatccttgccctgccatgtctcgccggaagcctgcgtcgggcggcctcgctgcctccagctcagcccctgcgaggcaagcggttttgagccgattcttccagtctacgggaagcctgaaatccacctcctcctccacaggtgcagccgaccaggtggaccctggcgctgcagcggctgcagcggccgcagcggccgcagcgcccccagcgcccccagctcccgccttcccgccccagctgccgccgcacatagtaggttctgtctgggactgggcagggccatcggggctgggggggcggggcttgtgggtaaggcgggcggaggcggggaccctccgcccgatgatagggctggaggaggaaggggcgggctgaagaaggggaaggtgggaagagcccagccggggctacaaattgggtgaagcgctgaggttttagtacttccgtttgaggagataggcaaaggttatgcaggtttttaatggcaggcctgagacaggaactcaggtctcctgactcccattctgatgagggggcttgtgggcaaggggtgcgtcttttaacctccatcctttttttttttccttggtggtcgaagagttttactgattttttaaaaaagtgctggattgggtgactagaagaaagctgcccttaggtctccagtttttaagactgcaacagcatggctcaatatttgaaatcactacggttaaaagcagtcatattgtgcagttccccagtgaactctttttgtagtttagattataaagtctgaaatacagtttgggtggataaagtttcttaggatggtatagatgtgactaatcatggagtccttcctgttgccatccttcaacgcaataagtacgtttgtttgtttttaaaccagagatactgccacaggaaaagcccaagggtgacccctcacttgggtcacctgcacagtatttttcagattgaggctgtggaagggcattgaagactggtgtttagccacctaccgtgttttaatgtaggtggcagcttgggtgcttcaaaatcttgttcctttcgtatatatttctcccttaaaatgattactcctcttctgttttttttgaggacgagctacgttttcatgaattcaccaaaattttgcacccaccatttaaagggtagctggtgaaggacttatgtatgcttttggcaagttttctgccaagaaaaaattcataatcttgtcacatctttagtgatgaacataaaccttttaaacaggaaacacttaaattgcagtgaacatgtcaaaaatgatactgttcttttattacctatcttttcccctctgtgcctttgctacataactgtttatttcttagaggtattttatttagcatatgtaagtagggtgattcaagttttataattagagaaagctgaaggctcattgaatcaagaccggtagcagccttggtttcaattaattctaaacacggcttgagttgctgaggctcctgactatcagactctaccttgtcttttatggtgttaaaaacagttcacccatagggttttccagagctaaaagtagaggattctttgaagagtggatggcaaggaaccttgtcattcagttgtaaggtttaaattgcttcacatacgtcaggccttctcagagtagagataacacatcattttctaaccttcccgatataggctacagaaattgacagaagaaagaagagaccattggaaaatgatgggcctgttaaaaagaaagtaaagaaagtccaacaaaaggaaggaggaagtgatctgggaatgtctggcaactctggtgagttgtgggggattcttttttctcctcagtcatggctctggtattctggaattctccagagggcagaagagcgtattagaattgtgtcttttttctttgtggagaaaggtcccttttgttcctgagcagagtggccccctataggtgatggtgatgtgtataggaggttaaggggatggtagagctacaattctgcaatttagctgtagttctcccaactttctcctttattccttctagctatttttgtcctggttataaaattaaaacattcttgctacagaaatttcaaacagtacagaaatgtggaaggtaggcagtgatagaccccataatccctccctttgagtgaggcccactgctattggtgttctgtatatacttccagattttaaaaatttgtacatgtgtatatgtgcatagtcataagctcaaaaattagtttaaa

SEQ ID NO: 317865 - DNA, 4001 bp, Homo sapiens
agtgaaatatggaaaaacagaaacaaggaagtcgaagaaaaagttagtttggggaaagaagagtggtttagtactagccctgttaaatttgagatgcttgcaaaaaatagggtcagagaatccagcaaaatgtataaattgccaacttgagcttggaagagaggccatctacaaaggaaaagatagaagtaatggaaatagatgaacactcctagaagggctttaggagtgaactatactgtcaaggattgacaccttgagaaagggtcacagtttggggctggaggaaagggaattcaaagaatacaacaaatgactatcggttcaaattcagaggaatgtcagtaaaagacaaaggaaaagtaaaaaagaggctgatccacagaataaaactgccatagttgtcagggagaaattctatgtatttgtaattacaagtatgctaactctgtagctaacactacaataaatcgcagggcaaagaactgtttccaccttctaggtaaaggtctggtacctgcctactttttcagtctcatctcatttcatcctttggcgatgctttatgttctgtgaattcctcaagagccccaagctctttcctgactcaaactttttacacatgatgttcattacgcccgcctggaatactaatttctgccatgcttcacagagttaactcctttttcattctcctcatctcagcttaactgttacatttccagacaccatccatgatacctgctcatcccgagaaaaattagattaccctgttaaactgtcttccctggcttttctttgtggcacttatctattataaggctataaatatgtctgtgtgcgttacctattagttaatacctatctctgacattagactggcaagctccatgaggtgatgtctctttttgctcatcacattcctcacatcttatcagacacatactaaatatttgcatatatacacataaatgctcagcaaatatttcttgaatactccaataagtacaagcaaacaacccgagaagaacacaacagaatgtaattgttcatcttttgagctcaaccgtaatatgtggcctgctcatctgcagcaggaatcggccatctataagttgagttgtcaaatcaatttgtacagtaagcaaaactgcatggcggcagaaacgagggcagacaattttacaatagattacacgtaaccagtgtgtaaccagtgtgtaagtcctgtaatttttattaagtattgatttttccagaacgcatggagacactagattgttgctgaaaatgatatgaaaaactgacagaaaatggggctggctggcaccaggaggtcaggaactccactcagtactcgtctttgcgttagcctagctagctgagatggtgctcaggatgaattcctgctgaaacaggagctaatgcaattattttgtttttagaagggggagaagtgtgagttaaaagagaaatgccaggctgcaacagggctactgtcagaattttggaggcccaaagagcttagacttttttaatctaaaacaaggccaccccatggggaggtagcagctcgagtgttgggaaatagaaatgttgggcccgaagctcctcccgggttctaaggccctttcctcaggacaagcagcaaggtctcagggcagacagccaggggctgggggacctctcgtaccttgcttgacacggggctccctggagccggcagcggcagcggcagcggtggccggcctggacactggcttcttgctttgggcctccccggcaattccagcctcggcagatttggctctggaagcagacacggcggcccggaccaccgcggccgctggagccttgtgtttcttgttcttgccgcccatgttgcagctgtggcagaagatccttcgcggcccaggccccgacggtaccactgcacagccgagagctcttcacattccccggctccggggctgccaccctgcgcttcgatccgggcttctcgggccggggcgaccgctgcctcgcaattggtcgaattcagcaggctccgcctccttgagtcgccagctgcctgccacacgccaggcgccacgcgccgccctcgctctttatccactgagcagcttatccactttaggtcggaaaggaaaggaaagaaaagcaggaaaaaaaaaaaaagtcaggggaacatttttgtcggctgcgcgactcgactacttttgtctcctgcgggccactgttgagccttcacgagacgtcactgtcttcggtcgcggggcatcgtgggtaggagggagatttgctctcactgctcccaaaaatggcggacgcattcggagatgagctgttcagcgtgttcgagggcgactcgaccactgcggcgggaaccaaaaaagacaaggaaaaggacaaggggaaatggaaggggcctccagggtctgcagacaaggcagggtaaggaagaagttccagttgttgcttttattttttttctcggtggggaggaagaaaacactactctcttaggaagagcacgagaaagtgaagtgtacattgagtggcgttggaagtgaaggggttccagaaaaaagttggagagggtggaagaatgttggttcgtggaaggggggtcttggcgtttcctggtgtctgcaggcagcgtgatcttctgcttcaattcccttacgtcgatgttactgattctgtccccatcttcgcggttgtctcctgcatcagcacaacacctggcacatagtcgttaataaacaaaacgaatgattagttgagtaaaaggtgaaaaggtttagaaaaaatgatatgaattgatttggaggggaaagggcagataataacatgagaagggagagacatttaatctccaagatgtagtagttttctcttccgtaaaatggagataatagtgcctaccactggtggatatgaggattcaatgagatacacgtgtaaagtgcctaacagtggttagctagctatcactaataaatggtagctatcgtgagtttattgagaaaaaatttaaaaattactggaccctacccatatgtttagactggtgcatacagccaccagaaagtgtacagatctgtttatagtagaacaaggaaaagctattacttgtattaaataaagtaagatgattaattaacaatcaacaaaatatactcttggcattgtggggccagatacccaatagatgcttgaaattaaattagacatgattttgctctcaaggaattttcggtgtagggaaagagaacaggtacccattaaagagttacagtataggtgaggaggtcgttaacttaaaatgaatgatatatacaattaagtgttataaaagttcaagaaagggagatcctatttctgactttcaggaaggcttatttatatacaagagaatattctgagttaaggaaattgtgttgttaatggtgccaagtttgtttgtttttaggagcataaattgagcaagaggaactgtttcatttagggactacaagagataagactgggaatatacattgatttgagaacatgaggggccttgaatatcaagcagaggagttttgatttcatttttaaaaccctgttgaacaaggtgattggataagtagaatgatagtttaggaaaattaatttggcagtggttggcagagtactataatagtatagggaaagaagatagacagtgagaaagtaaattaggaaattatgttagttatctggttgtaaagatgaaaagaacctcaactcaggcagtggcagaggaatggaaaggtacgaacatgttaaggaaaaaatggacaggccttcattaattaaggaaaacaagggaaaggaagtcaaaagagatgtttaatttgcatgtcagggtgaaaaaaacagggacgttcagaggttttgatatagtgataacattaatttggcttgagacaatgtgaagggatgctagtatgtctgtaggaaaatgtccactgggt

SEQ ID NO: 317866 - DNA, 4001 bp, Homo sapiens
aggtcaccacaagtcagcagcaatagctggaatttgggtgaggaaggtcaaacagtactcatggaaataaaatcaaaacaaaaagatacagaaatagaaggaatatgagccctagaacttaagttttggaaggaaagctaacgggggggaggggtcaattcttatcctaaagaaacatacaaaaatgctgctttagtcaccaaagaaggagggggtgtcaatacccttaaccttatatttctagggggggaaaaaaagatgttcaccagataaaaacagatggttactgacatctcagatatcactggaaagggcagtccaggagcacttggtcttgctagaaataggaagagatgagtcactattttaattctatttagaattaaacatctaaccctccagggttaacatctcaaccctctaggtcataaaacaacattttcttcctgtttccatcgctttatcagttttcttcccaaatttgtggagctgggtcaaaatgttgggaggtgggactaagagttacaagccatttgtttagtagaaagatacactagtgtaagggcataaatacctggaagagaagacaaaagagctacagttataactagctattataatgatcatcaatatccaagacttttcctctcctggacagtgccccgtatcttacaaagcttttatagcaaaaaagcaaccaaacggctccctggagagaggcgttggtgtgggcaaaaggtaatgaaatatgatagggttacatgtatatcactattccttcactcggattgaaagtaactggcacttgaggaaagcttactcttctacaggcacgcaaagggaagccgatagtcgccttggggcacaagaggcagtagaaaaggagtagaggagacggttatcatgggaaatgtataaaaaacaattcaattacaaacttcttgaactcgcagtccaactttcttcccacaggagaggtttatcaccatcctaggtcaagaagggcacaatcatgagagttctaatcctctgaaaagtgataagcaacagggcaaagagagaggttctctggagagaggaatactggtaaacaaataaacgtcatgccccagtgaccataggacctgggcaggagcccattcctgtaatcgcaaggacaaacgtccaaagaaggagttgggggtagggctcaagtcaggtaacattcctcaggggaaggattatcaagtgacaccgggcggagggcccacgggggactgggcgggaggaaagttagcaggtaaaaaggatgaatcatggagaaggaagtgacctttaggagaaggaaatacgagaataccaaaaaaggtgtaaggttaagaagagaaaatggacccagaagaggggaccaaaaaagaggaggcgtgttcgggtactggaggaagaagaaaggaagtgaggctgagaggggagagacggggctgagagccggccggggatatgcgggcgggagggcagaatgtaagggctggggaacgagggaagccccgaggtggccggggcaagagccgggtgggattccggggcttcccgaggtcccgaagggagaggatgtcgggctgcagagctgcggaccgagcgaaacgaggaaggaaggcgcgggggcggctccccaaagccgggcaggcgccccaggggccggctgcaggggtccagagggcggttacggggccaggcaggagcgggatgggagggacactcacaaatttcttagatttgccgccgtcgccgcccgccgagggcagctcatctgggctccggcccttcttcttgtcccgggtcccgcggccgggccccaggctcccgccgggcggctccatgtcccggttcacgctggccggcgaccccgcgcctacgccgctcccgcctggcagctccgcgcccgccgccgcccagtcgctctttagccagccgccgcgccccgcctcattagcatgccgggctgcgcgcgcctcatgaatatacaacgacgacgcctcgctcccgcccgcctgccccacttccgcccggacccgcagcccctaccaatgggggaagggagaggggcggagggaagccgcggaagcgcgctacctgcccagcggacctaaccattcggacccacgtgggggggggtggtgagtgggcggtgcagctctccgcggccgcggcggagagcaccgccccctggcggttggagcagcgcaggcctctggctcccacgcagcgcccacgtggctgtacagcctgacagcctggaccctctcacatcccagaccaaaaatcgcgtgagaccattatcctggcagaaaattagtgacaggttttccaagagaatgcagttttcaatgtgtgcaatacccatggaacacatgaaaaaaattatagtgatagccaccatgttttgaaagcaaggtagcaagaacagagctcggtccagggcaagcactagactaaaccagactcgctctggagtttaatttcctagttcgaattccaggttaggtaccatctaattgtttctaatcaggacaaactaattattgccaacatgtgcctaaacagcaataacagttaccacttaaccatgccctttgctctctgctaggcactaggcaaacactctacatgtatttttctaagtccccacagtcccatgtgatagattctgctagcctcaccattttataaatagtaaatttggacttttgagagttgaagtgacttgcccaagaacgcataattgatataaaatttaaacccagcttagtctgatttgctgccaaaccctatgtttaaccaggattccccactgacataaaccaaacatgagtgaaaagaatgagtattctccaagagtatattctttgctcttctagcatgactttctccctaagcaatttcatccattctcccagctacatctgtcccttgtgtgacagttacgtggctaccagtcggccttcacaatatggactgaatattcttgaccacagctagcaagatttcaagcataagttcctgaagggcagagtcagtgacttacttactctagagccccagtacctagtcaagggcctgagatataccagggactctgccaagctggctggctcctaaatttggcattcatctctcttgtggtccagaccttctgatggtgatcggatagaatgttacatagagctgtccatcccatacttcaaacttgacttagtgctgagctttccagacattttgtctaaaaagtccaaaagctactttctaagctagtgttgagaacagacagaatcagagaatggaggggaggaagtgacccatctatcagtcctctttcttgtatcagtctgtatctgctacaatatttatcatactactgactggaatgtaaactcttctagagaaaggttcatgtttgtggctactacagtatttagcattgttcttcacatagacagataatgggcaacttcttctgtcaggcactgtgctaagcacttaacatgttttatctcagtgtatcttcaccaactagcatcactactctaaacacccagattcaaaaacctgaagtcatcttctactcctctcaaatctgcccaggtttgtctaactcttaaccaaaatcctctattaacttcttatatttacaataataaatgtagaatacatacacagggcctaacgtaggataagtgctgaatgaatgttaactatgcttttattacatgcatcatcatgcccatttccctctcctttcataaataggaaactagcaagaattaacattcctagaaaggcgaaaggtacaaaaaataccgacttagtttattggataaaaacagtggtaaaatggacataaagccaaaagtgagaacagaacattttcatatcctccccacacttgaaaacatacttcccatcatctgggattcaggtgttagggagccagagccccttccaaatctctctctcttcatctt

SEQ ID NO: 317867 - DNA, 4001 bp, Homo sapiens
gacaaaatttccaacaagggatcaggagttactactaaaataatagcaattagttaaaacatatttagattgtaaaccaactgagcttgctaacatagtcatttgtgataccaaacattaaatcccctttctaccttttttgccttttctaacaactttacagtcatgttgccagttccaggtccaacttccagcactacatcagttggtcttaaggcagcctaaaagcaagcacaaacactttagctcttctggcaacatcagaacacagaagttaatttacacctgaacatctttactcatatgtgctccgataagagctcttaatctgactccatttttagatttcttcatgatctacgtggttaacaaaattacctcaataacatttggtgcaaatgaaaatctaagacctctcctaacttggaggaatactgttcaactttaggagtcagaaaagcagcaacagcatttctgggattggcattctgctttctatctggaaatattccaatagcctcttgttaccttctctgttcgtatcaacaagttcaaatgggaaaggactgtacgtgttgggcgaagatttttcaattttcaacccatgtatggtttcaaggatgcagaagagcagaaactgtacacaaaattgaatgtctgcacacagctctaatattctacggccatagctttcatcagatgctcaaaggaaactatgagctaaaaaggttaaaatagtacatgacccttctttctttttttctcagttttcaaatgacacgaagcctgacaagatcctttaactatgtaatgctctttctacagctccaggatgctttccttgcttttaaccataagtgtaatctgcaccgtgtgtatttcacttcctaacacccaatcatccataaccataagagaacatcaataactcagaaagcagtaatactccaagcaatttatatgtggtactagcatacaccaaataatttatatgtagtactatatgtttttctggggaacaaactttctaatgtgtagtttagacataaatagatggagtacataaaaactaagtgatcaaaaaggtgattagaaatagaagaataattatcttgaacaaatacaaaggtccagctataaagtagataatccacaaaaagacacagaattgggaaccaggagaaactcagacccacaaaatgaagcttatcatgcagaagacagcccaagaatcctagacaattatttgattcattcaacaaatatttacagagcatctaatttacggcaggcagactttctgcgcttatgtattcataggaataaaattaataaaccaacaactctctccctttcctcttccacacccaccttatcgataatgctgttaataatgagaggatttttcaaaatgtgctgcccaatccccgtgttgaacatgagtcctgtaagaaaatacgaaacagcattaattttcctactgagattagatattaggcagtaccagagaagaaagctgcatgggtatggggaagatttctgcgccaaccagggccacgaaacgtcacgccaggactgacaaactctttataagttcatcctccagctggaaaggaagtcagcggcgacgcgcagggcctgcggccgagtcggggacccacccctgccttccgcgctcacgggagcgcgtcctgaccggcctctgccgatcaggtcttggtccgcaccccaggctaggtcctgccggaagacctgacccgaccgaccccagcttcctcgcggggatccgcacctccagcgctcttcagctcccggcgctgctcctgccgcccgcggcggcggccgatggcccccgacttgaccttcggcatctcggcagaaagcgggcccacaggcccgggacgtcaaggaggaccaaagagggctagcgtgagaaagccaccacgtggggatcgccgccacgcgccgcccgcaccactctggcccaagcgccggaggggcaagggtccgccccctcccgtacgctctgagctcctcctccagaaaaagggcggaccttggagcccactgactgccgggaattggagtcacagagggaggaaggccgaaccgcgggagcctacagatcccagaagacaccgcgctaccgaggactgcagtctggagttggagcccttgtcccaaccagggctggataagaaggtgttggtgtggtgctctcggtgttgcgaaggctgtttaagttatatgatgaggttaagcctatggatgttttagtagcctaggttctgggatcgctgaggtccaaagaagtattcacgtgcctcgctcctgttttcctgaagcttgtgggggtgggaaacccgggatttggggatgagcttgctcttttgtgggaatgcattttttgctgcttgccctggggaaaagaactgcgagaatggaattaacgtctggtttcgctagggctactggttgcttctactaagaatagaagagccgggcgcggaggctcacgcctgtaatcccagcactctgggaggcagaggcgggcggatcacaaggtcaggagatcgagaccatcctggctaacacggggaaaccccgtctctactaaaaatacaaaaaattagccgggcgtggtggtgggcgcctgtagtctcagctacttgggagactgaggcaggagagtggcgtgaacccaggaggcggaggttgcagtgagccgagatcgcgctactgcactccagcctgggcggcagagcgagactccgtctcaaaaaaaaaaaaaaaaaaaaaggaatagaagaataattatcttaaacagatacaaagctccagctacaaagtagataatccacaaaaagacagaattgagaaccaggagaaactcagacccacagaatgaagcttatcgtgcagaagacagcccgtgaatcctagaaaattatttgattcatttaacaaataattcaacaaattccttttgtgcctcatcattcactccgtaaacatttattgagctccaactgtgtatcaaacactgctagggattctaagtaagaaacttatttcaaagtgtattatattgacagagatggacagaaactccaaaacgctgtaaatacgataacgtattggtcgttgtgacaggacagtgtacctgactataaactccgtgtgtaccagggccataatatccacatctgttttgccagccagtgtaatggctcttttaaatttttctgtgtgtattctgtttggttgaagaaatagcttcttcctgtcattactaaagctaactctcttttgagcaattcattgtgtacattcccaaaccttggtcttaggcccttctttctttgatgtagttctaagtcagaaaaaaaatctcgtataccctagtagcatcttcaagtatatgtttcatttcatcaatcattgttattccacaattctaaagagtacactgtgctaggcacttccaaatgttaataggatggacatggcctggagaggtggctcatgcctgtaatcccagcactttgagaggccaaggcgagcggatcacttgagctgagaagtttgagatcaacctgggcaacaaagtgagaccccgtctctacaaaaaatacaaaaattagccaggcgtggtggtgcaggcctgtagtctcagctactcgggaagctgaggtgggagcctcacttgagcccgagaatttgtagtgagccaagattgcaccaacctgggcgacagcatgataccctgtttaaaaaaaaaaaattaacatgacacaaaaccctgtgtgtgatttgttattgttgttgttgttgggttttttggttttgtttttttgagacggtctcactctgtcacccaggctggagtgcagcggcatgatctcagctcactgcaacctccgcctgccgggctcaagcgatgctctcacctcagcctcccgagtagctgagacgacagacatgaatcatcttgtccagct

SEQ ID NO: 317868 - DNA, 4001 bp, Homo sapiens
tagtgtttttgattatgtggataactatcttaaaatccttctgaatgtagtcgaggatgtttataagagtatttgaaataaaacttaggagccatgcaaaaaacccaggtcagttatcttctgtattagaaatgataagcacaaactgtatgcttgttcaactgctttccaaaataaaacattttttgatagtttgaaattgggtatataaagaatatgcaattgaaataactcaacttttgggtgtttttgtttttgtttgtgagatggaatccctgtcgcccaggctggagtgcagtggtgcaatctcggttctcactgcagtctccgcctcccaggttcaagcgattctcccgcctcagcctcccaagcagcttggactacaggtgcacaccatgacacccagttaatttttgcatttttattagagacagagtttcaccatgttgatcaggctggtctcaaactcctggcctcaagtaatctgcccacctcagcttcccaaagtgctgagattacaggcatgagccaccacactcagccaaaatatgaattttttggatagtcttgaaatttgtatcttatttatctaatcagtttgtttgttaaatttccattttattttgcactggattaaaaacatcattattataaatatttttgcattgctttacaatttacaaagcactttcacatgcattctcttatttaatattcacagcaatcctgtgagttatatagagcaaaattagtatcctcattttatagatgaggaaactgaacctcagaagtgtaaggtcacattctgtgtaacagatggcgcaggaactgtgagttggtggctactgcattcccagtactggagacaaacctagcacatcacaacacccagtaaatatttgttgaatggatagatggaactcaaaagcaggtcttctgattccagaatttcaggtcataggacataaaataaaattcgaatcaactcataataatgttgagtgatgctgataaacaagcctttcctggcaaccaggaataatctacaaatataagaagtcgaaagatgttcagcattgctcatatttaaatacagaccaatcaaaacaaggacatgccatttttacctatcagatttagcaaagataacaaaatgggctattctgggaaccagggaagatgtgggaaacagacacacactggtgtgccgcatgcaaactcttgccacccacttggagaatgtgttgctgtctttcaatctttcagatgcacgtaaccttttccctaacaagttcacctttaaaaactgttgctaccgactcccatatgtactcaaagatagatgcctaagaattttcacatgcacgttatttgcagtaataaacaaccaaaaaccatttaaatgttaatgaatagactaacgatagtgtagaatattgacaggatggaaaactatgcagccattaaaaggaacaaggcaagtcagtgtgtgctgatatggaacaatctccaagatatattgataattgtaaaaagcaagatgtcaaaaagccaaaggaaaacctatactgacctgtgtttgcctatgcgtagactgtctctggttagattcagaagacactattaacaattgttcactggccaaggggattggggcaggagagactttacacggggaacctttggatactgtttcactttataattaaaagataattcgagaagatatatcaaggcctatttcttggaggccagagcgctcctaacccctgagcctgcctcagcctctggctcccacccccgcagccgccccgtcgcctctgagcaggacggggccccactcacccttcccggccgcagacagagcgcgggcgcccgggggagccctgcagcgggcagctccgcagcaggaggccccgcagcagctgcgcgccgggacggagcatgactaggccgaggccgagggcgcaggcgcctgctccgaggccagcgggcagcctgaggccgcggggccggcggggcgggggtcggatcctccccccgggctgggggcgggctcctagacggccgcgcgcccgggaacccggcgcccacagagccgcggcaccatggcacctgctggacgcccgggggccaagaaggtgagtttcgtcccctcgatcctcgcggagctcctggccgctgggctgcgagcgactccgttcacacccggcgtccatccctagccaagccctggggcctcggcaaaacacttggacgggatggccctgagcctcaattttcccctgtcacgggttggttagcgtttatggagcccttactcggtgcctggcgctgcacagagtgctgtgctcaagttatctcctcatcttcacaattatccccatttcacaggtgaggaaactgaggctcggcgagtcaggcgactagctcagggtcacgggtccagccccgcggggagcgaggatcagaagtctagctttcggacgcatgtcgcgcacacattttcttccctcaaccgaccctcgcccgcagctctttgggctaatccgtccgggaactcttcggactgtcccctcgcgttttggaaaagtcagcagcctggccaagcagcctggccttgcgagtcgccggctggtctgaaactagtcctgggcaaggacgcccccagagctgcggtgcagggtggagggtaggtgggattcgctagcacccctcaacctcctctcacccggtggtccccagctcctggcccctttcctggtctggtcaccagatgttggctttatgcccagccatttctacgtcgagtatgtgtgggggtgggatgaaggagtgactaagcaaaattaggaagggcatgagcttggacgaaagacatccccaggacccttcagagacccccacccgctccagccctgtcattcagaatgggaggaagggaggaggggcagtttatgcgtggaaatgtgcaccaccgagctatttatactaaaaagttagaaacgaccaagatactctgcaatacgggattctaaataaattaaggttcatctacttaagttattagacagttaaataacttagtatgagaaccagctaagtgccttggcaatgttaagttgcaaaaggaaatatatcacaaactgatcccaaccatatacaaatatttatatacacactgtaaggaaggacacaataatggtaatagttacacaagatgtggaatattggtttaaaaagcatgttttaggatattttttcaggttataaaagcaaaatgtgagcattgaaagaatacagttaataaaaataatcaaagaacattgtgcttttttctctcaactttctctaatgctatgttcatctttacagttcatatttttaaacgtttttaaaatgccctgtttttgttcagtgtctttggggcctctactgttacaacaccaagattatcacacactaatccatgtgaatgtgtacctgggagttaaggtgttaatgggaaggaactaatctcacctctctcctcagctagcaggtacattttaagaattcatttaattgccacagacaagacctccaattaggtcttaaatccaaaagagcagttctgctggcaaatctaggaaaaggggaagttattttagacagactgggtttttctgatcacctcctactacacagtgaagttgatccccactgagtatgaatagagatgtcttgaagccagatcttaaacccagaggtcttacgtagtgatatctgcaaaaagggggcataaatgcaccctagagctcgctgtcagatgcaaggcaggttcactgccaaactgatggggaggagggaatgaaaatataaatgtactgcaaaattaatttacagggttccttattttacatgttcctgtctttataattttacagttgactttagatcgtactagtataatggtgaggaacaacacacactggggcctatcgaagggtggagggtggaag

SEQ ID NO: 317869 - DNA, 4001 bp, Homo sapiens
tcatttcaaaagtttttaaaaagcaaaagttcttagaatttacactggagaaagcactcatataaatttaggaaatgacagagaatgcaacaatattatcctataatttcccactaggaaaaccttctaaggatgatgtttactttcctctcaagcagcaagagcagagagcaatgcccaggtgtaaggaaactatagttgctcactgggaccctcagagctcactcttttcccaagtattcaggctgggcaaacatttagaattggaatcccgataattaagatgtgtatgagtcaatctaaaggggaggtacagtctctatttgaaaacaaaatgcttcttggcacaattctaaaagtacaattcaggcattaaatgcctccaccattttaaatgctgagtattatttattctgaccaacaaagaccacagaaaaattaaaagcagagaaaaagattagaaatttaacactcctaaacctggggcattggttacgttgtttactttgtgtcacttatacaaaattaagttttacttttattttttttaaagaaaaaagcctacagcacttagtattcccaggcagtgacaagttttacttttaatcacaactaaagaggtatctacacaaattgtagcaaaaatcattagcattataaatttatgtagataaaagtatcatgtgcaattactgacttatattttgaaattgttattaaaaaaaaacctatagttaaggtagaaaaatgccactatactgacaagtagcccgaaatttggtgccctcttcttgtcaatatgtgaccaatgaaaagcaagttaagcaaccttaacctgggattaccaggttattgtaaaatatccaagaaatatttttaaaaatgaaaaggcttttttttctttccgaagttatttctcagggaattagaaaagaaaataaatgaaaaacactgttctcaaggctagttgttgatggcaaacaattggtaattgttttgagacacccactttttaactacaaagatacttgaccttaacttagaatacaaaatgaaaccaatctccactattcctaaatttgacaatttgaacctatagaatggtataaaaaagcccccaactcgttactcaacaaagatttttgaacaaacgactttggcaaagcaccctggcccaaggcagacagaccaaaaactttaaaaatcctacaaaatattctaacttgagttcaggctccatacagtacctcactgaccgacatggttttgcttccttagttctcaagggccaggtctgctgggttctgggtggtaaggacccccctggggagacaagacctcgcgcctctgcccgtcgttctgggccaagctcggcccagaatgacgggcaaaggccgggccacgggcgacgcgagggcctccctcactcaccgtgaagcgctggtcgccaatgctgcccacggagaagcagtggtcgccagggttcacagccccggtcagcacctggtgcaggttcatgtcggcgccctagtcctgcaacggacaccgcatccagctcatgccacgggtcagcggctgcttccctccctccttccctcaggggcggcggccgctcttcggtggcgacggcagaagcagcgacaggcgcctggagccggagccgctcagctggggcccgcgactcatcccgagccccggagggcgaggcccggagggggcgggtcggcgagagggcggagcgccgcgctccttcgcgcacctgtcactccccgcgctagcccaggtgaagctcagggtcccctcaccggccacgacccggggccgactcaccggccaggaaggccgcgctgtccacacacttcctctggacctcgggcagccgctcctgacccagcccgagtggcgcaagcagtacgcgctcgcactccccgcctgacctgtcccttcccggctccggtgcccgccacccccacagtcctccgccactcactacgcgcctctggatccctgcggccgaaatatcgcgagacttcgctcggggcagctgctactgtggtaaagaattcacttttttaccacagcgtgcgtatcagcaagtgaacataaaaacgcctcttctagtcagaaactggccaatcccgacccccggtccacctagggctccgcccaccaccgagaataagccaatctctttgaggcttctacaggagaacgccgtgcgtttgagcttgaacctgataagcctggcagaagcctgatgaacccagaatgagtgagatgtggtaagttgtgctttaggttagggcgtcatctaactgttgggccagaaaatttaaaggggagaagtgcatcctaaagggagttgcagtttcctcggttctggtaggactacaagtcccaatatgcaccgctcccccgggcgacctgagtgtctcttgagtaaatgtgacccttgaaacgtctacgttagcagcttaatggtttctccagccttgcgcgtgtttccaagtccctaaacgggatggtttttgaaaggctcgaacacttgacaagtaggaaagtggtattttcttagcctaagttatcttaacacgtgatttgaaatagtgctggtaataacaacacaccagccctgcattgagcgtttgttttggaaaagaacctaggaattccagaatgatcagagtcacagctacaaactgagattcaactctcattgtattttgacacaagttttgtattataattgacaaacatctgtttatatgtctccccctgtataccgtaagcctctttggaatacagaggaacaggacacaagtctgtccttaatgtctagcaccgcaccagtcccacccattcagggtgttctgtaaatgttgcatgaatgtgtatagaaactctccaaataggccaggcacggtgactcacgcctattattccagaactttgggaggccgaggagggtgaatcacgaggtcaggagttcgagaccagcctggccaacatagtgaaacccccttctctactaaaaatacaaaaattagccgggcgtggtggctcccacctgtaatcccagctactcgggaggttgaggcaggagaatcacttgaacccgggaggcagaggttgtagtgagccaagacccccgttgcactccagcctgggtgacagagtgagatcccgtctcaaaacaaacaaccctcaaaactctccaataggccaggcacgatggctcacgcctgtaatcccagcactttggtaagtcgaggtgggggcggggggatcacctgaggttgggagttcgagaccagcctggctaacattgtgaaacccagtttctactaaaaattaaaaaattagcctggcatggtggcacgcgcctgtaatcccagctactgggaagctgaggcgagagaatcgcttgaacctgggagacggaggttgcagtgagccaagatcgtgtcattgcactccagcttgggcaacaagagagaaagtcaaaaaaaaaaaaaaaaaagagagaaaagaaaataaagaaactcccccttttgttgtagtatgaagacttcaaactataataatactagggtgggacgagtactagtaaatttatttccttttatttttactacattttttgcaatgtacatttactttgtctgacaataaaaagctacttacgagatactttttagttcataagtgggatgattgtgtgttcacacttgtgtgagacgtccctccctcaaaccttgttgcgccatcatctgcacattacccatctgatgtggggaaaaaaaaaaaacccgaaacttatttaaaaaatgaatttcattatgtattccaggcttttcataagataagggacaaaacttaatttgtctttttttaaaatatacttattttttgaggtctaacatacctacagtttgtcttttattatttcaaattatacttcaagtgctttttaattttatattttagacccagaaccagga

SEQ ID NO: 317870 - DNA, 4001 bp, Homo sapiens
tcaggttcctgaatcttctcctaggcccatctgtacacttccttgtaaaatctagttttagcaaagaactctgctaagtcagttaacaagaacccctgtagagggtactcaatatctgatcaccgtcagtcgctgattgggttcctcatcctccaccatcccccacgtgctgtctcatccccctggcctttcttcagcaagaatcctggtaggtcgtcagtttagccagaatccccctccccattgatgtctcctctaagcactttcctatccactgacccctgccctgctccttggctacaaatcctcacttggccatgccatattcacagttgagcccaatctctcccatcactccccagataggtccttatacctaacacgacggtcgtgaataaagtcttactttaccatgctttaccaagtgtcactgaataattttttttctttaacacagtgcactaagtagaaactgtgtaattatttacataatacactgcaatactattaaggtaattctgttaatattatacttcagtggagtgaaccaaaccagcatcctaaatatataattgaaacctccaaaagacttgacttactctcaaaacatagttcatgtcaaggaagaataattcattaattatacctgagattttatcatcaattgtggtgtttcagacttggtactgaagcacaggaaaaatgttcagacatgtgaaatgtttaattcattcaacttattccacaagcatatattaaggaccaagcatatactatggaccaagctctgtgttaaaggaagattattttaaaatggagagaactcgcaatctagcaagagaaagagacatgtgggtaaatgtcatttcactacagtgatgtgacaaggactctataagacatcgaaggaaagtgctgacagggtacaggaaggaaactcacacctcctcctcaaagtgtcaggggacgcttctcagaggaggtaacactagcacttggtcttgaagaataagcagtgcatggactggctggagtcagctcttccagaatggtcttctaactctagcaagcaagttcaggggcttggctgcaagacgttcaccttgggaaggatgcatcagaatcttgtggcttgggcaagtgaggggtggcagatggtggcatacttaaaaaattcagaggtagatgcctgctcttttgtggtaaaaacaacaggctaggggggatcatgtgagcttctggggatacacaaaaagacacagtgatcaagcccagtaggaagcatgggttaatggttgagaactgagtcctagagaaacctccaatttcttctgacgttaattggcagtggaagaggtttccaaatccctctctatgcatttgcataataaaaagctgctgagctgagccctgtgctagggaagttcattcttcaatgtgatttccaaaggcacagccttgcatctcactgtctgtgacctcatttgcaggcatatagaacaggggagtgatttcaaagcctaaaccttgcagcctagaatctgccttaactatttctaatcaccaactaaagtttacaggtttgaaagaatacaaagtgcccaaaccactatgaatgtgtttttgaccccaggaaagcatcttcccaaaagatgcagcatgaatttctaggtgcgtagtttaagcggcaacgtgcagaaaagcctacagatgcaaaattttttttatttaaaaaatgaatatgtagcctatgcaccaggtgaacattagttaaaaaatgtgtttctcgcaaattcatcagtgtgtgactttgaacctttttcaagtttgttttttccacccaggtgtgacagatgataatccaaaacacacatgcaaaggtacagacaacagcaccttaccgttaaaactcgagtgacgctatgcttccagagctgtctcctcccaatcctaaacattgtagccgtgcatggacaggctggagtcagctcttccggaatggtcttctaactcctggcagacctgctcaacatccaacaggcttccaaatggaaagttttacttccattttactttcacgtttctaatttgcatgtattattcactacattcacagaataaaaattaaaactccacttataccactcaagtttttctcctagagtgtctgccctgggcctctcctctctctcgaagcctggtgttgttagggtaatattgtttatacactatacagttgaaccatgcctcttaatcatgtttatcaagcaatcaaagcattttaactgctcggtagcaacacaactccttctgttgttcaattaattctattcactgcccaataataagcattgagtcaacagtgatatctaaatagtttctttgaacaatgagaaactttaaaccatatcagattagaaatccaagaagccacagctctgaatatattgtccatgtcgagaaactcagtcttactttgtgtaaacaactttgcaagcacgatgcactgccagcattgtgactaattgtgactaattgccagataggctaattgtgacccataggagccattttctccaccacaaagaacaagaagtctgtttcatatgcaaatagcaaaccatgtccataaattacttgtgctcacacagttgcacatacacttcagccaaggtaatttatcctatgtggctaaacatcttgatcatcttaactgtgaagatgtaatgggaaaacactgccaaatgctttgagagatctctcatgtatggtttctcccatcgagttgaataaaaggcaggacacttaaggttggtcttgttgaatctagaatttagtccttggaattcacagtccagcaactcaaatcctaaaaggtcatccaaggataatcaggaaattgggaactcatcctggtaacatcctgctagtcaacctctgtggagcctgacttggaaggcagggtgctgacatggtttcagaacatggagattcacttggtccatatccaatgctagggcacggacggcctccatatgtcaggttaacagacaacatttagacctcaatattatttggtaagtaaataactagaacacaggaagtttaagtttgtttgcaggattttttttttcttttttgagacctgcaggtctcactctgtcacacaggctggagtgcagttgcgtgaccaccactcaccacagcctcaacctcccaggctcaggtgatcctcccacctcagccttcctagtaactgggactacaggcaagtgtcacaacacgcggctaatttttgtattttttgtagaaacaggtttggccacattgcccaggctggtctcaaactcctggcctcaagcaattgcccacctcggcctcccaaagtgctgggattatacgcatgagccaccaggccaggccctgcaggatatttgttgaagtcaacctctggttgttggtaagcggctgttgtccgtttctaataaaaagtgttgaagacagtatctagactctgagtcccttctctgtgtggtgctgaagacaccagaaaatagcagtaggatcggatcctcctcacatggcatctcctatccatcccaagaatcctctgtcaacacatgacctcaggacaaacatgttacaattcattacatcgccgattatctttcattagttacatttgaatcggtgcttccctaatggtattttaggcaccatcctcattgcagcagcagcccatttacaacgcatcgcttggggagagttacttcctgggaagatttccacagatggctgatggcatgcattttgtgtttggcaggcataaccatgactcccttgaggcttcacagcaaaccgggaagccttccagtctgtgtggctgaatttcaacccctcgggcaaggtagatggcgtcttaaggtatcttcttgagcgctcaggctcactggaagttgttgaacaacacaaacaaagcaagccaaggctgaatttacaac

SEQ ID NO: 317871 - DNA, 4001 bp, Homo sapiens
ggtatttgtttcttctaactgcgtcaatgtaagctgcaaacaacagcccctccattaggtctccatctgaccctgaaaatcaactttgcaacctgcctttcctctctgggaggctgctcgtaagcatgagaaggtaagcatgatggccagggctagaggcgtcatgctgacttttaagcactcatacaaagctgaataaacatgtttctctgtggtccgtggtcagaagagacactgctcgtaaaatagtattttttgttgcagtgcctcccacccctaaaatttaaagtagagaggagttcaattcttttacactaacaattatagaactaatatataccaaggaacttggctagaagatcaagagggcggatgggtaagatctactcctgaccacaaagaggttagtttaatgcaagcttgtccaacccgcggcccacaggtggcatgtggcccagcacggctttgagctcaatacaaattcgtaaactttcttagaacattatgagggccgggcgcggtggctcacgcctgtaatcccagcactttgggaggccaaggcgggcggatcacgaggtcaggagatcgagaccatcctggctaacaccgtgaaactccgtctctactaaaaatacaacaaattagccgggcgtggtggcaggcgcctgtagtcccagctactcgggaggctgaggcaggagaatggcgtgaacccgggaggcggaggttgcagtgagccgagatcgcgctactgcactccagcctgggtgatagagcgagactccgtctcaaaaaaaaaaaaaagaacattatgagatttttttttgcaatttttttaaagttcattagctgtcatcagttagttatttagtcgtcagttagtgtattttatgtgtggcccaagacaattcttcttccaatgtggtccagggaagccaaaagattggatacccctggtttaaagggagaagattcaataacaacacctgcagaatgtaaagagggtcataagcaatacagtcaaaaggggcagagcactcatgtcttctctggaggacctgagaaaggctttaacaacatctttcttccgcttaacatccctcagctacctccacccactgctcctggacagtcttcctctaagtcggcctggctaactccgacgcatccttcttgtcaccatttgtaacactttctgcaagaaacctcccttgacagccagtctgcgttaggtaccttgtaagtgtgctctccaaatccctgaccttgctgtgtagcccaggcgttttgtattattcgcccgttttgtaattggctgttcagtcgtcaaactctctcagtgggctgcgagttttgtgagctaagggacccatgtcagtcaaatccccactgcagaatcagcattaggcggggcacacaataggtattggatcaatattttttgcctgactgtagggtggaaaaggctggtcctgatgccggctggagcgacatgatcaaacagggactgaaggtcaggtggcccagttaggcgaaagataagggccaggttagcaagctgcggagagaccgcagcaccccacgggccctccagtcaccttggcatgggcggggcctgacagctgcgggccctgggcggggcacgggcgggggcggggctgggggccggaggcaacaagtcgtcaccggtgactctgggctcgcggtcggtccccagcttccctaccccatccgcaaccctactcaggctcagcatcttttcacaggcctctatccatcacctcagacccaggatctcagcccttgtgcgtcttcaggatcctcatccctgatctctcccgaaggccgccctatccctccttcaggcggggacctagtaccttccgtccagcgctccccgctgcccagagtcgccgccatatcggttcccaatcagcaggtccgccgagcctcccccgtgcccgaggctgaaagagaagggggcgcggagcgcggggcacgctggtcattgtagtccagtccatatgagctcccggggcactggactacaactcccggcaggctctgcgccagaggccgtgggagacgcagagaagtgctcgaccttcgtcaggagatctgtggaagagtgctgctgccagctgccagctgcctgcagcacggctcttggcttttcctcatttgtagagttgggatagtggcttcggccctgcctaaccctagggacatccaaggaggggcgactgaagtcctgcctggaaagggcttcgcaaactataggctagagggtgacagtatgactattatgctcctcagggatgtctttttgaagcatacgctaatgcctgttctgtgcagtcagtggtaggccctggagattcagagatgggttttggggatgcggaacccagcctttggaagcttgagtcaggaaaatagaaaagtgatgtagatttatggggttggagggcaatctcagtatgtccctactgccccagctcctcaggcactggacatcagagggtatcggggtggagaaagaagacatggaaaggtattggggccggcatgaagagcctccatctttgctgttcctgtccttcctccaacccatcctactccaacacccctctgacacttttctcctctcttccagtctagttatctctttagcccattcgtttcttttctgaaggaccagacattgagattagtaaaaaggaaatgaggaaataaatattcttgctgttcctcatccaggtatggatggaacctagcaaagaataaaagcaacactttcttcataggtggatggctacagttcatccccaaacaaaaaattacccagaattaactgaggtcttacccaagaagaccaaatcaatcatgatatcaactagcacctacttaggcagttggggagagatgtatattcctggacataaacttggaagggtaaaagcaccaaagggcatgcagttccagcccttgcctacagtcatggccctggcatcactgacattatgcccacttaagaactcagagaacggccgggcgcggtggcttatgcctgtaatcccaacactttgggaggccgcggcaggcggatcgcgaggtcaggagatcgagaccattctgaccaacatggtgaaaccccgtctctaccaaaaatacaaaaattagctgggcatggtggcgtgtgcctgtagtcccagctgctcgggagggaggctgaggcaggagaatcgcttgaacccagggggcggaggttgtagtgagccaagatcgcgtcactgcactccagcctgggtgacagagtgagactctgtctcagaaaaaaaacaaaaaacaaaactcagataacaaggcctttcaagtggaaaaagcactggtctagaagttgtataggtgttatattaatagctggggttttgccacaaatcattgcgtgatcctgaacatctcctttttccttcttctttggcctcagtctcatcacctataaaacgagaaggttggattcaattagtagttttgtttgtttgctttttgagacagagtcttactctgtcgccaggctggagtgtagtggcataatctcggctcactgcaacctctgactccctggttcaagcgattctcctgcatcagcctcccgagtagccgggactacagtcgcacgccaccatgcccagctaatttttgtatttttggtagagacgggatttcactatgttggccaagatggcctcaatctcctgaccttgtgatctgcccgcctcagcctcccaaagtggtgtgattacaggcgtgagccaccgcacccggcctcaattagcggtttttaaattgaggaatccttaaggcttaatgtgcagatgtctctggaatcttctattgaggagtgggagcggggaggaaggcatagcagggaaggcactagcacctcacccttcttcaatcaaagaagctctgtttttttctgttttgtattttgtggt

SEQ ID NO: 317872 - DNA, 4001 bp, Homo sapiens
aaatacaatctgatttcaaactactcttgtactcaagaaatacaatctgatttaaaatcactcttcagaaaattacatacgcttttggtcacagcattcgctacttcatttaccctttcccacctagaaagtcaaggaattccgaacttccttctaattcctaacttgatttctaacagtaacaacccaaactcctaagaatatgcttctacactaacccaaactctaagaatatacttctacactatttttacatttattaattttggctgtatcttctgacttactgctatgatgaacatcagttcatttacttctgctcttctaatatatttataatcacattttttcacgcctctgttggtaagcataactttaagtaacagacccacacctctatctctcactccatcaccatagccattcccttttgactttgggtccctgacctttccttccactcctctcataatccctatttttcagacctgcaatacacaccaccttcagtcaaactgtcccccggaacatcttttgtcctccaccatgctatcctccatactgttgagttcacttttccaaattgcattcctctacgatccagtccaaactcctctgagaaggggaagactcaatacaaaatggtaactccctccctgaattcctggagcatatattagttgttccattaatctaaccaccaattatgtatgttgcgatttttttctggcagttgtatttaacttttcatttgtgtaaggcagaaagttgttttcctaacaagactctaagacccctgtctcagcatttccaaatctacttagtagagtgcagtgacttgcatatattggatactctgtaaccgtgtttactgatgaatgctaatatgaaagcctcttcatatgaacctcaaaaagctgaaagtcaactactctcttagtttcccagcctggaagatcagattacttcataaaagtcacacaggcctggattacagaccaatgaaacatccaaaggaaggatacttctaagtaaacatacaaactttactggggaagccgcctgattaaaaccttccccggcagaatcatgtccaaagtgaagtacaaggtctgcttaaacagcttattaaaagaaaaaaaaaacagcgaaaaaagcgcatccctattgaaaagatattttactagctcccgtgtcttaacttcttaactaagaaacgaaaagagccatacatcaggttgaagtatctgggattcccggacgaggtggagggcagcggaggaaaaacaccgagaggctgcgctgcaagggacgcagggaaaagcaagcctggggcaggtctgagttccgagttcccgactgctccctcgtggtgtctgcgacccggtagcgggagcaagtgaggttgttggactgcagttttccccctacagtggcgatgcggggccggggtcgcgggtatgaggagatggggtgtgagccggggtgcgccagggcagagcgcttcgcccaccgagacgggcagggcggctccgggcactggccgggcggggcaaggagctcctaggccgccaggtccctctctgctggctccgcggagtccgcccgggggaagggaaggtcggggagggccgggcttctccgagtggccgcgggggctgcgggacaggtacttacccgggtgccatttcagggccagcttccgataggccttcttgagctcctcctcgctggcgtcgcgccgcacccccagcgcctcatagtgacacttcatcgcccgaccgggcgggcggccggcgctggggcccgggacggggtcggggcccgggcccgggccgaagcggcggcggcggcggcgctggcagtcctctccggcgggagtccgccgcccgcaccgggccagccagcgagcccggcggcggcggcggcggcggcggtggtgtaggtcagtgaaggcgcgcggtggcggcagacgacgcaggctgcggcaagcgggagcgcggcgggggcggtgccggcggccgccgcttcgcatgggctaggggtgggctctgtgccggaaagggccgcgcgggagggggtggggcctcggcggggtgagaggcgaggccccgaggaaggaaggcggggccttggcgaggagagaggcgggccgcgcaggagaaaggcgggagcttggcggggaaagaggcgggccgcgtgggaggaaggtaggccttggccgggaagaacaggaggaaggcgggaccttggtgtgagaggcggggcctcggcggggcgagaggcggggccgcgcggaagggaggcagggccacgctggtgtcattgtgaggggcacagatggcggtcagtgtgagtggcagccgacctgagggctgaagggggagataggagctgggatgggagaggattctggaaaatatctgattataatttctcaatggatccccgtttttatagataaggcgattcagactccaagtggtcaagtggttggctcaagcctcctcagctaatacagtagcagaattcggttggactgaatatcaggttttttttttaatctctttaattctcttcagctgccacttaagatatctggtattgatcatcttgaccaatatgcttgagaaaggacagttagattatttaagcggaaacaatttaaaagggaagcatcaacacacttaatgaaaagccttaccaccaacatggatgaaattgtgctgatctatccatccaacacactttaatcctaactttctggcctctaatcctacctttccaagattggtttaggttaagaaagcagttaaaggatagtatttaactggtaggttttggttgatctgactatctgcacaattattccaaacactttgaaaggtatcaaaataataccataattattaaaatgcattaatacaccaatatatttcactgtaatgtggaatgtttacatgcatcagttaggtgtgggttgtatttactaaccatgtatggttagctatgttgctaatatctattgcacagggttggcgtacccaagcggtttagtaaggttatccttctcttccccaatatgctgcccccagtaaaataaaaaacccacgctaagcttcatcaggttacttcacacgccactgaccaaccaactcactactcagaattcatacacttcccttttttccagaggaagattctacacagtctcagttagttggtaaattggtaatggataaggattgagaagtctgagtttgggggagaatgaaacctttcccctcctgagaacagaattgggatggtgggcggggggaagggagggacaaaaaaaaaaaaaaaaacggaaagggaaagtatttttttccctccaacttaatttggagtattttctccctccaacttgatttggttttggatacagcctgtaggaatcacttacttcttttaccttctgaagtaagaaggatttttgcctgtaacattgtataattaaaggtaactatgctggatataaatttcagtctaaaggaacatcttgaccaggcgtggtggctcatgcctgtaatcccagcactttgggaagccgaggcaggaggatcccttcagcccaagagttcaagacgagcctgggcaacatagcgagaacttgtctctacaaaaaaaaaaaaaagccaggcatggtggcgtgggcctgtagtcctagttactcaggaggctgaggcaggaatacttgagcccaggagttagagcctgcagtgagctatgaccacaccaccacactacagccctgggtgacagagcaagaccctgccgctaataaataaaggaacatcttttattaaactggtgccctttaaatgaccagactttagagatgatccattccagaagaattctcaaataagatatccatataattgtgaaagggaatttgagatataaggatatctctattatggaaactgttaattgaaaattgtgaaattggaaattac

SEQ ID NO: 317873 - DNA, 4001 bp, Homo sapiens
ccgagccccttggaaccctaacttgtcccttgccaaagccaactggctgccctctggctgtggggaccgcaagaagggacccacaagctgctggcgaagtcgctgcttcaggtctggcttgagccactccacagccacctgctctccacagaggtgtgactgccctgtaggaaaaatgcaaagacaagggcaggtctaaaccctgggcccaagcctccaggtggtgagccctttggagctacacagtcctgttatttgtagccttcccatttcctggtagtgtgaccatgggtaagaaaagacaatgaagccttcagcctccattatttgcaaagggagtataacacactgctaccttacaagtttccttggagaagtactggttaattgcaggctttgtctgcctcataaccatcataatggctaatctttactgggaaaacttgctgtaagtcagtcagtgtgctaagtaccgtacacccattatgttacttaattctcataacagtctgaggaaacagattctatagtagtaaaaagctcagttggattcccttgagcaaatcaatttctctaacagtttcctcatagcttgagggtcctgtgcctattttgcggtgtgggggtgggggaaggttgagaattaagtcaggaggtaatgctcgggaagtgtcacaaatttaggtaagcggtggtggtagcaccattggaagttttaaaaatctgagatcaaatagtaaaaggttgcaaattctggcatgtttgactctaagatcttgtaactttaacagctatgctcagtataaagtgccgggcagaacgcgtttggccccaaccagcacccccgccccagcctaccttccaccagggcctttttggccatggcagcggcccggtgcgagctgaatttgagcagagcgatctgcccgggcgccggtccggggctgggcagcagccgcgcctcctgcaagccgggacccagcggctgcagcgcgagcagcagcgcgctgcgggtcagattcggcggcaggccgtcaacgctcagctcacacttctcggtgctgcggcacacgagcagcgggcaggacggccgcagcggatggttgtgcagcgtggcgatggcggcctgcgcgccgcgcctcgagctgtagcgggcataggcgaagccgcggttcaggccgctgaaggtcatcatcaggcggaactcgtagaggcggcccacgcgctggaacagcgggataagctggtgctcgtacacgtcctgaggcagccgcccgatgaacacctctgacccagctggcggcgggctgcccacccagcctgtgggaagagggtatgcaaggccaccgtcaggcgacgctttcgaattctgagcccacggacccagcgcgcgggggtgggaggcgatgtgaacaaaggtctgtgaaatgggtttacacccgtaccctgggtggttggcataattaggtgactgcgctaacaagggggctggcacagagtaggtacaccttgagattggccccctccctcgacggggcgggtggacgtggagccacagttcctcctttgctggggggtataaatccgggtagttcgcagtttctgacagtgaaggctcggagcagcccctcccccaaagggggctggtgtagccggacaggcggaggggctgggactaccgtacctgggggtggcccgccatacttcctctgcccgttcacctgcaccaggcggatgcctgtctccctgacccacgcctccagcgccgccttgttctctggattcaccctctcacaccacagctgagagggaaaggaaggttggaatggcggatcgccaagcgcgcccccacctctcctgtggtactggggtccctaaagccgacccccgctccggcggggctcgccggcccccaagtcgccagccgcttacctcacaatcccgcttggactgcatggctctccagctggccccctcgtaccctctttataacttcctccccaccggcctctggaagcttccctacccctccaccccgcaagctctcattggctctgagcgcgaccccgcctcccaggggggtggaggtatccactgcacgtgcgccgcccgggcttcgctcagaccttcaggtgaaagctgcaaagtcgcgggtgcgtatgtacgggggctgcctcccgaggaggagctcccaagccgcagggtggacgctggagacaagaacctcagggtcacaagtttactgtttttctcccttttccatccctacattggtctgctggggaaggcggggctaggcatcactgacacacgcagactccgtggttgaggcattttattggacctttggcaattggtggtggggaggcatctgctccaactggtgcggggccctgcagatgggaccatctcaggctgggtccttgtagcccaggagcacagactggactaagcctcctgggccttgtatgaaaaaggtgttgtacctggccgtttttgccagtaataatcaataaaataaccataataaaaatcaaaggctctgttctgaccactcttcaggtcttccgctgaaacggaaaagtgcaaagcaattgaagtacatatgcagtttgtcttaacctcaaatagtgccagtcccacttcctttcctctgatagtttgttcagttcagcagatgcagaggggctggcctgttctccttttgatttcctccacaaggtcttctcttcggacatccacctggccaggatgggagaagaaggtggtataagcatcttccattccactgctccccgagtgcctagtttcctctagccctctaggcatcaggcttgtctcagctgggagcaggaacctaattaaacacctcaggctagagtgtgcctcttgggggagccaacaaaccataaggtatatgcagggatggagatctcaccctactaagaccacagtaacaggttaagccctcaaggcttttatgagttgtactaatatcaatgccaggctttttctcaggtcttgaatgggcatgggcctgccaaaatggcatacattctctgtcccttagccttcctgcccacctccctcacctcttccctgctcgtcactgaacggagcttgatgaccccatccttgagttcctgctcgccgatgatagccaccagtgggatgcctgcctcctcacagtactgtaactggttcagtagctttgggttcttcttgtacagcagctcagcctgcaggggacaagagcagaagatgaaggctggcttctgctgtcctcagggacagagggtgtccaagctggcaccctgttcttagctctacttttgagaagtaatggcaggatccattatgggtgagcttttattcagtttgtgtccagcacacctaagtttgctgccaccctggggcttgcctcccataccttgatcccagcatcccacagttctgagacaagctttagtctttcctctagcagcttcttctgtgcagatgccacaagcacctgtgtctccgtggtccgtatcttctcctccaaagcctggggaaggggcagataaaagagagctgggctaacaccttcaaggagcaaacaaagcaggctctagtcgggattttgagaccaggcccaactcagctctaccagggcaggggccctgtcttctcatctagcaccttgggcataaaggtagcttttagtagatatgaggactgaactgactgacttgtacataggacgtatcagaataaataacttagggcaagagtaaaggtagcttttttacagtaacttcaagcttatctccatgtagtaccttttttttttttttgagacagggtctctgtcatccaggctgaagtgccgtggtgtgatcactgcagcttcgacctcccaagctcaagtgatcctcccacctcagcctcctgactacaggcacacaccaccatactcagctaatttaaaaaaaaaaaaaaatttttttttttaatctgta

SEQ ID NO: 317874 - DNA, 4001 bp, Homo sapiens
taagtgacctcctgctagattaaccaggcagtcagcagacaggtaaaactgttacccattttccttctattctaagtccaattccccactcctatcctaattaactatttaacttcttccagatgacactgctcaaaacctccagtgctcagagaaggaaatccaaactttgaaggttggcactcaaagcccttcacaatctagccataatctacctctgaaatttttttaacactaaaagcaatactaaaaccaaaacagactacttattgtttgacccacacacttcagggatgccagttccctgcctttacccatgatgttccccttctagatgcttttctggtgccatgcaaagggcctagggtctgaagacaattgaatttaaggcccgctccattgcttccaagtgatgtaaacttggttacttcacctgtaagttgggaataatacactgcctcacatgggggttctgaagtcagacagagattgcatgacctttggtcttgcaaaccatgaaatactacagtctcataaggcatgactgtcctgaatctggcattagggtgcatcttggtgctggtgtctcttggttctgaagctgctaggtaagaccctggacctgaatcactaactcttattgagccagcacactactaaatgctttccatgcataaccccattcaatcctcacaagagtctcatgagacctgcattattattacttccactttatagacgaggaaacagaccctgatttgaactcagttctgacttcccagtccaagcctctagccttacacataactcctcaagggcagaagctgtatccttccttactttgtaactgccccttgagatatgaattattatttgttctctggatggggaccatttatatcaaaatgaccccacagtgcccggtacccagtaattgagtggataactgctgatctctccagggcagtgtttcccaaacagtggcctggggaccccctgcatcaaatccctctgggtgtttgggtcttccaatgcctcacctgcgaaatatttatctctgagatggtgtctggtatccgcctgtgtaggaagctccagagtgactttttatttgatatttaagtttaaaaaccacagtgagtccatggagattgcaccacggatgacacttagagtagcagcacctgaggcctcccttcccccagccaccacttccgcccctgagctccaggcagaggcttctgggagtttagatggctgaggctgacgaagctagcttcttggttaccctaagaccacctggcgggagcctttttccccagaggctctggggggctgagtagagaaccccaccgtccagccccattcccccaagcttgagctgccctctggatgccctgccaaatcaggagtcatctgacccaggaggaacagacaggggaagcaggcaaatgggtgtcgctttggagggggtggaagtatgcatggtgggcaggccaaggctgagccaggggagagtggagctccctctacaaggccaagtctcccacgcggcgagctggggcactcctggggacgccgagtttggcgcgaagaactgagttgtcaagcgcaggtcttgaccctatctcggaaatgtctaaggttccctcagcaggcgagagggcgagggctgtgcttagcctgcggggtggggtcccgccgtcctctccccgagcctcggctttcccgccccgaggccccgccgcaggctgcgccctctgacctgcaggcagcgcgccctgcccaccccgcgccgccggccccgcagcatcctcctgctcgcggctctcccgccacctgtcccgctccctgccgcgccctggggcccgcacctacccacgccgtgccgctccttgtcagctttgcgccagggggccatggctgggccggggcctcgcgtcctcccgtggggaagccgtcagggggtggctgggcgccgcagggccccacttccttcctcttttcaaactcctctcagggcccgccctctcctccctcgccggggctccccgctccctcctccctcccgttgggcaggggcacactagaaggctggtgccccgtaggctaagacacgccaccccaccccacttcacgcaaaacttggggaccactcccactttgtctcctccccaggcgagggagcagaggccagtccccacctggggctcgccagaccaccaccgcaagtgcagagagtttcctgattgccgtgcctagggactgaacaaacctccttaactcccctcagcatgagctttggtgtcagatctcggttcgaatccagacggggacaaatgacttcatttttctaagcttcagttttctcatctgtgaaatgggatactaatacctacttcatatgattattgtgagggttagagagacaatgtacacagcaggtgacatggaagagtaaatgtttacctggaggtggatcctttacagccttttttttttttttttgtgagacggagtttcgagtttctctcttgctgcccaggctggagtgcaacgacgcgatcgcggctcaccgcgacctccgcctcccgagttcaagcgactctcctgtctcagccttcccagtagctgggattacaggcatgcaccagcatgcccggctaactttgcattttcagtagaaacgtggtttctccatgttggtcatgctggtctcgaactccccacctcaggtgatccgccagcctcagcctcccaaagtgctgggattacaggtgtgagccaccgtgcctggcccatttacagctttttatcgttttggtgctacaaacccgttggaaaatctgatgtaagctctagaagctctactctgaaaatacgtaaatacactatttaccaacatcactgcaaggtgaagggtgctgtcacagccagcaacagtgggacccaggaaaagagccctagagttaggctaatggagacatttcctcgaaaaatctcatttttgctctgagaacagattctgtccaaaaaaaaaaaaaaaaagtctgatccacagtgataaggctgaatttaagttttgctgagttttctttctttattcatgactctcactacccctttctgccttacactggagagtcattaagatagattaggcaatatcacagctgaactggagcaacaaaaaattattgattttgttttatctgcagttattttcttttctgttttctagcagcacaaattaggtaataatgtcttatacagtcagcagtggtattagggttccaccagatgaccagagtaggagattttatatatatgcatacatatatatacatacatacatatatgcatatatatatacacatacatacatacatatatgcatatatatacacatacatatatgcatatatatacacatacatatatgcatatatatatacacatacatatatgcatatatatatatatatatatacacatacatatatatgtatatgagagacagagagagattggggattggctaatgcgattgtggggctgtcaggaagagcagtttggaaactcacaggcagatgtcctcaggaggaatttcttctttttcaaggaacctcagttctattcataaggtttgtcaactaattggatcacaccaaccaaatgtattgaggataatctcccttaattaaattcaatgtatggtagatgttaatcacatctacaaagtacttcacagcaacccctgtgaagattgtgaagattggtatttgattgaataactgggccatagccttgccaagttgactcacaaaactagctatcacaacaatgttataaattgggactatacaatagaggatgccaaacattttctgtaaagtcacagatagtattttagtctttgcagtccagaaagcaaaatcaagtatatatgtaggatgcaggtacttatgtaaagaaagaaaaaaggttctaaatttttttta

SEQ ID NO: 317875 - DNA, 4001 bp, Homo sapiens
gccgacctgtcacccgctgctcccaggccaccatcccggacctcccagctctccagccgtgccacgcctgatgggcctcctgcatacagcagagcccacaccttccgccagcacttctgcgggaggggagcgggagggtgaagacccttgggtggcagattgtccgtgccacttggctcagcacaagctgctcggcaaacgctcccagccaggagcgggcctctgctccccagtttctcagggagccaggtaaggaggccttggctatgcttgggattggtcagccctgggttcaaatcccagcccgctctttcctaactgtgacctccacaagcatcaatgtcgtctctcaaaaggccatgagaactcgagctgggactgctactgggtcatgtttgtaaagcatccagtggccgggcagaccaccagacactgccattatattggttccctctcacccccaaaaaggggcacttgggccacaggccaagagctggggtgggagggaggcctctgcctcaagctgttaaggaaggaaacatgcaaatagcttcgagcaaaggaaactgacggtttatctgcctgggcagcagctgcagctgagctgcgggggtgtggggctgctgccgaggagaggtgaccccctgcctccttgctcccaggacagtgccgctgcagggaggggctccacccttgaggcctcctccagctcagcccctcaccctatttagggccctcggtggcactatttcatgggtcagaggctgtgaagctcttccctgctgggaggtttgagccttcgaccctctcccactcctgtatttcccatctctcccggaggcagggtctggcagagcctgctcagcccctgccgtctcaggctgacacccgcactccattccactccccatacctgggtgggatcctccaccctgactcccttcccaagtctcccaggtctgcctgggctgtccgaggcaggggcagaggctgcattctccacccactgttggtccttggcagctgcctggcagccaggggtccccaccttgccaaacttgacatgctgctggtagaggatgccatccttgataggggtctccagagggtccatggtcacggccaggagcagggccgccgcttcaagacctggggagactgatgacaggctggacgggaactcctcacacttccccttctggccacttcccgtccctccgtctagagacagctgcaggccggggggaggggagcctgtcttcagctcaggggctgggggcagcatgtatttcctccctggggttctggctgcccaaggtgcccacacctacctggagggagcccccggccacctgaaggcagccttctcacgcacctggttcagctgggcacgcgcgtctgatcgcagtctggctccccgagtcatgagttcccgcccctcccccgtcccgccccgggcagctgcgcaccctgggcctgacactccctggccctgcctccacccaggacccttctctagccaactcctggctttcccactcggcgtcctggtttgagcgcctcaccccatcttgctgcttttctttctccctgaaatctctctcgtgttcacctgctcctctccacctcacgagccactgaacatcaccagcctttggcatccccccaggggccactgccccactgggcctccatgcagcactctccacaacccaagaccaacctgtctctccccttcctggggtgcagcccaggctcctcagcccaacactcagggacctgtgtgttctggcctgcatctcccccaggccagcccctccagggccccctcaccactgtgctgcctggggcggttggccacctcttcctcctggaggcctcccttgaccactccacgctgtccgagagctcaaaggccctcacggtatacactcacgctgggcatccagtccacatgggacccacagccctgaatggccccaaccacgtgagtgtgggtggcaggtcccagggggccccggagaggtcacatgttcatttaaagctttgcttcctgctgggggcgccttttgttggcttgcctagcaagatgccaatagcggggctgtgtgtatacctttattctggaacagcctcaggtcattcagcaccacctctgggagagaacatggaagaggataaggaatgccatttgggaatgcacttggccaggaaatatgtcctgaaggcctcctggcacccagctctgtgcccactgtggcccaagcagccctaagctccgtccacctcagacgccacatcctttgcgttctcatcgccatttcaacagtgaggaaatcggtgctcagaaaaattaagtaacttgcccaatgccacatatcaagtgacaaatatggcttgagcaaccgctgtctcactggaatgagcatgtggccatacatgcaaagtgcctggctcagaggaagtgtggccgcctgtgccgtccctgcctacctctcaccagatgctgagatcctgcctcatctgctagcggtcttgtgactgccgtccacgtttctgcgtgtgcgtctttctctcccctcgcctgacggcttcccaggcagccatctccctggcccatctaggtcctcacagctcagcagagctgggcacagagcaggcttagggagagcttgtggcctaaatggcagttctatgacatctgctgcctcctcagtcaacggaatggagggctccctccaggtggctggcacaggcaggcagtgggtgggggtcctgaggcaagaagcagcctcccaaggggcttcaggagaagtccctgaaacatcacagccctgacaggaagagtgggcctgagagctatgacagctggccagggagaccagagaatccaagcacttctccttggcccgccaatgtggtccctccttgagtcataaattcagacaacccagtggagagacccagagtccccagaggcgggcaccagctcggtggctccttccacagccaagtaccagcaggccaggtgttggcagtgctagtgggagatgctggggccttgcctcagaggggctccagaggtcagaggtgacgtctgtccaggaaccagggggcggatgaggtgaaacacagaggcagggccagggctgggctagaggtttgggctttaatggcagctggggtaaaaggaaacaaaaacagtaattctgaagagcacagggaacaggcagccaggaccagcctggcccatcccaggccagctgagctgaaatgctgattctgtccagggggctgctgtatgtgtagactggtggcagtcttggggactgaggcctcttggagagaagggaagactgtcggctcagaagtccatggagctgtgggccaggtagtccttgcgaccgatgttgctgacctgcttggtctgcatagcctcgagtttggggcagtcagtgatccgatgacccaggcccccgcagaaggcacagccgcgctctcctgggggaatggggacaggggtcagccaagtcaaggaccaggatccatgccctggacttcgggccccccgttaggcaccctcggtccaccggtttcacgtttctgacttccagcacccctccttgccacctgccggctggggactcggggatcccgctctgcagtcacctccaatgtccagcatggactcatccccgcaatgcagcacctgcagcacgggcggcaccttctgcttggcttctagcagcagcgctttgaggtccatcagcactgactcatctgggggaggagtggggaagcatcagggcccatcctgggctctgtggccagaacctgggtggccacaggcaggggacccagggaacagctaaggtggcgctggtaacagactcaccacacgctttgttgatgaaggtagtggcgatgcctgtgtttcccgagcgcccggtgcggccaatccggtgtactgcagagagaaggacagagtctctggcccatcg

SEQ ID NO: 317876 - DNA, 4001 bp, Homo sapiens
ccacgtcgccttctttctgcccttaaacaccccacactgtccggcctcggggcctctgcccacgggactccctctgttcacaactccccaggctgcccctgtcctcagacctttgcccagtgggttcctgtcattcagggccctcctctgagaggccttccctggccaccctgcccgtcgctccctcacttcctcctgctcccctggcggtccattttctccatggcacgcacggccctctgagagtcattatagatttacttttcccaggcttgtaggtgctcggtggagcttgctgggtgatgggatgtgagcgtggaggtggacaagtcgggggcaggtgccccagcccaatcgcccccctgctcgccgcactcaccgggaaggccagctggcagatggggcccatccaggcctggcggtgctgagcagccagtagatggcttcgctcggtggtggtgagcaggaaggcaccggtgtcccgggggcagctctcgccgtcagccggcagcacggacacacagtcagccaggcggatgacccgtcgctcccctcgccggccaggccctgccgacctgtcacccgctgctcccaggccaccatcccggacctcccagctctccagccgtgccacgcctgatgggcctcctgcatacagcagagcccacaccttccgccagcacttctgcgggaggggagcgggagggtgaagacccttgggtggcagattgtccgtgccacttggctcagcacaagctgctcggcaaacgctcccagccaggagcgggcctctgctccccagtttctcagggagccaggtaaggaggccttggctatgcttgggattggtcagccctgggttcaaatcccagcccgctctttcctaactgtgacctccacaagcatcaatgtcgtctctcaaaaggccatgagaactcgagctgggactgctactgggtcatgtttgtaaagcatccagtggccgggcagaccaccagacactgccattatattggttccctctcacccccaaaaaggggcacttgggccacaggccaagagctggggtgggagggaggcctctgcctcaagctgttaaggaaggaaacatgcaaatagcttcgagcaaaggaaactgacggtttatctgcctgggcagcagctgcagctgagctgcgggggtgtggggctgctgccgaggagaggtgaccccctgcctccttgctcccaggacagtgccgctgcagggaggggctccacccttgaggcctcctccagctcagcccctcaccctatttagggccctcggtggcactatttcatgggtcagaggctgtgaagctcttccctgctgggaggtttgagccttcgaccctctcccactcctgtatttcccatctctcccggaggcagggtctggcagagcctgctcagcccctgccgtctcaggctgacacccgcactccattccactccccatacctgggtgggatcctccaccctgactcccttcccaagtctcccaggtctgcctgggctgtccgaggcaggggcagaggctgcattctccacccactgttggtccttggcagctgcctggcagccaggggtccccaccttgccaaacttgacatgctgctggtagaggatgccatccttgataggggtctccagagggtccatggtcacggccaggagcagggccgccgcttcaagacctggggagactgatgacaggctggacgggaactcctcacacttccccttctggccacttcccgtccctccgtctagagacagctgcaggccggggggaggggagcctgtcttcagctcaggggctgggggcagcatgtatttcctccctggggttctggctgcccaaggtgcccacacctacctggagggagcccccggccacctgaaggcagccttctcacgcacctggttcagctgggcacgcgcgtctgatcgcagtctggctccccgagtcatgagttcccgcccctcccccgtcccgccccgggcagctgcgcaccctgggcctgacactccctggccctgcctccacccaggacccttctctagccaactcctggctttcccactcggcgtcctggtttgagcgcctcaccccatcttgctgcttttctttctccctgaaatctctctcgtgttcacctgctcctctccacctcacgagccactgaacatcaccagcctttggcatccccccaggggccactgccccactgggcctccatgcagcactctccacaacccaagaccaacctgtctctccccttcctggggtgcagcccaggctcctcagcccaacactcagggacctgtgtgttctggcctgcatctcccccaggccagcccctccagggccccctcaccactgtgctgcctggggcggttggccacctcttcctcctggaggcctcccttgaccactccacgctgtccgagagctcaaaggccctcacggtatacactcacgctgggcatccagtccacatgggacccacagccctgaatggccccaaccacgtgagtgtgggtggcaggtcccagggggccccggagaggtcacatgttcatttaaagctttgcttcctgctgggggcgccttttgttggcttgcctagcaagatgccaatagcggggctgtgtgtatacctttattctggaacagcctcaggtcattcagcaccacctctgggagagaacatggaagaggataaggaatgccatttgggaatgcacttggccaggaaatatgtcctgaaggcctcctggcacccagctctgtgcccactgtggcccaagcagccctaagctccgtccacctcagacgccacatcctttgcgttctcatcgccatttcaacagtgaggaaatcggtgctcagaaaaattaagtaacttgcccaatgccacatatcaagtgacaaatatggcttgagcaaccgctgtctcactggaatgagcatgtggccatacatgcaaagtgcctggctcagaggaagtgtggccgcctgtgccgtccctgcctacctctcaccagatgctgagatcctgcctcatctgctagcggtcttgtgactgccgtccacgtttctgcgtgtgcgtctttctctcccctcgcctgacggcttcccaggcagccatctccctggcccatctaggtcctcacagctcagcagagctgggcacagagcaggcttagggagagcttgtggcctaaatggcagttctatgacatctgctgcctcctcagtcaacggaatggagggctccctccaggtggctggcacaggcaggcagtgggtgggggtcctgaggcaagaagcagcctcccaaggggcttcaggagaagtccctgaaacatcacagccctgacaggaagagtgggcctgagagctatgacagctggccagggagaccagagaatccaagcacttctccttggcccgccaatgtggtccctccttgagtcataaattcagacaacccagtggagagacccagagtccccagaggcgggcaccagctcggtggctccttccacagccaagtaccagcaggccaggtgttggcagtgctagtgggagatgctggggccttgcctcagaggggctccagaggtcagaggtgacgtctgtccaggaaccagggggcggatgaggtgaaacacagaggcagggccagggctgggctagaggtttgggctttaatggcagctggggtaaaaggaaacaaaaacagtaattctgaagagcacagggaacaggcagccaggaccagcctggcccatcccaggccagctgagctgaaatgctgattctgtccagggggctgctgtatgtgtagactggtggcagtcttggggactgaggcctcttggagagaagggaagactgtcggctcagaagtccatggagctgtgggccaggtagtccttgcgaccgatgttgctgacctgcttggtctgca

SEQ ID NO: 317877 - DNA, 4001 bp, Homo sapiens
caaaacatttgcaaaatatcagaagttttccctaaaacgttggtaagcaagggcttaggggaatcacgcactaaaaggatgatgtgaaaatcacaaactaaatgaatgatttcagaggaagccgacattgttttccaagtggtacccttgaacagcactaacttcagcacttattttccctggtggtcttagtagtcaaaggttggttggttggtttgtctaaactttcaaaaatcaaacagtgaacagagatgctgttctttcactagctcattgcattttaatggaaaaacaactaaaacctgaataagcattaactgtaattgctctgaggcagacatttccatttcaggttgttattcctaaccatattagtgcagaataatacatgcggatggattttgcggccattacctagacaagggtgagggcatctgattattattattccccaactgaaagcttcagtttgaactctgaagtctccagccctgccaggccctgcattttctgaactacatctctgagtctctgtgaaatagacacataaatcagggcaagctagatttcaatgccatcccttcagtcagttcagtgtgacataagtttctcaaaaatacacatacagaagaaattggctttggcacatttaagagcagcagggaatttgcatctcatgctagtttaatgtgcactcttaatactctcgtctattttctaaaatataatgctattcttgcagaggcagctggacccctgtaatacccagtcttgtgccaagctatgtacacaaatacactctttacaaacacagatgtgaaatgccgtgctaagacacaagcgaggcatagagagagattcgcgtgtttagtctagaggctccacacccaaaagtttcagggacagagctgatgtttgaagactgagaggggagaccgcccctccagtactttcatccgggcactatggagatgacccccatattcccagcatcactttgccctctgccgtggtgacccgggttgagatttaatctagggccagaggggggcaagacaattgtgctgttggctactagagagaagagctggaaatcactaagccttcccgggctgacacacccacccagaccggatggcccaggagtgcggcgaggaggcaggggcaaaggacgcggctccaggcaggggaacccgggcatcccttccgcgcttgcacgaagatgctgcaagtggcgacacgcgcgaatccagggtctgggctaggaagtcgcgctacgctcagtggaggatgaccctttcctcctccttgtcccccagccccgtgcaaagtgagctggagaaagttgtgcccgggccatggcggccagggctggagaaaggaacgaaggcaaggagggaagtgacccggggcccccttaccttgtccttggggccgaggttctgcaacacctctttgccggtggcgctccggatctctaccccggcgggggcgggggaggcgggcgcgggctccctgctctcttcccggccttggcccctgcgcggggtgtccccctcgatcccgggccgactccccgatcctcggtcgctgccctggccgctccgaggagtcttcgcgccccgctgccccacgctgagggcatcgaaatccagcgtcttgctctcgaaggcgccctccacgttgcagaacatgccgccgtatttctgccgcgggacctggtccgtggtgcccggcctggccaggtacacgggcagatcgtcttcgtgggagctgtcccagcccctccggcccgaggccatggttcaagcacgaaagcggcccgcgggtttttcttccccagaggcggaaagggcagccgccggcagcgtgcgccgagccacagtgactgtggcgggaggaggcgcctgagccttcgcgccagaggcggcagtgctgctccgattcctgcttgtccctagcgagccagcgagccacacagccagctagcgcgcggagcaggggcccagagtagcgccgcgcttggctcactcgctggacctctcgcccggccgcacctcctcacgcacccccaaccctaacgtggcctcccgggctgacgcagcgtcggtgcccatcacaatcacaaaccaaacttggcgcgcgcgcacacgcacacacaggcgcacactgcccgctcgcgcaacagccttgcctcacacactttcgcgcaatttagacgtcttagaaatgttcacactccagcacttgactgcttcacccacactaactccctagtttgcctcacaaacacaaagctttctgacgtccctcgtgcacaaaaacccagctgacccaggtggattcatctcaaagccaagtcctgatttacaactaacacatacaaactcaaatttacgacagactcacaatcctacccggaaccccggacttgcctcatcctgatctttaggatgacactcataactacacccagttctagaatctgccttgcaaacccacactctcacatgaagtcctgaattggcttacacacacaacacaaacacacactgagagagaagccctcttacttcattgagagtcacaaaagccctttggctcacataagccctttcttagcttctatataatatcctagtttgctttttaccacccctaatttgcctcatttcagatcacacacacacacacacacacacacacacattcttaggttttgccttgcaaagcactcttcattgatgctctgtccctcatacaacaaaccccagattttaatctcacacactgacacaagtccaggtttacctcagtcggaaccgacacttagattcacacctaagcccagatttacttcaaaaatcacacaaccaaagactttgcttttcatgttacctcagatgtatgcagactttacttatgtacatctgtgctttcataacctcattctcttccccacgtccacccacgtatactctgacgccgactctgccacataaacagaacctgcaaactacataccttacatcatatctgcacacaccacctaaacccaaaacctgttgtgccggatttaactgtgctccctctcagaaagtcacccatttatttatttagtcaaccaacataaatcaggtacccactatggctttcacaagatgctggagcaacagtgtcgaacaagagagatcggcctgtcctcaccaagaatgtagtctattaccacccatctaggtagcacagccgttcactgttctgctcaacttacagaactttgtttattttgtgaactaaacactccccctcccaagtatggacacatacatgctaagctccataaaggcagagatctggtctgttcagttcacctttgtatatcttgtgcccagaacatctacaggcacttgatacattctttttgaacaaatggaggataacaataacaacgacagcagcaccagaaaatgtttatggagttattgctatgtgccagtcattattataattgtttcacatatattaactcatttaatgctcataagcatatggccggcttctttgtgcgcatagacatactctttgaaggcatccacatagaatttgatgaaattaacctttgaactctgattttggagtggaacaaaggctccggaaactggaatgtcagtctcaggtctgtgacagccacaaaatattgaggaatggaagttggcctgaacttagatcaaagacaggtatgttgacacaatttaaacctatcccctggccaggcgcagtggctcacacctgtaatcccaacactttgggaggctgaagcaggtagatcacctcaggtcaggagttcaagatcagcctggccaacatggtgaaacccaatctctactaaaaatgtaaaaaatagccgggcgtggtggcacccgcctgtagtcccacctacttgggaggaggctgaggcaggagaattgcttgaactcaggaggtggaggttgcagtgagca

SEQ ID NO: 317878 - DNA, 4001 bp, Homo sapiens
aaagcaagtggcagatacatgtggcatacctccagcatagaatagcatgagagctgtggttcaatctcctgagttggggagataagtaaaaattgagcttttgtcccaatcagctttttctctttctttttttcttttttctttctttctttctttttttggatgataatttccacagctctttggaaagacaagacagtcagcactagacaatactgtgcattgtaaaagacccacgatgtttcttcaataatggaaagtgaatgccatcaggtagtggtaaaggaggatcagttaaaacccaaagcctctaccaggcaaaaggatccctgctggcctcaactcttctccctggggagtgtttcttccccagcaccagctgggaagctggtaggggtggggtgcatttgtgtgaagtgaagctcagttgcatgaaaaaggtatggtgcggcaaaagaaataaaccatttgacaataaaacatagtaggcgcaagggaggcttcttcctgcctgcagaggggaaggttctgcatctcaatcgcaaacgcacaggatgttccaagcctaagggaacaagtgcaaacagactcatgcccacaacaaaacctggcggaccctgcaaatcaactactgtggcaggtaaagctctgccctagggcggctgcagagcctcccaggggccagctgatcacttcctttgttcagcttgcaaagatggagtagccacccattcccccactacacacacacacacacacacacacacacacaccatccaattcactatagacaaagcacaaccgcactgcttcgtgctaaactaaaaaacgttagtttttatttattctatttttgtaaatgaccatcccagcctgccatatgtgcctactatttgggggcatcattacagcgcatcaccacggaatcccagccttgctgggcgccggtgaagacgcggcttctgtacctgataatggcacgtcccctctccaccccgccctaggcacaccctagcgcatctgacacccgccagtcgcggtgtctccgtcttgcacacaatgggttgaacactgcatgcatacagcgtgcgcccgcgacagtaaactaaaatctgctctaaaaactcggccttttctttgatgtgagggagaaaagaaatgaaaaatgtaaagtgcatcgaaggcacacacacacacacacacacacacacacacacacacacacacacataaagttgatcattcccactgcagccacgttagctgtccagtcccataaacgatacattgaaacatgagtcggactgaacgcaggcaagaaggggacacggcgaggacaggtggtccagacaccctgccaccctcgcggcgcaggggtcagagccgtggggctggagctgggagaggggcgcggtcgggctgccaagtacccctggggaaaggtgtcatctctccaaacccagcacggccaaaaggatccttagacaaaaagcacacctcaacctggggcggcaaaaaccgacactccaggcggagcagtggtcctgggagagccgcgagccccgcgctcctggggaactaccggcggtgggaagggaggataaataatccaaagttctccgtgccactgtttgggtttcctctttgttttgttttccccaaaccccagggtcgctcagtctgtgtggcgccggctggactgaccgccgcgctccgccacccggaccccgggtctccgtccctccccggggaccaggccagagaagccggcgggatccgagccgaccccgcccgcagcgcagcggacagggagcgagcgaggagggagggagcagcggcgcccggactcaccgtgatccgcgggatgttcttcttgccttggtaggacatggtggcggtggtggctgcagcggctggctccctccctccttcttctgctccggctcgcccgcgccttcctcagcgcacagcgccccgagatcaggtggagtgaatggtgcgctggccgcgccgccgcctccgcccgcctccgcccccctcccgggctcccgcggcggctgccagagacaatagtaaatctccccggtccccctttcacccccgcccccccacgcacaccctcctccacccgcgttcacgcccgggttttgtttttttttttcttttgctgcgccagctgggaccccataagacaagaatggctgatctgcgactcctccctcttctctcttatccctattgattttcctctttgcatctgcctcacccactttttctttttctttcttttttttttttttctgattcgcgagtgctgcggagtcaggctgctccacagccaccagggggcgcgaggggcttttcgggagcggaggctgagtcccgggggtgggagcatcagctacgccctcccggccgcggggccgagttgcgggcgccgccgcccccagccagctcctcgtcggatctcctaccttccccgccctagtttcagaatggagacggttcccggcttccctcccggcacccgctctcctctgccatggcgcgggtcgaatgcggcggccgcgcctttgttcgagaggagggctgggcgccgcctctgctgctcgcggggtggtaaacagcggcgcagccccttcagacgccggagactggtccgactctgcaacctggcgggcctgctggggtccccagacccggaacatacacattagaaaatggaaagccgtgactcgctctcagaggctgcaaggggcacggtagcagtggactcaaccattccctgtatttaaaaaatatccaagtagtatcttgttaaagaaactccactgcctgactgagtctcagaatcaaagaaagaacatgaatgctgctctgtgagtaaaaagtagaaaacacctgtggagtgggaaggcagtagcccagacacgttcctggtgcgcagccatggatttggagtagaactgctattgctccccatcagtaatgaaccacgtgcactgctcacaatcccgagtttactttaggcagggctgacagacgaaggtttatatgttattacaagcaaaaccatggcccttcggcgatggaatacattgtcctttagctacctgctaaaatcaaacggccaaagggagacatatttggagaggccactgtgggtggggtctgagtggtggctgggggtgagggagctcctcaactctcacgacaaataattccaaacataaaatttaaggaaccaaaaaaagacttgctatgcaaaaaaaattataaaaccctttgaagacaattttcccaccgctccccaattgtcaatcttaatgttctattaaatagaaatcctgtatgtcactaagcatgactaaagctgtgttgaatcttgaattcacgtttccataaggcagcccactgatggcaattctagacatcttgtcattaaagtgaagacgtgcttgcgataaagaaactatataaggcatccacagaaagagaatacagaatactccggcttgggctttccataaacccgaaacgaaccagactggtcacataatccaaggacacacaaagccccccttaaacactccctctcaagtgagttaatccaagcttctggttatttatggttaattggactgaatgcagtcttcgcaagaaaagtccacagcagtctccactttatttctgtgatactctgcaaaggaggatgaatgccaagcaaagatcacctccctatactcttgcaaaacacaagggggaataaaaagactgggccaaaggcacgccctaaacattttgctttgttcttaaagcgtaagtgctgagaccactagccaagagttgtgaaattacaaagcattctggggattggcatgcaaatgagcaggattatatttagaacagagtaaaaggagaattaactacatactatggaaaccagcagagctctctctctctgcatctttcctgtagattttactgccccaaacttgctg

SEQ ID NO: 317879 - DNA, 4001 bp, Homo sapiens
aaaggtgttggaatcaatgcagaagggctgcgtctccccagacccacagaagggcaaaatgcagttcaagatgaagaaaggtagccaacagcacacaaacacacccatgatcaccgacagagtcttcaggactttagtttctcttttgaaggacatcttaaaagaactttccggttgagaacattcgacaggctttccattacctgtggtggtctggcaattcttggcgtggactgctgccctctccaaggccgcaatgcgccgtatttgtttctgagcaatcctgtagatcctggtgtaggtgacaatcatgatggccacagggatgtaaaagcttattacagaggatgagatggcatatgtcctgctgaggctggagtcacagttgtctatggtctcagccagggaagtggcatttccatcagaggggcttgtgggttttgccttgtgccagctgagctgcactgggatgaaggagatgagtacagacaaggtccatgccacactgatcaggatgaaggctgccttgggggtcatctttctctcataccggaaagggctggagatagcccaatacctgtccacgctgatcacacagaggttgaggatggatgcagtggagcacatgatgtcaaaggccacccagatgttacagaaggacccaaagggccagaagccagcaatctcagccactgccttccagggcatgaccaggacggccaccaagagatctgacacagccaaggagatgacaaagaagttggtcaccttggaccgcaggtgtcggaacctgataacggcagcacagaccagcgtgttccccaggagcgtggacaggatgagcagcgacaggaaacaggcagtgaggatacgaacagagaagtccctctccaccaccagcccagtcccgtccatggcagaggtgttcagagtcctcatcttcctaagagaaagcacatcaggggctctgacacccctcaagttcccaagcagggaataggggtcagtcagatttccaggagtcctccccaccaggcagcactttgcacagccagattgcttccctggcagagggcctcaccaacattccatgagaggaccgcttgagtggcaatccaagtcaatcccgtggatggtcactcttgatttctacatctgtcttctgactcccttgctgcaggtcactgtcttgggcaccagaaagcccctgaattccccaaataaagcactggctttttagcatattctaaatcatcaatccagtgactcctgggcctctgctctgctagtcagttgcaatcacatttcggggctgttgcttttctggtggtgacaggagattctccccttctgagactcagctgaaaatacatgtcttctcgctcctccaagcccctggctcctcagcagctctccaaacgccttaaaaagcaaaaggaaaacacacggtctttctccaagacttaagcagatggcatcattactcacgtcaagcccaacctaataattcccagggcgagcccgtccgagccacctaccttgccttggggtcgtctctctcaaagcccctggagcttggaatgtggacttcgctgggggcagcggctccgaaacgttgaggaagcgcgcctgagcccagccagctgcgcgcagcaggggttcggctcccggtgcgcaaaaatcgccggggtgcgtttggggaaaggatcccaggccaggtcccaagagaggcggcggcagcccacttccttgaagagctggagattgttcaaagggcactagaccccggctaagggctcctgggcgctcggagcttccttgggagagagcactcccaggactggtcacctgggcagcttcttttcttggcttcctttcgagagcccagagccttggcgaacctcgggcggccttcagccctacagagcagggccccgcgcctccccgcaggcactgcccgcgacctctcaggagcctgtggcaatgcgaggcagcgagccgagctggcaccagcaagcgcacaggccggcggggttcccgcggggcacagcccaccccgcccgcgcgtcccctcccctgccctgggggcggtcctcgcttgacaggcagagttgcgggcgacagccgcacgtggtccccctggatggttctgcgggcgaggtgggcggaggacgccccggtgagtgcttgccctccctggttacctcgccagtctccggatccccgcgcagcacgcgcagggcccgcgaggcaaatccaatgtcagaacctcaagtaagcttgagtcccctgaaagcaaagctcagccccgacatccagcgcctcttggggtcaacccctagccggacccaaagccctaagcgagcgggagcaccccccattccccgcacaccaactcctagaacggccggcggacgtccgacctgcgttgtctccaagtgtcccctaactagggttggagatgcccgtgggcgcctgtactcaccgctcgcagggagggcgcggcgcagctgggatccgggccagcgcgcgccgctgcgccccgaggggactcactccttccccgcccaggtggcgggcgcgtcccggctgcggtcaacgccggactccagccggtgccccgcacctcccgagcgccccaaccccagcgccgcgcgctccgtgtgcccggggcgccctctgccggcggctgcgacttcccgagcgcccgctgtgccctcgcgggcaccaacctcactcacaagggttccagcgaccgccagggacccgcgccccgactcgctcttcccggtccatgactgccagaacctgaaaacagggaagcggaatcttctccactcaggactcctccgcttgaaacaccctgaaaaacggacaagggtgaaaaattttactttgctggcattgcattcgtgaatctatgtttcctcctgcgcgcccactgcgttcaaacctggggcgctagagcaggcgagacgcaagccttactctcaaagagaacggcagagcgggcattgactcagcagcatccgtgttccccggtgcacgccttacgttgttcccccgttaaaagaatctttccccgccaggccggctcaacccgcttcgcccaggtggaaatgcggctcggaaaggtagtggggcctgctcaaagtcacacagctcacgcgggagccgcgccgctgcccacctgttcttttaactcaccgcatgtggtacaggagcccacaaactggaaaattacctacagggctaaaatacagggaagagtcatatggaggcagcggggcctggtggagaaggagcccccagcctcccctggttgccccaggcaagctcacaggtgagactttgcactaattgtgcataaattgcgacactgtggtgccttcctgtgccttccgaaaggtgggaggagaataagcatggatcccccaagtcacactgcctgacttcctggtcctgccctgccactgtcggctgcatgtgcactctctcctctctgagctcgggttcttcctctgtgaaacggtgaggacataacaggattgtcataactattaactgagacggtgtttccagagggcttggcaccaaacctaggaccccgtcagccctccataggcaggaacccctgggacccattaacaaaccaacagtccaggccaagcgcggtggctcacgcctgtaatcccagcactttgggaggccgaggagggcggatcatgaggtcaggagatcgagaccatcctggctaaaacggcaaaaatacaaaacaaaattagccgggcgtggtggcaggcacctgtagtcccagctactcgggaggctgaggcaggagaatggcgtgaacccggtagacggagcttgcagtgagccgagatcgcgccactgcaccccagcctgggcgacagagcgagaccccgtctcaaaaaaaaaaaaaaaaaaaaactaacagtccaatctccacaacagccatgcaccatatcagaagcaagaat

SEQ ID NO: 317880 - DNA, 4001 bp, Homo sapiens
agtggtgcaatcatagctcactgctgtctcttactcctgggctcaagcaatcctctcacctcagcctccaaaatagctggaactacaggcgtgagtcactgcgcctgactccttattactattatccagtccagtaccctcatgataaacctggggcccggacaggtgctcctgccaccataggctactcactgccaacagaatcaagttcaacctctgtgcttggcatttaaggctctattgactctggacccaggcttgttctccagtaccttccccagaaagaccctactaccccatgttttcccaacagattaccattcgagtacaaagaaccagctagttctttgctcccgttctcctctctaaaatctcccaccctaggcagaggttgcagtgagttcagatcgcgccattgcactccagcctgggcaacaagagcgaaactctagctcaaaaaaaaaaaaaaaaaaaaatctcccaacgtatgaatctgcccagtgattttctatccatctatcaatcttaaatgccacctcctctatgaagcccttcctgattcccttaggtaatcccattccctctagacttagtctatacttaatccttttacagcacttaccagagactgcctcatatcatagtgaagtatgcacacgtctaactcttccactagattatcagctccttgatgatatgggttgattcacagtcatttctgtatccttcacatccccgggaaaagcaacctacacacagtaggtggtcaataaatgtttactctctcaccaatagtatgtttccatgttgctactgtacatttcccttccatgtacctccgcaacagaaagcaggccttttcactgagtcatgcaatatttaatgagcccataaatgggaagcactgtcccaggccctgtagactcagagataataagacacacagcctgtaggattcaaggaactcagaacccacgtacaagtaagtgttttaaaaatacaaaataatgcaataaacacacaaaaaagaggtatgtgcagggcttaggggaacacaaaggtgtgtgccgcacctagaggtgggcaaaagtcagggtcacgaacactcttgtacagtgtgtaacaagagctgaacattcactgccagatcctcatggatgtttcagtagttagaaaatctaaaaatactaatcatgaaattgacctattgaaggcatagtccggctgtgttgtggatgcagactttaattcaaaagtcaaggaattcactgcacctggaaaagtaactctcttttctccgtctgtctcttctcggttgcggtttggaaacagagacactgaaggagctgtcttgaatagttaacacggccagaacgtcagtgcatgtaaaaagaattttaaagtgtgactacatttttattgagaactccctctttccccaggtggatctgcagggcagtcaccttcatcctgatccataactgcacatttactgtttgcatctcccgccagacggtacgccccacgaggcaggcgctgagctcaggatctcactcccctccgagagccgggcggccccaggcctggaccatagtgtgtgctccacaaatgaatgaaaggtctcctttttcacttccacttatttgcgggatccaggcctagcgtcgctcttttgcccttagctgcagatctgaagtggggctgcccgaccccaattcccggacgcttttcaccccagccccggagactccagccccgtttaaatcctgacactcggaaactctcttctaacacttgcaaggtaccccttttacctataaaaggctctcgggccgcgagatcgccgtcagagcaaagccaggctactaccgcaggtaccaagacagtggcaccgcccgcgcctccggaacaggaaaccgagggaattaaaaagcaaacctgagaaagctgggccaagggagggaaaactcttcagcccaccgcagggccttgtgcgcggtgattggcgcgtcaacgaaagcgatggacgtctagaccaatcgtcagcaaaagaccctttggagcccgcgccccctccccctacgtcctccaatccgaaaacgcaaccgggtgagggagcgcttccgcccggagagagctggccgggatgaggcgccggctttcccgggtcttctccagctgccaccgctttactgcaaaactgacgggcgcaaaaacatgagtgactccgcgggagggcgcgctggtctccggcgttaccccaagctcccagtgtgggtggtggaggatcatcaggaggtgagcggacggcaacagggctctggggcagaatcagcggaagccctgacgctcagagggccaagcagagggcgcaaccttagcatcggaggccagagagttaaccagagttaaactgccctattccgttgctgtggagaggaccccaaaacagctaactaggaagaatgagaactgacatttatgggcgcttcctacgagtcggggcaacttatttacctcggtttgcccccaaatcccagaaccaaacaaaaggtggcatcgggattcgaaaccggacagtctggctgcagagccctgtgttcttaacctgcagttaactctggcttccaagtatctcctggaatcgccaccacagccctgctgtttagatgggaggctttatgcttggaacgtgggctctgatctgaaatggggacagtaatcgtaggactcacagggctcttaggagtattattgtgtgcatactgtgtttaaaaatcttttttttttcttttttgagacggagtctctctctgttacccagactggagtgcagtggcgcgatctcggctcactgcaacctccgcctcctgggttcgagcgattcttctgtctcagcctcctgagtagctgggatcacaggcacgcatcaccgtacccagctaatttttgtatttttagtagagacggggcttcgccacgttagccaggatggtctgaaagtctgacctcacgtgatcggcccccgccggcctcccaaagtgctgggattgcaggcgtgagctactgcgcacggcccatattgcgtaaaaaaaaaaaaaaatttaacacggtgccctgcatagataaacactaaaaggggtttccatgtttatggccgtgctgatttacagtagccaaattggtgtcttaatctagacttttccaagtcaacaaaggaggcccatggatctaataaatatgttttaaagtagcatcagtaggcttgggatgggaggcagttctctggacgttaaaaaagaagagggatttactgttggtgacagctaataggagaggaagataggtttctcaggacctggatatagtgtctatgaccttgagagaatgagaaagcctaggttagacggtgctttcaaattaggtattaaacctagaattagagaagatgtaagaggagaaatggcctttatagaccacctagcccaaccccaccattctaagtgtaccaaaaagaccctaaccagcctggacagcagagcgaaatcccatctctacaaaaatagaagtgaaaaaattagctgggcgtagtggtgcgtgcctgtaatcccagctactcaggagactgaggtgggaggatcgtgtgaacccaggagtccaaggctgcagtgagccatgatcacaccactgctttccaggctgggcaactgacaagcccctatccctttttaaaggaaaaaaaagaatactttgagacctagggtaccttgaacacctagttaatgttagaacaggcattaagcggtagtttgttcctgagccccagtcctggtctgtttccccacatgacctgttgagttcaagggggcagcaggaaggccgctggagatgcaggttggaagttctgaggacaaagtaatgcttgagattatcatctgcaccatctacagtaaacaaattttatgtttttccactttacagcaacatagtatgctttcaat

SEQ ID NO: 317881 - DNA, 4001 bp, Homo sapiens
tgatcaatcaaatctaagaatgcatttttaaaactattttaaccataaatgtaaagaagttcacccagggtactagtagaactctaatagcataatgaaataaaatataaaaagccatcaattcatttatattttattgacaacacctaaatattctccataattctagaattatattctacctagttaaagcaaataaaatgcatagcaagagggaggagagcttttcacaggtagcaaatttcacaagaaataagcaaagtgtagaattatagtctacctaattaaagcaaataaaatgcatagcaagagggaggagagcttttcacaggtagcaaatttcaccagaaataagcaaagtgcagaaatgttggggaaaattgtaatcctaaggtattaactaaacgtaactgaaaaaaagattaaattcagcaagccatttttttaaaaaagcatcataaaataaatctctgctaaacagatttttacctatatatttataattaacaattctgaacagactaaaaactaaataaaactagcacagtaatttagcctttgatttatatttgaaacacttttcctccagtatcctattgagacccctccaaacatttttaaatgcttccccaaccccctcagacgacttgtttaaattaattgtattcacaaacccctatgttcaaattcacagtcccttctaatcacaaattttccatcctcctcagaggtttactgagcgtcaactatacatagtacatttagaaaatataaaaacattctacattcaagatcctttcctctgaagtcttacaatccagccctaggaaaaggtcaaaatgtccaaagtgtgatactccaagtattcaagcagtaaagatcttcaaccatattcagtccttctgttccccttcttggaatgcttttcccctggctggattcttctcatctttcaaatctcagagatagttcatgacaccattgagctattttctacagtagcaacccattcctttccttcactgcttttttcccagtttgtaattacatatttgattgcttgtttgctggtttattatccgtatccagtaagagaatactctacaaaaacatgaactccactgcattgtcagtgattaccaaagcactcaataaacacctgataaattaatgcacaggtctggtgttccgaagaaaggtctgagctagacacactgggatatagatgataatttaccatgaaaactgattttataaattaccagtgggacgtatgtagggtttgaagagaacctagaatgaacacctgaaaaggccctatatttagagttctggtaggataggtaaaggagactgtctctctcctccaatccactttatgctttttaactgtgatataactatgccacttaaatatgactgtgtaactattttacaagtattactgtcatcaccccttacttcccctattggacgcttaagtttcttggaaacagaactgatgtctgctcatcccatgatacgctcagcatattgcaggaagtaaggttagataatcatgaacctggaaaaagggcttcttactaggtagctgtgcctggcatttccgagatttccaacgtgcacccgccaactccgccgccctaatcgcagagctgcccgagccgccgactccccggcagggggcgccgcaccctcctccgaaggccgctgccggctgcagtccccgcccccagccccgcggtcacctgcagcgggtgcactcaggcctccgctcggccggctccaccggcagctcccacagcccgtccgcactgtcgtcgtccgcctctgcgcccagggcagccgccgccggcactgcgccgccctcccgccgctccttgtcgttcggcgtctgagagcttgaggccccagaaggccgcgcaacgggctcctggagtgttcgtgcctctttctgcgactccatggcggacactccggtcaggccgtggcattgaagcccggctgccgccggggggcgccacgcgctgtagaaaccggcccgcgccgcgtagcgcaatgcccgcacgccacgtacggggggcgggtctccgaagcccaggctggaggtcccaccctgccgctgggaaggaacgagcccattggtccgtgcccagtgggaccgttcacctagaactgggtaggcaagtgtgggcagtgttggagtgctggtgaggttaagtagcgtcattgggagaggtaagggaaacctccccgagaggaccccagtaccaagcccgaatttaactcctttaaaagttaaaataaaatggaattctgcattttccgccttgggatggcagtttaagaatttgcaggatttccacgcgtgcatgcatcgcaggtgcggcagctgatgcacttattatttaaaggccaacaaaggagaggttatatccactgggaactactcacagctggtccgtttccttatgtgaatttcctgctcttctatgtcttgtgctaataagacatcaagcatgctattttacactggacaccagatatttgttaaattagatttttagatcgtccccgatcaggaagcaataggagagctggcccggggtaccaataggttttatgtatgaggaaacaagccctagaaaggtaacgttgcccaggtatttaacaactactggatacggcggtatatagcacagcagctgttttttaaaagccaaaatgaaatctatgttagaatgaaggcagaaatactatttacccaaaatgggtatcgaattccttttgtttattaatgctttgtgttacttccagcaatacacaacattaaaacagaattaagcttggttttgatcaatcatgtgaattaagcttaggaatcacagttgtcttaactctatagttgtaatagattaaatgtgaggcaaagtagacaacacagtaatagagcaaatactgtatttcttaaaatgtttatttcacattagatttttcagtcatcttaaaatcaagtttgtgaataaaataccgtgctgttttcaactatcctacgttctttccccccggaaacagcacctctcttttcctttggagcgtcctatgtgagggatagaaaaaggctgaaacacccacctggtgatggacgtagagtgggagaaagaactagcaattatgccatttggaatcggaggataaacaaaatccagaaactgtaggaaaggagatgaatcagaaaattcatcttgtctgtagatttaggttggggaaccaattctttaactgccaaaattaaattctcatgtgacttatctttaaacgaaaggaagctgctcatctttaatttcaagaggtgaaatgtgctcaagtcctctaaggtcccttgagactcccaattgtgtggtgtgagaagacagatgataaggaaaaaaaaaaaaactttttatctaaggaatgcgagcagtcatgtctcactctcccttgagctaaataattacctcttgaaggcacttgctatgcaggccctagactgacaccgagtagccataaaacgccgtataccctatagttcaacaatatgtatagccaatcactaaccaatgttatttctgtaaataaatgacacttcctgagacatagcttttgtaatgcccccctctgctgattcgttctcttttctttaaaaactccagcccattttgttctccagagcactctccacagcaacctggaagtacgacctaggctacagtcctcaacgttggcccaaataaactctctatattaattttgcctctgctccttccttttaggttgatgtgagcctacttacttggggcttccttttaacaccccatatcagattattggctttacccttcaaagtattcaaaatccaaacatttatctcacctactacttctgccctggttcaagcccccgtcatctcttgcatagaatattgccaaagacctaagtggtctcctgctccatctccgctc

SEQ ID NO: 317882 - DNA, 4001 bp, Homo sapiens
tatctgagaaaggtcatgtgtgtcttgtctagaaatggtcaacatcaccacatgccatcacatggatactgttcatggaggcaacgtgggcactgtgcaaaggatggcacaggatttaaactcagactggggatttccacttagcagatagatctcagaccagtcaattcaactttgtgagccccactttgcaaatctgtaaagtgggacatcgaatcaaattcatattttacaggaatgttgcccacaccagactgatactgaatgtgtggaagaaggctcagaaaacttcaagctcttgccacagaggttgggcttagtggctaaaatgagaagagaaaggcagaaaagccccaggcatccattccatttacctatgaagtcaatggcctcgttgaaccaggagctgatgtctgccttgtggttgtcctccacagggatgctcttgtactggtagtgaccctcaaaatggttgggacaattggctgagacgttgatcaaggcagtgatgcccaaggcatccagcatgtccttgcgggaagcgtgatacgcactgcccaggtacagaaagggcaggatttccaccgggccaccctgaaatccagaaatatccaacattcatcaagcttgctcaaagccaaggccagtgcccatacccacaaaaactttctgctggaaaagtcaatttcagataccgagtgaactcagttctgttgctggaggataaataaatagggaactaagcccatttgcctgggcaggaccagcaagttcatttccgtagagcctacaattggagactcggctccgtcagaccacttaactgtggaataaatcatatccctgtgtcccctccgttataaataatgctgcaggtcactttctatattctccctggcactactcttccatgcctttgccagttcttacttcttccctgtggcagggacacctactaacctgatcgtagagtggggtactgcaggaactgcacccagattccgcgctgtcagggacgctagtactcaggggaaggctgagccccatgggggtcgactgtttgctgcacagctccgggcaggaagccgaaaacgcttcgtatcctcctgggaatacaaagacattttttttccccattagtgacaccgggacacggcaccttcatacaactcccccacccaccaagggctggaagtttacatcggaaaggcccaggcaagtctttgtttccagagccaaacaaagccaatgacaagttccagagataaatgtactccagcgcccacgcgctgcaggtggggcgatcccccgggagccgagagccaggggtaccgggcaaaacctcaggggtgtgcggcccgccccgagcttccccgagggcgtacctttgaggaagaagacttgcgcggcgcgcgcctcgcggcagagcgcgccggccgccagggccagggtgccgtcgcgcttggcgccgtccagggcggcgctgcgctcgtccagcaacaccacggcgtggtaggcgccggccagcaggcggccgcggagctcggcgttgggcacgatgtgctccaggcccatggcgcccttggcccggcgccgcacgatggtgctgaagcgcacgttgacagagccggcgatgtggccggcgttgaaagcgaagaaggagcggcagtccagcagcaggcattgcgccgctcgctcccccagcagcgcccgcaggcctccagcgtccagggtgcccacttccatgaccatggccggcctcagcgcccccagcgtgatcggccctgcggtgctctttgtctgttctcggggccaagggcagggcggcgcttttcgaggaaaagctagacccccgggtctctctgcgccgaaccaaaagccgcttttggactgagagaggagcgtcacgcggggctccgggctcctcggcttcttcgcggttcccccgactgcccctccgacccgcgtcgcacacacagcccaaatgtccttcgcagcgagcctggcccggggagcgcgtttatatgcggcctctgggggacggggcgggccagacccgcgcgcagggggagggggggtgtttgtttgaatggtgatcacgtgacggggcggtgacgtcacccgccctgccaggccaggcgccgccgagccagagggggagacgtcatcagcctcggagctgggtccgctcgccgcgcgctggctcgcggcccggcccccgccctgctgtccggcctgctcttggcgcgtccccagggaccggacccgcgccgcgctccaggcccagcggggaggaggagggctcgctgccagctgaggctgacctccgggatgcgagcggccgggagaacgggcgacgtgccacctgccttggcctcgccgctcctccctctctccctccccgagtccccttccccgtgcccctcggccgccgacctgaaccgaaaggggcttcctgtgcttttgcatactcttgtgccccttttcctcatttcctcatcactaacaggcggggaaactgaggttccccaggcgaagcgactgacttgcccagaaccacactactggggtgggggcagcaaataggcgcctaagatgaagtttagagaaaaatgaacaactctgccgatagaaaagtcgtccctaccaagaccgactcgagcgagttggggcggagaggttcagggcaatgctttcctgtttcccagacttttctttaaggtggctttaaaatatctacatttgccatgaaagtgtgagcaagcaaactcccaccgggaaataatgctattcctagtcttgtggcccccggaagacttggagccaagggaggcaggtcagggggctgaaatcccggtgaggggtcgcaaggccccgcagtggattccagggtttggcgtttggaggggtgaggggcgacccgcagcgcgactcgacggcgccccccaggggccgcccgacacgtttctgtcaccttggctccagactgagcttctccatccctttctttattatacaaataggcagtatacacagtgagcgcccactaagcgctgggctgggggcctccaacccggaacagaagccggccacaaccctcgctccctgtcgtcgcggccgttataggccgaaagcaaaatccaatcccgggccattgtgggcggattgccaggacctggatcgcaacacttgggaagacccccgccccgcccagcgatctccgtgccctgagtcccagtgacggccccctggacagcggagcctgctgcagcgacgcgacgcgctgggtacacaaacataaacattgcgccacccgcccgggtgccgagtcaggaacattctgcggtttcctcccctcctgggggaggggatttcgctggccaccctgtgtcgtcgctgtgcgagctgtatcaccagtggcaacttctgcatttgcctcgcttagcttgtgtgttttcgcctgcgcaaatgttctgcctggattcttctagaaaagttcagggcatggagtgcttttttttttaaaagggcgtcttctaccttcatttgaacattggtcgaggacagcaaagaggtcctcagataagggcaacgccctccctgtatggagagatagaagaaaaagaaattgtttatactacttattcagctgaggaactcaacatagtttttgcgttgaatcatagaatgttacagctgctgacttttcactgcataccgacttgatttgtcccattttttttctcaccaagagcatttattataccttcccctaccgaaatttttcaaaaagaaaactttttaagagctgggcgctgtggctcacacctgtaatcccagcacttcgggaggccgtgggggggcggatcatgaggtcaggagatcgagaccatcctggccaacatggtgaaaccctgtctctactaaaaatacaaaaattagttgggtgtggtggtgggcgcctgtaatcccagttactcgagagcctgaggctgaacccg

SEQ ID NO: 317883 - DNA, 4001 bp, Homo sapiens
cgctgttccgcagaaatcctcacactcattccagaaatcctaaaggccagggctgctggctcagtgcgccggccggcgatgggaggctggagcgcctggggcgccaggcggccactgacagccggacctgcccaacacaagcgcgcacaggcacacacacacacatagaagaacacacacgagcgccccgcgcacacactttcacttccagcccagttacccaattcactctcactaccacccacccccatcctaatactcagtggggatgggaacagtgttggggacacttgtccccagcccagggaagctggagatgatgtaattagtcatcttccttcttccccttccgcactctgagtccgatagggcctggggccaccagatctcccactgtcccaagctcagctggtggcttaatggggggaaaaaggccatttctcacttgggaccaggagcctgggaaagagccttgggtgtgcccaggaaagttccctcaggtcaacctccaagggcaatgcctccaggccacacagtctagtgtctagggagctgcgagtgagagaagggctggaaggggccatggtgacaggggctggagaagacttttgggagatatcagaattaaagttgggagttgctattctaccggtagactaagaaaaaactgaaagacagagagggagggaaggagaacgagatagcagaaataagagaagactcaggggagaaatgggacgaaaaaacaggaaagccagagaggtaaggaaaggagaaagaggagaaaggagggaagctgaagaaagaagagaaagaaaatggagagaggaagggaggaaggaaaagagtgagggagaaattaagggaaggtgggggaaagaaatgagagaaggaaatgaaagaaagaagaaagaaaagaaggcaggaagagagacaggaaagaacgaagaacgaaagaaatggaaggagggaagaggggaagaaaggaagaggaaggagaagagaagaaaataaaggggggagaaaggaaagaaggaagaaagaaaaaagaaaggcaggaagaggaaagagaaagaaaaaggaaaaagaaaaggaggaaagaaaaaaagaaagaaaaagaaaaaagaaagaaaaaggaaggaaggaagagaaagaaagaaagaaaaaagaaaagagggaaaggaagagcgaagggaaagaagaaaagagagccggccggaaaagaaagagcaatcacataaaaacataaaacacagatctccaacatgctgtgttgagacgcctcttctgggttaaaacaaaatgaaaacagtcacagacgaggcaggggaaagtgctggcaaagcgtgggctcctcgcagacagctccaggtcctccggccgcaggcgacgaaggcagagcggctggagagcgcggagccccggcggagagcggagcgcagcggctgcggactcaccccgccgcccggccccgcggcagcagctgccgctgccgctgccgcctccgcctcccggctctcccgctcgcggctcacctcggccgcggtccccgcgcagtacccacctctgcgccgccgtgttggcgtccagcaccccggcgccctgcatccacgtccgcaccgcgttcatgccgctgcccagcggctcttccttcatgctgcttccactccgttggatgctttcctgaatcccaaacatgaaaacaaccttttcttgtggaaaatctcctcccccttgaaaaaaattaaaaaaaaaaaaaaaggaaagaaaagaaagaaaagaaaagaaacaaaaacgccaaccagagatttttttttttctcagacgatgaactcgcacttagaagatcaaggcgggctggaaagcaaatttttaaaaaatgtaaacctctgctcaaaactgagcgataacccgaaaaaaagaagaaagggaaaatccaacgaaaagaccaaaataataaaattagagatgtatgcttggctgttgggggttgtttggttggttgatttttggtttgggtgctttttttttttttttgcttttttttttttttttttgtaatgatcacaggccggtggaggacaggaggggctggagtttccttttgtagaggtacccttcacttgaagaagcaggaagaaaaaaaaaaaaaaaaaaaaaaaaaaaaaaaaaaaaccctgatggcaatttaagaaacaatagactcaactcgcgctgccggctttgctacttcaagtgtcattttccacaaccaggcaagttttttcctctctctctctttttttttcctccttctctcccaaccaaagatgtttctttcctttgcgtgtagatgaggaggacgctggttgccgtagacagatacaccagagagggtggggggaaggggagagagggagagaggaaagggggggagggaaagagagatagagaggagagggagaaagagagaggggtggaccctgctggatggagattctgttttctccttgctaaaatagaagtgatttgcaggctttccctatggaatccagtttgactttccccagagctaaacacaggcacactaaccccaaagggaggaggcggggcccgcgcatcgaggccccgccccttcatttgcataacgtcatctttccgcccaccgcagccaatcgcggcccgggagccggctcgctggcggcgccaggccacgctctctcattaacatcccgctcccggtggcgcaggggagccggccaaagttcctcgcaaagtggcgagcgaaggagcgctgagcactgacgtctgggctggggaggagcgggtccgagcgaggacggagaggggacagagggaaagggaggcgggtgtcttcctcaggaatttgagctggggatctgcatcctggccattgcagtcctttagcatcctcgccgcgccctgagcgcgctggaggctcgcaggctgcgccctcccagggctgatgccgcgtcctgctccgccgttctgggacgtcggggacaaaagtggaggagacgggagagcccgggcagaaaaagcaggacgcgcgtcccaggtgcccacctcttcgctttgaggcgggggcggtgggatggaatatgggtgcgcgaggtcggggctggtaactctcggaggggcacggcctccacgctgggagggatgaatggacgctgggccccggcaaatgaggcgctgtgggtccccaggaagtggggtaccaggctctactcccaccccggcctctgaaacgcttctctctcggccgctagcctagaggctgccagggttgggcactgttctcactcacacgctcacctctctcgggcagtcctcgagatatgtgaatggtggaatgaatgctctcactggggctgtgtcaggatgcgtttttaaattttctcaaattaaatgccaacccctcattccccaccccaagtagttggttcgtttgtttttagagtaactaccaaagcaacagcaatgttaaccgtccttgattagctggttatttggtgtagggtttttctcatcctcctttattcttcctgttaaaaaggagggcttgaacaaatccttcctaactctgtctctgccatatgaaaagggtggggggagaagagaaggaaggtggggagaaaggacaaaaaaggaagaaggggaagagaaaatgggaaggaaggagggagagagaaaggagagaaggagaaggaacgaatggaaatgggagagatggaaggaaaaagggaaagaaaaaaggacgaaattgtctccctcctcaggcttttcagcatgtatctttgtggctggcaaaggaaatagctagaagtttctgggtaatgtaccccatcattttttagcaggttgtaacctctaataagcacatggtgaacttctgtttcattgccctcaaaggaactccctgactgcagccaaatctgctaaggactccttcggggaaattatctgccagaaatccaggtcccctttctgctggcctt

SEQ ID NO: 317884 - DNA, 4001 bp, Homo sapiens
ggaatttttgatttcccaggtctcccctctctaattctgtctgctttatccccttctagtctatctccacacacacccctccccattttttcctcaaaagcatagtttagaagttaaaatcgtggattttaatcgagcctggcaagcctgagttcaagtcctggctttgtcgctgtctgacctaggcctcagttttctttactttgaagtacaagtgaccagcctgggcaacatggtaaaaccttgtctctacaaaaaaatgcaaaaattagctgggtgtggtggtgtgtgcctgtagcccccagctacacaggaggctaaggcaggaggattgcttgagcccaggaggtcaaggctgcagtgagccatgatcatgccactgcaactctggcctgcgcaatggagcaaccctgtctcaaaaataactaagtaaaatgcaagtggtatcagtacctcgcaagttgttgtgaaggaaggaaaatgcatatgaagcacttaacgcagtgcctgacatgctcaatgaaggccagacacttttgtttttgccctgttctctcaaatcctccaagtctcaagtctgccctgcctctgggtatccgtagtcaagtccctttatgggcctgaatgtgctcaggattcctcagtccaccaagatgaaggagccaggaaatgctctgcacacttcaggatgaagggttaggaaactcggggcgggtgacagcagcttaggtacagccgacacagggcatttgagagtgctggcacttgcctgggagaaaacagtgggtagggaggctgggaaaagtctcggcctgtgaaaatgccacctcatgagcttcacctgcagtttccacaacagccttgttccccagccccagacctgtgactctgtcatggagggggtaggaggggatggggacaatcagagtcttgtcctccagcccatggacttttagagaaatgcctgacatctccggaagccagtgttctggtactcaggccctcttacccaccaccgacgaggggccaccacccctccccatctgagccctcttgtgcactctttctgctgctttgagcacagaggacttgtagagggtgaggtgggggcagagcaggaatggtcaaagggaagttgctgccctgtgagtcagaatgccctggactcgtcatgattcccagcaactgctccctgatgagaggacccctatgagcggcttcacaactcattggctggcagagcctgtcagagaggtgccatttccaagtagcctcctctggaggtcatctactctagccccctggatgtgagaatgttaagcacatcctccttggtgaatagttctttgtgtctaacctgagtccctcttgctgtgatttaactttaaaatctacattaggaattcctaggttgctactcctcatgtgaaaggagagaacagatcccctgtgaagcccatggtgcagaggatttgtgttagaacagttgagagagtggccgtcgtcagccctgccccaagatcagagggtgagggtcatgagtagcctgagcacatcctagaaggagctttgggcctgggtcttgcactaacacagctccctcccacaattcaggaggccagcctttatggggagcccagctcccccaggacaatttcccacaagagggtttaaccgtagctccattttacccctgcctggtaatcaggaccccccaatccaactgatcttcatggaaaggctctggaatttcccctgggcacagcccctggatggaaagcatgtgtctcctgagaaagagaccgatgcctagaatggccagctgcggagaggaattgccatgggaaagcggcaggcacctcttacctcggaacaggaggaagcccaggatcacccagcacagctgcatggctcctgcggtgcccatgtcagctgggtatgtggcgggcaggcagcagctcagtggaggctctgtccatagtggagaagagagagggagtgctggggcgggatgggggtggggactggctctccaggagcttcctgtcaaaagaatagaaggaaacacattgggaccagctccaggggccctgctcagccatgtccagatgaggatgtgaggctgcagcagcgactgtgcccacccagcatggcctctagtgcctatgcacaatgaccaaccatggcaacctggccccatccccattctcttcccttctgagggtccatcaggttccaccacagaccgcctgggggttttcctggaatctaacaccaatcccgcccagtactgtttcagaccaggttctcctttcccatgattcagcctggaagcccagcccaccagtcacccatgctccctggaccctgaattctccacattcctctccctcctcagggatcccaatgcagataggactccccacatctttcagagaggccctatacgcatgattattattccttttttacttttttttttttaagagttggggtcttggccagtaatcccagcactttgggaggcccacgcctgtaatcccagcactttgggaggccgaggtgggcagatcacgaggtcaggagaccgagaccatcctggctaacatggtgaaaccccgtctctactaaaaatacaaaaattagccaggtgtggtggcaggcgcctgtagtctcagctactggggaggctgaggcaggagaatggcgtgaacctgggaggtgcagcttgcagtgagccaagatcgtaccactgcactccagcctgggcaacagagtgagactccgtctcaaaaaaaaaaaaaaaagagagagatggggtcttgctatattgctcagtctggactcaaactcctgggttcaagtgatcctcctgcctcggcctcacaagtagctgggacttcaggcatgtgccaccaagccgggtatcgttattcttaatagaaaagcaagagtccccctatttgaagcactcctccctctgcatcctcactggggtgaggtgtcccctgtcctcggcatccagcagcactcatccttatcccaggattctctctgttgcagactgcaagccagcattgtgacttttttcaatattcctaggacctggcacaatgcctgccacatagcaggtcctcagcacatatttattgaactaaactcaaaagatttaaggtcagggctgcgcaatggctcatgcctacagtccagcactttgagacgttgaggcaggaggatttcttgaggccaggagtttgagaccagactaagcaacacagcaagaccctgtctctacaaaaaaaaaaaaaaaaaaaatttaattagccagtcatgatggtgcatgcctgtagtcctagctactcaggaggctaaggcaagaggacctcttgagcccaagagttcaaggctgcagtgagctatgatcagagtgagactccatcactgaaattaaaaaaaaaaaaaaaaagattcgaaagcagaggaatgtcagaaacaatcctacctccttaatattaattatattattgttattaattcccttccagtctatttgccttccagtctttgacaatatgcatatacatatacaatcatttaaatgaatggtatccttttttctttcctttttttttgttttttttttttttgagacagagtctctcactgttgcccatactggaatgcagtgtaagatgtctgctcactgcagcctccacctcccaggttcaagccattctcatgcctcaatctccagcgtagctgggactgcaggctcacgccaccacgcccacctaatttttgtatttttagtagagacggtttcaccatgttggccaggctggtctcaaactcctgaccttgtgatccacccacctcagcctcccgaagtgctgggattacaggcatgagccaccatgcctagcccttttttctttattttcttaatattttattttgaaacagtcacaagaaaagttggaagtacattacacagaactttt

SEQ ID NO: 317885 - DNA, 4001 bp, Homo sapiens
ccacattctgggggacggagggaggcccaggcaaggcgcggccatggatctctactgccagagctgcgagggcatctggccagcaacacccggcttcttgggcgaacagtcgcccaagagtccacaattttcttgtgactcaaatagatggataggtgcatggatggatggtgcagaatattcatactctgtctaatctcaagtggactggagtcaacgcatttttaaatccatctaccttttttagaggcacagcatttaaaaccctgtagttcactcagctttccacttgaagctgcctgcagaggattctattacccgcggatccctcacaaggggccgcccgcatctgtgagcgcaggagtggcacagctcccccaggcacagctcccactcgcctccccacacaccctgctgcccccgctgcccttttccggcgactacttcagccccggccagcggtgagacccaggtcagcacaagggtttgtatggacaagctgcacctcgcaggggacctggaagtcgcctaaactactccagcaggacactcgtcgaagtcctgcgttttcttttaaatgcttttttctttttaatttaatttgatttttatttttctgtttttattttttcgtgcaattcacagaaggcatcaccctacaagctctcacaacttttccgctcctgtgcggggacgcgaggggtggcttgccccgcactattccccattaccaagagttaacactggtactcggagggggtgcgcagctaagctccaggcccctggggtcagactaggagaggcgggttcctggggtttgctgtaatcgatgctgctcctctgggatggggaggcaggagaaagctgaagtgacctgtgagactcctctccacctcacccgcggccaaaacgcccagcgccgggtctgggtttgcgaacggctcagcccaggccctgcgccagagcaccgcacccgggggcggacggccctgcagctccccagcctcttcccgcatcaactagctgacgcccgggcgcactggcttcccccgctcccgcccgcacgaaagccctgcccgacgtctgcagtcagcatcgcccgcactgcctagggagggtttgcgccgagacccagtggccgagtgagccacagagtcgctggtcctggggacgctgtcttctaccgctccccaccgtcctcctctttcctgtatctcaccccggtaccccgcacccttctccccgctcggccccgcgcactctgctcagactttacaagcactttctcggggcacccaggactcgacgcctcctccgcgccgccagcggcgctcgccacccttggcacgccggagggaccgcctccggccccctgcgcggcgtttctcaggggactcccagcccatccctcacccagctgtccgggtcccgacgccttacctttgccgaactgggggacaccgaggctgagcccgaccaagagccagacggctaccgagcgcttcatgatcccgtctcccggacgtgaccccggctggtcaggggtcgtcgcggagggcagtgtagccgaggtggcagcgcagggcagcagcagactccgcccctactaaagaattcaagaagacgttctctttcctcagcgctttgttaaacaaattcttggagagggcgagagtggtgactaaagagaggagcctttcctccccttttgcctgcgctccggcgcgcggaggtgggtgagctccggggagccgccggcgggctcagccctccgctgcgggtgggtcccggcagaggcgcggcgggcggggcgcgggctcccgcggccgccccgggtctgctgcgcgggcaggcagacccaccggcagacaggcggaccgggcgctcggctgtcgctgttctccgcgcggcggctgcggggcttctgacttggagaacaatgaagcgtgagctggaggggagcgagcgggccgccgggagcgcactgtgtacaaacagaggcggcgtgcgtgtgagtctgagcctggcaggcgcgctccccactcccccggcgcccgcccgccctccgcccgccctgttattcactccccgggtctccccctcctctctctctcttttgctctctctctctgtctctcttttgctctctctctccttcctccctcctcccctcctctttcagctccttctgctataagagaaaagggagacaactgcagccacaccctagcacctagcacctgccaccacctctgaagttcctgcattgcctgtaccttctccgcacatgctggagactgtggggttaagagctgcacccttgctgcctgagagtcccttggattccagcactgactttataattaaccacgttaaggattcccctgaacttcctttctcagtataaccaggaacagaagttaagagattttgaaaagtgactcttggggcacaaaactgcatgagagacagaaccctgcaaagtgaattgccccgtatttctcaggaactgcaacgtagtcagcaaccagaccctaatcagctaagacagggctgctctgctgctctgtctacaatttagttagctccagggctggggagagagggttgtgggctcatctgttcacgggggcaaaagggtggaagtgagtaggagacatgcatctcgttaagcaggacatctgtttcagagaagaagtggggcaagtttgggaactgtgcaagaacataaaggcaaagacagacccttgaagcatcactaaggtggatcaaattttctttctatccgccaaaataaatggactggtttttgcagtggaagtgattgaaccaaaaatacagctcatggcttacaattgtgctttcttctctgtttttcggttagaatgattgcttattgtacatggatccaattccagcagttacaggtaccaaaatgaaacagggcttcttttttcttttttttcttttttttttcttttccttttttcttttcttttttttttttttttgtcttctagagagggaggtagggagagagacaaacacagagctagagaaattgaaagagaaacattctcgaaggcaaagagttgaaaggtgaatctactaagaaaagaataacagagtgcaattagccatggaactacatctccatctgcctcctttaaaggatgagtcctttaaaggtgagatgagtcctttaaacttaaatttctaccttccttttcaaattttaagtgaaatgaagaatgcgaggtgaatggaaccgtaatgctgaatactgctagggagggtttaaggtattgtataactgacaagcaaacaacggaaaaaagaaagaaagaaagaaaaaaaagaacacctttcagaaagggtttgttcatatctcacgattggtgggagggttaaaacacattttttaaaaaatcaccttgctaagagaatgagagagattcatttatttactgtctatttatatgcctaaagtcacagatgttagaataagacagtattgtccagagttgtagcaaagatgtttcaagcaatcaaattctaattttctggtgcatcatcattacttccttgtgaaactatgttttcagtcaccctgtggcatgttcatcctaaaatacactttaacttttgaaatgagatgtctaatattagttttaggttttatttctaaaggatagtactaaatcctaaaaatgtaaagttggaaaccagtctctctgggatgtgatatttaagggaaaaaaaagagtgggttaagaattttgtgtagttttgtatgttattccctgtttatttccacttttttgatagtatttgaccttaatgagcatattaagaagttaaattatttttgccaacagtgtgtgtttctaaacatgtatctttcttttaatttaaagaagggtttttaaaaactagtgggcataaaagtacattacaatgcacattctatgcccaaatacttggtgcggagacagtaaatg

SEQ ID NO: 317886 - DNA, 4001 bp, Homo sapiens
atgtttccatgtgcaacttagtaattacttaacaaagactgttttgaggccgggtgtgatagctcacgcctgtaatcccagcactttgggaggctgaggtgggcggatcacttgaggtcaggagttcgagactagcctggccaacagagactagcctggccaacatagtgaaaccccgcccgtctttactaagaatacagaaattagcgggtgtggtggtgcacagctgtagtcccagctactcaggaggctgaggcaggagaatcacttgaacccgggaggtggaggttgcaatgagccaagattgggccactgcacttctgggcgacagagcgagactccgtcccaataaataaataaataaataaataaaagactgttttgaaaccggtggactctggctcacccaagtctccaaaaccttaagtcattcccccacaggaaggcaaacattaaggctgtgccttcacccttccaggtcactctccagtccctctgtgaccagaagacatgagcatggcgttacctcctgggtactgcatcagcagggaggttaccagggagcttaaactcctcaagcatcccagagagactcagcatgggctttgcaggcagagagccctgcgtttccatctcagccttttatttacaactaggtcccctgcagctgccttatctagggcagggttattgcgaagatttggcaatgcactgtacataaatctctatgtaaagagagaaagaaggtgttcttttttaattgtttttaaaaattgaatgaactccttaaaatcatgacggaggaaccccttactcacggatgacatttctctctctgaggtcagaacgagtgaatggataggataccttatttctactcagtcctaaaaataacctcaagtgtttaattggacttctattagtttgtgaactcaacaagcatggctgagatctgcagcttttatatttatttatttatttatttatttttatttatttatttatttatttatttatttttggtcattcacaagtaccaataagtagaagggatcctgcagctcatcagattcaaacttcccacatgacagataaatcttgctgaggggtctccagagttaatgcctgagtggggctcagctcccaagaataataattacaataataacaaacacttattaagtccttacgatgtgtcagacactgtgctaagcatttgccatactctcattatcttttttttttccaactatgagatggactccattatgagaagcctcacctctagatgaggaaaatgagacttagagagggcgatgacgtgttatccacatcaccaaggaataatgggtgtggagccaggattccaccagagtctgcaattttctcctcccggctgaactgtcccccgtgtcaattctgagttggcaacttctctctgtgcttcaactagaagataaaatatttactaacaggccgggtgtggtagctcacacttgtaatcccagtacttagggaggcggaggcgggtggatcacctgatgtcaggagtttgagaccagcctggccaacatggtctggtcatctctaccgaaaatacaaaaaattagccaggcgtggtggcagacacctgtaatcccagctactcaggaggctgaggcaggagaattgcttgaaccctggaggcggagattgcagtgagctgagatcgcgccatcgtactccagcctgggcaatagagcgagattccgtctcaaaaaaaaaaaaatgtactaacaaaatagtttctggctctgcaagttttcttacacattagctaaaacccaggtaaggacccagaggagacatgtctgaaagtactgaccattcaaggtgttcttgccgtgcacgtccagaatatgaaaatattctgccaaagccttcacgtttctcacggataataagcagtatattttgtccagatagaggtaccacagaaacgatccttgcttcagtctcatcttagtactgtgtcaactgaaggctctggcaaccagaaatagaatacagaaccctgcctcagaagtagaatgttggatatagtgtctgagatctggcagcagtgaaggtaaacacgtcagaggaaacagtcaaaaattaaaattgctgcttcttaatttttccagctatgctatagatagatatctgctgtccgaaacctcttggtaacgtgattatccttatgtcactaaaatacaatcagttctaaaggagatccacaggctgttcagaaatgaatgagagaatgtgctacataggaaaactgctacacagcccaagtggttttcagagcatttatagcctaaatcatttattagaaagaagaaaaattgaaaaacacatggaaaagtactaaaagagcctagaataactacagtataataatgccaaagagaggaagtttttcttttttcttttcttttttttaattgagacaagagtcttgccttgtcacccaggctggagtgcagtggcgcgagctctgctcactgcaagctccgcctcccgggttcacgccattctcctgcctcagcctcctgagtatctgggactacaggcgacaggcgcccaccaacacgcccggctaattttgtgtatttttagtaaagacggggtttcaccacgttagccaggatggtcttcatctcctgaccttgtgatccgcccgtcttggcctcccaaagtgctgggattacaggtctgaaccattgagccctgcctcttttttttctttttttgagacagagtttcactcttatcatccaggctggactataatggcacagtcttgactcacggcaacctctgtcttctggattcaagcgaatctcctgcctcagcctcccgagtatctggaattacaggcatgcacccccacgcccagctaaatttttgtttttattttttattttttattttattttatttttattattattattttttgagatggagtctcgctctgtctcccaggctggagtgcagtggcgcgatctcggctcactgcaagctccacctcccaggttcacaccattctcctgcctcagcctccccagcagctgggactacaggcacactccgccactcccggctaatttttgtatttttagtagacacgggtttcaccgtgttagccaagatggtcttcatctcctgaccttgtgatccgcctgcctcggcctcccaaagtgctgagattacaggcgtgagccactgcacccagcccaatttttgtatttttagtagagatgaggtttaaccatgttggccagggtggtcttgatgcctgccctcaagtgatccacccgccttggcctcacaaagtgctgggagtacgggtatgagccactgtgccctgacattaattttttttttcttttttcttttttttttttttgagacaggatctcactctgtctcctaggctggagtgcagtggtatggtcatacctcactgcagccttgaatcccaggctcaagctatcctcccacctccacctcctcatagctgggactatgcccatgtgctaccacgttgtattttttgtagagataggatcttgctacattgccaaggctggtcttgaactcctggcctcaagctatcctcccaccacagccttccaaagtgttgggattacaggtgtgagccatggtgcccagcccctcctctgtcttaattttctactccctactcactcccaaataaaccacttacactcaaatccttgcctcagggtcagtctctaagggaatccaacctaagaatactataaaatgctttttctgtgactattaagactatgtgatttttctcctttactctgccaatgcagtgctattacagtagattttctgatgtagaaccattcttttattcctggataaaccttttgtggttacgatatttttattcacctctggtttgatcttgctagcatttgtattttccctgtcttttt

SEQ ID NO: 317887 - DNA, 4001 bp, Homo sapiens
tcaaagaagaaatcgcttcccattccaccacccacctccaggagactcttgttttttgaaccaaactttcaggaatatctccactcctgttcagcggttcatttaggacttgggcggctacctgagtaagactatcttggactagcgggatagggggaactccctcctggttctgtaaccggcggactgcttgtggggaaatcttcccatcttcatctgcgctgacattattcaagcagggaatccctctcttgcctgcatgctgaggggaggctggaggcaggcggagagggcccgcaggagatagaaaaaactggaggcgcccaccgataccctctctcctggagcccggggcgcgcaccaactcttaggctaacccctcggcctcccgcctctctcttcccaacttccactccagcccagtgaaaaacctgtgactttagatgcaatcggtactattaataaatagcacctaggagggcaccgagaccggcacacagctggaagctagcctctgtcccagagaaagcagtgcggtatgggcctagcggggccgacttctgtgcacaggccgggaagcaataaaggttcggaactgctccagacccggaggaccccgccgggcactctggataacctccccactccacttccagggtccgaaaacacgggacgtctgcgactggccggtgtccagcacgcgcactaggaccgcccccggcgcccacctctagtctcccgcatacccggcgggcttcgggacgcctacaaatcggttccaggtaatcgcgcgcgttcctccggcagcacatcgccaggccgcgggcgaagggctcccacctcctggctcggccaactctggcagcttgttctgcacacatgacgtaacccggcattagatcaaactttctggcaccttgaacccactggggtgggtggagggatggagaagatgggagaatcctctccactgccaggcgcgccgggcccagactgactcaggggccgaatgatttcctcgcagttgaagaggaaaataaaaacctaaagcttccgcttcccagcccccctcacttcccccagcccgtgcgctctctctgcgcgcaccgggaaaagagaagggaaaattaaaattaaaaaaaaaaaaaaaaaaaaaaaaactttgggggatgtttggcgggttctctccgcagtccctgcggacccacgctccaggaaggagctcccggctgcgcacactgggggctccccgcgccgggaaccggatgccagccagatgccggggctgggaagcagagaagtccctactccccggctcccgcccttttccgagtctcccggcgccccgcagaagcagttggtctaggcagccccggggactcccaggggtacctggcctttccgcggcggcttaacaaagaggggcgcgacgcgagcgcttcccgccgacgcctcaagccatcagcgcccgggcgacgcaggctccgagggtgcgcgccgccagcggttggtgcgcgccgatccccgccgccgctccttccgcagggccccgaggcccgggtagccctggctctccgcctgttatcggcttacctggggttgctgctgttccagtagacagcgtagcggtcggcgacggccttggagcccgggtcctggctgaacacacacatccagagcaccagaaacaccagcgtcaacatctccacgtgcaacatcacgcctggccagcggcggagcccccgacgcgccactccggggagagagcggggatccggagggagggaggcaggcaaagggacagagagagagcgggcgccaaataaatatgaataaataaaaatgaaagtgggcgagaaaggaaagaggcgcccaccaagctggggaggggtaggagagcgagaagaaaagaaggcggtgggatggggggtgataaagacaaactcgcacccccactggagggttcaggaggaaaaaggaatcacaagatggagagaagcgtgcgtgtgtgtggtggcggcggcgagggcgggggaagaggtgccaagctgtgtctcgggcggcggcggcaggccggtcaccccgggagagggaggtgcgcgccgggccgggcggctgcagcgcgggtcggggcaggcggcggcgcgcgctgcacagtcaccgggagttgcgcgccgcagccgcggggagacatacaccggcccgccgggcccggctcagcgtcggcgcagcaggctacgcacggctccgccaccgcccggggccctcgcactgcgccacgcttcgctccaagttactttggcggccggtgggaaactgcaggagaagggcgacgtgctgatagagggcttcgcgcttgtggtcccgggagtctgagaacccctttcctcagcctcctctgtgccttagcggggcgacccccagaaatctcagaggagtcgtaagtgctgcggtaccgggcggtgcgccgagaagggtggggatccggagccgcaacccagccttgtcggtgtcctggaactggttaagcggcagctgcgccggctttcgaagcggtcttgcctcgaaaacctcaaagaaaagtttggctcttcgcgtcttccggcaggtcccccagcagagtcggaacgcggcggtagcggaagagggcaccccgggggctggccgagcctcggggatttctcgcgcgtgctttccttggctgggtgtgggtgcaccacagtgaatgaagagcagaggttaagaccagccggcctggcagagctgggattcctaaacctgcaagacgacgccaacccaactgttcggctggagagcgggaggggaaacaatcactttcaaatggatccctccaactcctggatgggccgatgtcagtctccgatcgccttccgagagggagactgagcccccacacgcggtgccaagagcccggggtgagctctcagaagtgtccctgcgactccagcgggtccaagcctagcaacttgtagagatgcatcaatcagtttgaaatgggaaaagaggaaaaaaaaaaagcgcacgagcgagtggcacctccccgatgactacatcagaaaaccttcccgatcctcccgcagctgctcctctttccctccttaggcacagcagcaacagaggtgaaaaccacaaaccgaatcctaaaacccctacccaggcgggaaaataaataaacttgagtgcagcagcagcagcacgagcagcccaggaggaattgaaacgactggcaagaagtggaaagggttttgtaaaagtcagttttgcaaaagagggggaaaaaaagagagcgagagaaaaaatgctttatgggaaaaaaaatctcctcgggcacgccccctcgttaatgacttgcgtggaaagccgacagcggcggcgacccagtggcagcagcctcagcagagcgcgaggccgcacgcgtgaacgtggacgtgggcggggggatggggctccgcccgggcgtgttgcgcgggacgcgggacgggcgggcggcgcgagcgcgggtgtgagctccggacgaagcagggggaggtgccgccagcccgcgcccagccagcgctgctgccgctgcggcccgggtcatgtggactgtctttttttttttttttttttttttcctccttccaagcagtttacttgggaagggtgggagcgcggtggggggatagctggagcaaccagtcagggaacggcctactgtttgcttacagattgggggtttttcctctctctttactccaaccggattggtttgctccacgagaaagaggcgttttcctaatctcccttccccacgcctcctaccccctcccccgccccaccttctagaaacctgactaattgaattactgggagtgccgaggcgccctctcctgcgccggagcccggcagccacgtgtaaccctttgggtgctgaattccgtctgggctaaggaatgatttgacatctttttacctgggagtagggtctttcgattttaaag

SEQ ID NO: 317888 - DNA, 4001 bp, Homo sapiens
tataaaatgctttttaaaaattccccttaaatggattaaaatatatcctttaaaaagcattgcatacactgttcatgctttaaaactatagatataactatgctttgtttaaaaattgtgacaattaatagatgatttcatgtgaataaatctgcaaaatgcaattgatcgtgatgtggttatcttaaggaggaaagttagaaagaagcccttcactgaaatccttgaaggtatatgtatgtgtgcgtgcaggaagagaaacaatttaatgtgatattaccttggactgaagctattatctccaaaatgaattgaagagctcataaatggagtggctcataatttaaatatggtgtagattatgataatgaccttagatttcaaggcaggtaacaagtgctggtaataagagacacagtgcaaagactgaggacgcttccagagccgaaatgcaacaagtcatatttccagatagagagtttcaatgcgaaaatatttaagcattcacatgggatcccgctaagacgattttctctgccctctgataaattttcctagctttgcctctttcttacagaaacgtttgtgaagacaaactgcactttctgtgaggttttgcagactgcattcaaataaaagtaatattgttttccattgttcataagatataattaatcccataagacaacctcccttacaaagtaagttaagacaaaacagatttttcagaattctaaatatggtcccagcaaaaagtaataaaaatcgttatttgggaaacaatgtttagaacttcattgttcagaatgttctactttgaataatctcacagcataggccaaatcaaagtagaccaaaataaacgaagactttttacctatatgcagctagaggaaacacacgttattatggtttcaagttctcccccaattcccagtcccttataacaggttacaacgtacatttctttgtttaaatgccaaagcaaagacaggagttcaaaacacggtaaaattaacccactgggtgcttccttctgaacaaatggccccagagtggaagaggatgctaagagcagagtccacatccctgcacaacgcgtgggcaggacccgagatgggcagagggggctccaggcaacccttcagacacttaacaggaaatggctgggctctggacaatatgaattgagtaaaatgtttggagacgcaggaggggctggtttgactcctctgcatggttgccatcctctgtaattgagacagcacgatcgctgtcccaactgtcagctctctgcggtcaaacacggggaccaccacctctatctactatgtctggaaaattgatcattcttttaataaataaatatccctagcgccgcccgggctcgggggagggcgaggtttgcgtcttttctcagctcctggcagagctgaagcgagttaagcagacgttggtcggggagagggaggcggtgcgctgcccgctctgtgtcctcgccccggagcccagcaggggcgctcggggcgtggtggctctgggcggaggagcgcattacctggttttcggatggccgctcggagcgacaccgcgccgggtccgaggctggaagccaggagcaggagccggagcaagacgcctcggattaaatccatttcgcagccggcgcctgcaaagtttcaccaagtcccgggcgcacacggaaagggcgtctccgggggcgcgtgggggacgcggccccaacggatccccgggccggggcgaggaggtggggggctgcgagggctgggcccggaaacacgggtagttccaagaggtaggactgcagccgggaggtcggcgtgcgcgagtgaagccggctgcaagctgcagggcttttcgcgggggcgggggcgacgaaggaggccgactgggagggaagggctggccgcgggagggagggaggctcgaccggcccggggatgaaattacaatcgagtggaagtgagagggacaggccctgaaaccttcactcctcgcccacctcggaagcagacagcccgcccctcaccctctctagcgacccccagcgcagcccttccccgctggtgacctagattggggacctgggagggaccgacttcaagcactggagacgcagggcaggagttaggcgactgcgggtccaggaccctccgcggtcctcaccctgaaatcttggggcgccccccctccaccccacctgggccctcctcctgccgcgcccctctaggcgactttttctaacacctcaaaggttgctgtagttggtccagcgcacttgggggatgcgaggggtagacgggggtctgtgatttgcaagtggggtgggggtgagaggaagagaggcgggaccgtccgggtctgaggcgctaagaagataaatgggatttaaggctcgcagatggagagctgaggccaggccgctcagactgggacgccgggtggagattagggcctggagcgggggagtgggggcccttcccggcagaggaaggcaacttgagaccctcctggggaggagatgaaactccaagttaagcctggcgtcttagggagggacgcgagctcgagcccccaggcggaccgagaaaagcccctgggcggcgcccagctgggcctggggcagggggccggggcggggtcctggcctctgatcccgggatcgggcttcctgggttgtctcctgaatggagaaagactctttctccgccgctgaatttgctgccctaggactcagtaaaatgtaccttttgccagatttcgcggtagtgcctggagaggggagaccctgcctgggacacaagtcccgttgcatactggcgttctgacctccaaaccagcgagaagagaaagcagatacaataaataaaccaagagggaataaacttagaggcaaacgcggccctcggcagttcctggggaaagatcaaaggccgtaggaagtgccccgcagaggaaatctgcagtcactagcgacaggaccgcgcccgccccctccccaccttgcaacgctgccaggactcggtgggcgtcctggctcttcacagttagcctatgtttgggagcgcgggaggaaacaatgttgactgatatattcttctcccctccccagccccccaaacacacacacacaggatttctactcctcttttaagaatgaaatatcccctggctggagagtttgtaatgagctcaatcttgttagttagcaaagctgagtgtgttcccttatgtgttggcattttcaagtgtgcaattgtctgttcacaaataaattcaaagtcccctccaacttgagtatttggaagttttagctgtgacaccagagcttgtcctcttacatagaactggagcaaagttcagacagaactatgctcttcacgtccaaggtgaccataaagccggccactaagctaagcaaagtgactgcccccaaggctgctagtctcaaaggtctcaaaatcatagactttttagcattttaaaggtcatctaggccatgcctccactccacgcaggagtctgctttcagcattggtgtcgggtcgtgccacctccctttgaactccacctgtgtgagagagctcctccagcgccagctgagaagttgttagaggcctttctttatgcgaaagtgatttcttatctcggacttaatgtggcacccagaaccaagcgagtgttgcaatgcagatgcctcccatgcaggctttcctacttaaaaatgattctctgtgatgctgaaactggaagtaataataatcgttgatattatggctaccatttatttaaggtctcctatgtaccagaccttctttgaagtgcattttaatcccaataacaaccataccaggaagatactgtcattactattctcgccttttacaggtgaggaacctgaagcatgggaaggttaagaaacttgcccaaggtcatgcagctcccatgcagcgcttgaatccaaggggtctgattccagc

SEQ ID NO: 317889 - DNA, 4001 bp, Homo sapiens
agtaggggaaaggaatgaatcatcatttaatatatcaacatggcttaatctcacatgacttcatacaaaaaaaatgcaagttgcaaaagaatgcatctagtttgatgacattaatataaaagacaacagcaaacaaaacaatatattacttagggatacatatatatgtaatttaaactctttaaaaaagcaggacaaacacataaatacccaagggaagatagaaaagggatgtgaatgaggtgtgattcacaggggcctttgagagtattccatcatattctgtttcttaaggtaagtgctgggtacctgtaaatattcatattttttatatgttgtatatatacatatatatacttttgaagtacaaagtatttcactaaaaggtctttaaaacaaaaaagggagattatagtaaacactcccacaaccaaaaaaagggggccctataaggtatcttgggggtcatccatttcatccatcttagcaggacaactaaatctttcagaactgaaaggtgggtgagaaaacctctcagacgtcaatacagagcatcatcttttggggaacattcagttggcatttttattcaactgtcatccgcagaatccactgatccacagcgctctgatttaggttgcacatgggaaacactccaccaggaggtggcagccttttaaagagcggctccagggcacctgcatgtcctcacagtggatttgggccagcacaggtattaacttgctgccctctctcaactgaaaaagccaggcaccagcctttagggcagtaacaactttggcaacagaaactggctttggtaggatgctgccactcattagttattagacatccagtgtttggatgcctagtggaaaagaaaaaggaaaaataacataaaaagcataaaaaacataaactaaacttaaagacattttgctttcagaataagctaagtcatgcaccattctcaggaagacaaactcaccctcctacattgtctgtccaggctgctacaacaaaagtaccataaactgatggcttgtaaaccacaaacatttatttttcacagttctgcaggctgtgaagtcccagatcaaagggctggcagtatctgatgagggcacagatggtgccttctcactgcatcttcacatggtggaaagggcaaaccagcccctttgggcctctttaataagggcactgatcccattcacaaggactccacccttatgatctaagtacctcccaaaggcccctccttgggggttaggatttcaacatatgaatttgagggagacataaacattccgaccatagcactcctccaaacagaatagcaatcagattgaaaatggagtggaaggaaatggcagaaagtcatttttgtcagggggcgtgctgttgaccagaaatcaatctcctcccagaccagacgagagaagtgcagtcagcagatgatgcagatgacccagagacagggtggagtgagctgttctcaggggttcgggcacttcttggtggaggtgggataacaaaggggaggcggtgttctcatcccttccacaccaattccccagttttatttaaagtagtccacctgtcaactgaaaattcaacctgtcgatgccagatttatacctggatgcatgttctctcaagccacctgcatgcagcgtatctgtgtgccagatgtcttcacacaaaaggcccttgaggacagctccttcctcttgtctctatctttgtacagcaagcagtcccccttatctgtatttttgctttctgcaatttcatttaccctcgatcaaccacagtccaaaaatattaaatgggaaattccagaaataaacaattcataagttctgagtagcacgatgaaatagcacactgccctgctccatcctgcctgggatatgaatcatccctctgtctggcatatccgtgctccatatgctccctgccccatggtctgcagccgtctcagttgtcagattcactgtcatggtatcgaagtgcttatgttccagtaaccattatctgacttcataatggccccacagtgcaagagcagtgattctgggattcagatatgccaaagagaagccatgaagtgcatcttttaaattaaaaggtgaaagttctcaactgaattaaggaaagaaaaaaatcatatgctgaggttgctaagatctatggcaagaatgaatcttctatctgtgaaactgtgaagaaggaaaatgaaatttatgctagttctgctgcatatatagggttcagtattatctgcagtttcaggtatccactgggaatcttggaacacatcccctgcggagagggaactactgtatctatctctctcggcccctctctctctttctctttctcccctctgtcctttccctcactcttcatttctatctctgcctctctcacatattcagaattgttagattccagaagaagaaatccatttggtagtaaaagaattatacagcacatacataaagcaagctggcttttgtcttcagtagtttggtctctctccttccaggctgttcttccttgccctgtgcaccttattaacacattctcaacaaggttaagattctcttcatctttatcctatgatttcctatctgaaaaatcaccttcagtgactctccactgcctacaacataaattctaggcttcttggtcaagaattcaaggttctcaattaaaacagctccttttttcctccttcttcccccatcaccatgatttattgaattctactccatctcctcttcttatcaggtactattgggtgcttaacatgatatatttctaaacttttcaataatcttacaaggtaagtatgactaatccattttatacataagaaaactgagttaagagtagttaagtaatttacctaaaattgaagactttataactggctgagctaaactcaaatccaaggtctgtctggtgactgctctcctaatcgcctattgcagaagaagccactgtggaggtagaaagatcctagaatttgagaaaattaccatatgttgatcattcttagtgtgccaggagcttttcatacatcgcttaagttaatcctcacaaaatactataaaattggtgttattacttccattttaccaagtggagatatagacacagagagattaaataacttgctcaaggcagacagatggggaatggcagggctagattttatccttggtctctcttttgactacatcatgctacttaatctgaatcctaattatgttttcaggtttttgttgttttttaaaaaatactctttaaaagctatataatagccaaactggcctgccagttgtctcctgaatgcatcttgtattttcttaccctaggattttggttaatgctttttcccattgtcatctttttcccactcctatctccttacacacagcctacctattctcccagagggcatgcattctatggagacagagctgaatgtgtgccatcagaagaccaaaatcaagcgacattttaaaaagaaaacagactcttctgggaaaaatggtgactccacaaagtaagaagccaccaagacttgtaggacattccttcatcttctcctggatggggcaacccagccatggatatatgcctccaatcagcataaatgcccattgcttgataaagtcaacacacgtgtaagatggtatgtagatcttctgggctcctggccttagactcttgcccttgtgtttaccaactcgattgtaaatcctttgagggcagaaaccatattttagatttcttcatatcctttcccttcctccatgtcactaacacttcatgtactcaacaaaggtcaacacctttgagaggagtgacaggagacactcccacagtgctgaactatgtcctgcccttgctcaacatggtgggactctgcctcccaatccaaagaccccgaaaactgccaccaatcctgtccttttcccccaaat

SEQ ID NO: 317890 - DNA, 4001 bp, Homo sapiens
ggtctatttcacaagatcttcactacaatctcatgaagtagcaggtagtatgggggaagggaagggttggttattctcattttatggaagaagaaagtgaggagtagaaagcatggaggatttgcctgagatcacgtagttaagagagcactaggccttgaaactgaccagctcttcttaattctggcttctggccccctctcaactttccaatattttagaaatgcattttcttcctcccaaactctcatcactttgttttcctgaggaattacccttttacacatagttagcaaaagaagagtttaagtagctgtgtgtgatgtcatgaacgggggatgaggctaggggatttctgctggagaaataacagcaatatctctttcctctttggaaagatacagaaatggtggtttaaagaaattaaggtagaataaatctcaaattcaaagaaatgtacaaaatgagggagaataagaaggtttataaaacacgttatagcttcacgaaaatacatggttggtgcaaagaagacactgaacgaaggactctccaccccagagaggaaatgtagaattatttgatactatgaaaattcgtacagattaaccttcaaacataaaaaaagagcggaaacagcaaagcctatgacaatgggcccccaagtacaagtccctatgttggcagcttcccagagcctttcataaaaactaaaaaagaaaggaagagaggaaagaaaacaagaaaagcaaaggacgaaacagaaaatttaaaagacaattttggaggtaactacccaagaaattgctctgtggttctctgaagcagcacagccctggaagagggcctgaggctgcaaggacctagcagggccggagatgaaggctcttgtcacttagtttggggctgcacccccagccactcccttctgactaagggaggtaggaggaagaggagacgaggaagggaaacagggaggaaaaaagagttggggggcaaaatggcaagaggacgggaaaggagccgagtaggaaaacgggtggcatgaatgagaaagaagggacgctgcagcaagaagaggaggaaagaaagtgccgaggaagacaaccgggagagaaggcagccaccgggcaaggaaggacgggaaacagaaaaggaaagaaggcggcgccggaaaaggaggggagggaatagacccagaggaatagacagaaaggccagggagaaggaggatacagcggcagggaactgcaaaaatggaggaggtggaaggaagctctcagccggggcagccggcccctcgtttcaggacaccatggctgggaagggagaaggaggagagaagatccaagctgagcggtgggggaggccttcccggagctaaacggaaccaaggagtccctggtgggtttggctcacccccacgggggagaggtaccgccagggcctgtccctgctgttgttggcccgtggcggtgggcctgtggccaacagccatctttcccctgaactccttgcaagggttgggacgtgcctgccacacatcggctctgcacatgagcttccgagggggtctgtgggcgcccccagcagctgccggctcagcccccagctcaggagagaagtgtcctctggctggccggcggggaggcttcccaccacgcgtaggcatgtcccagctcccacaccactcaccccgggtccccctgcatgcggttggcctgccccagcccagagcgctctcgcagtttctcacaggacttactgtacttactattgaggcagtagttcccacactctgcccggtgccagcatgaaagagaacagggagagtcagcctttcacagtccttgtcaaatcccaattactctggttgcagatcacttgaagccagccttgtttctctcacaaagctctgcccgagagtccagaacgtcctcttagggaatgtgaatatgagccccgcggggaaccactggaaatctctcctcagcatgattggcacccagccacccgcctcctcacctcttctcggcttattgaaggtgggcgtggcggtggaccaagaagatgtttagaatcagctgtctgacacttctgaggctccctcaccttcaactgacaatctgcatttcttttaaatctagagaaacagctccttgctcaagagttacttaccttgtcaatgattattacttttcttggctgtaggctgcatgtgaaaaaggaatgataagccagctagctgcctcttctctctccctagtggaaaatatcgccctcattcccacgccaccccccattgcaagattccagacccctggttattttctgattaacaaaggcagaggcaccctcgagaaataacaccactgaataaaaaatagtcaaactatgcttcatttaagtgagtatatatagggacaaataatcacatccaaaatcatcagagcttgaagtgaccactgagccctttctggctctttgtagttggtttaaatgttgtaaacattactattattattattttttgagacagagtcttgctctgttgcccaggctggagtgcagtggcgcgatctcggctcactgcaacctctgcctccagggttctagcgattctcctgcctcagcctcctgagtagctgggactataggcatgtgccatcatgcctggctaatttttgtatttttagtagagttggggtttcgccatgttggccaggctggtctcgacctcctgacctcaggtgatccacctgcctgggcctcccaaagcgcctggattacaggtgtgagccactgcgcctggccaacatgattatattttaacctaaccctatacctaatttttttgcttttattttattgaaaaaaatttaattgacacataataattttacatatttatggggtacatagtgatgttttgatacatatatagtaatcagatcagggtaattagcatatccatcccatctcaaaatgtatcatttctttgtgctgggaacagtcaaatgtcctcctgccagttatttgaaactatatattattgttaactatagtcatcctatagtgctgtggaacaccagaatttatttctcctatctccctgtaattttgtatcctttaacaaatctcttcctattccccacttctctctaccatttccagtatacctaattttttctacattgccttttttctgtggcaatggcctcactgattagttgaaatgtgtttttttcattttcttacatttatatctaaaagcttgtgccatatggtgacacacacagaaaaacaccccagtggacagcagcctccaagccagaagccctgcagtccaggcaaagcaaattttccatttgaggagcttggaattcccaatagactataaagagttggtcaggtgtggtggttcacacctgtaatcccagccctttgggaggtccaggcgggtggatcacctgaggtcaggagttcaagaccagcctggccaacatggggaaaccctgtctctactaaaaatacaaaaattagccaggcatggtagggcatgcctgtaatctcagctactcatgaggctgaggcagaagaatagtttgaacctgggaggcggaggctgcagtgagccaagatcacgccactgcactccagcctggggtgacagagttagactccatctcaaaaaaaaaaaaaaaaaagagttgaagggaccacggtttctttcccacgttcacgggaccttagcaaagcaaagggccctgtgggcatggaaggctaacttccccaacaaccagggctcctctcagcagcatccttgatggatgcccatcctgccggagcaaacacttcccacaatgagcagctcactcttccacaaggtggcacgctcccgtgctggaccattctactaggtacagagatctttattatagtatgctgacggtagccacaaaggaaaaacaaacaaaacctttccctaaactagcagccct

SEQ ID NO: 317891 - DNA, 4001 bp, Homo sapiens
cggcgatcacaggactccactgggcaagcgtaagggcgttcgtgggggggcgtcttgctgggccggttggggtacttgcgcatgcggctgggtttgatgagctgggactggtagctggtattgagggccttcaggtcctgggagcccgactgagtggcaaaggccttaatagtagacagaggggttagcgaaggctgctgggtgcggctctccaggccctggaagggcttctggtctggggtgcccaggcccagatccccctgctgctgtggaaacaggtagtcggggatcatgggaacctggaagccacccttggcggcagggtaggcaggaggcgggtactggagcgctgtccctgccgagcccgggaaggcctggctttgtggctcagggaaaatgtcagtgttcggcgtggggaaggtgggtgccgctgagtaaatgggactgctgtcgttggatggcactgcgcagctcaggggtgggctctgggaggcggaggcggaggaggccgctggagatggtgctgaggacgaggaggccggtgggttggtcatgctcactaggccactgaccaagctgaagaggggctcgggccacaaggtgttgccactgttgggtgcaggctccagggaaaagcggccagtataggtgatggggggcagtcgagtggtttggctggggtaactggtctccaccagcaccttctcgttgttcagagagatgtcaggaaaagactctggcaggagagagagaagcgggaggcctggttactggaaagcaatcactggaggacgaggacgacccgagctgccaggcaagagaccgggccggctaccattgactcccgaggtagttaataattgatagcagcacattgcaatgttcctggacccgcaccagtggcagagcccatttcaacaacagctgacgcaaatacggagaatccccctccactgcagctcgcagcgctccgcagcggcggctgtgcgggcgagggattcccgccagcacccccatggccgcggctagtgcgcgcccccaaacccgggctgccgggacatccacggccaaggatcacggtccttccttggggacaggcggcaagcaaggcaaggcaagtcttactggaggtggggggcgcagccccgctcatcaaaacaagccctccccctccacccacccacgcagctccagagctctccatccaaaacaaaagctcggtcctctgcgctccgctagggatgagggcagggggtgggctgtgtggggttccttggcatccctctaacacatgactctggggatgcgaggaatgaaagggaaacccggctctcattctaagatccaggagcactcctgcggtgaaggacaggacgccaggatggtggcgaaagggttccccctcggcgtaggccactgcttacctgcggtcaggtgctcgtagggctgctcgcccgtgtccgcctgagggttgaaggtgctgctgctgctgctgctgttgctgccgcccccgccgcctccaccgcccccgctgctgctgctgctgctgttgctgccgctgccctctggggccccggcggcgccgaggaactggggagccccgttgctcagcagcatcatctcctccagcttagggtagttgtccatggtgggcgagtgaggaaaggatccgaacgggtcagagatctgcagcggggacatcagctgcatctcggccttggccgcggccatcctggacgagcaggctggagagctggtgtcggggcgggggggtgcagcccggggctggagctgcaggggacacagttgcgggggcctggccgggttacatgcggggcgcggggaacactgagaagcgtgcaggcggcgaccccgactcgccctgggcgcgggcgggcgtggacgcgccgcggctgcggaggctggggcaggggccggtcctgcggcggcggaagctggctgcggcggcggatggcggcggcggctccccaagttctgcgcgctgggatctctcgcgactccccggatccgcctctatttgaagggtctggaacggcacgggtccgcctccgtcgtgacgtacatggccatatatgggaagcaggaagccctaatatggcaggaccggccgggaggacccggagtgacgtgaagccccccatccgacagcgcccggcacctccatcctgcaccctagggcccgcgcccgcgcccgcatcccaggcgcccaggcttcggggaagcctagagctctagccgccgccggggcctccgggacccgcgcagctccggagttcccgcgttgcccctccctccgccttcttccctcctcccagagccggaagcggccgggccatatcgggccactccaaataaggtgctgcccaaataagggttgttccggcgggggatccttcctgctccttatatggcatttccgggtcgcagctggttgctccctcgctccctccctcctccctggttccaagccgggagcccgagcgctcgcgggatccggggacgcccaggcggggagggctcgtggcgtgtggcgctgggcgcgcggctgctcaggcggctcctaggcgtgaactaggctggggaagcccagacccagagcgggggcgagggcgagtcgggccggggttctatcgctgtcatccagggcccgcccgcccacctcagggaccgtgagagcgaaccgggagtgcgggggaggagcggctgggcccgcctgggcaggggccgcccaggagaggcggggccttgaccccgggcctcgatctatggcacggtgtctttccgggtgtcgctgggaaattgaggataggaagtcacggccacttggttcttgggacactgtatagcagtgagctgccttgcctctgccacctgtcggtgggatggggctgctggtgcctggggtcccctgtgctcccccggaaccgaaaggctgttccctagtccccgccggcaaagagcccacctttgggggaccgaagtggggaagctgattgccccaagagaggcctgattcttgttctcaccaggagataatggtccttgtggtgaggggtcactttcccccctttatccagtccaggtggagggccggcccacactgcgggaatccgaaagaggggcttccctatgggctgtctggggaccccgggctgggcgcgaagagaggaccggcttggcggctcggtgctgccccctggaggttccctctccactcccagccccggactccggccgcgcgggctcttccgccgcctcctcgctcctcctcccggatgcggcgctgggcgcggagccaggccgggggagccttcgacgcagtgagcacgaactgagcaggcgctgcagcccgggctccccctgcagtccctggggagccgtcactgccgaggcgcccagactccgggataacactcctcaccccgagcctggccaaggcgagggggagaaggaagcagggggtgggtggtggcgagggagaacgattcccgcaggtctccctggggccgaacgcgaacagggaagccctccccgcccccacgacgcagtcagttgctcaccccaaagggaacagggattccgggaagggaaggctcctcctgctctagctctgaatccagaggaggtgctgttttttctggatttaaaaagaaagcagaaagagaatgtggggaaggagggtgcttgacgacaccgagagggaagggaggaggtgagggcctctgtgaaccccaacagcctctggaggtcggggtcagggggattaggtgggggagggtgtaactttcttggacttaatccctctgtggctgtcccccctccaaacatgttttcttataaaaaccaacttaatgaaccaggactccctcgtctcggagcctgccgtctcaagtccgctggggaggtggggggctcactcccactgtctaccgagttgtccattggggcaggagtgatgcgcctctcagaggactcctgcc

SEQ ID NO: 317892 - DNA, 4001 bp, Homo sapiens
aaaataatcaaacagcaccagtaaggaaggcaatggaatgtgaaacttccttccctgaaccctctcagtcccgtttcctaggtgcaactccctttaacagttttctcagaaattattacagaggtgtggccaggtgaggtggctcatgcctataatcccagcactttgggaggcctaggtgggccgatcacttgtggtcaggagttcgagaccagcctggccaacatggtgaaaacctgtctctactaaaaatacaaaaattagctgggcgtggtggcacatgcctgtaatcccagctacttgggaggctgaggcaggagaattgcttgaaccctggaggtggaggttgcagtgacccaagattgcaccactgcactccagcctgggtgacagagggagactccatctcaaaaaaacaagaaagaaaaaagaattgtatatctagccataaatatgtgtatgtttgtatataaggtgtctgtgtataatgtatatagtatgtgataagtatgtatatgttagtatataatatatatttgacacatagaaaattataagtacttatacataaaatataattccctttgtatcaaaattggctcattccacacattccagtttggcaccttgcttctcacacttaccaccacatcttggcacactcccatgtcagcacacatgggtctagctcatctttgccaaccatagtgtggcattgcactgggtggatgtgccacagttagctagccagtcctgtacagatgatcatttagatcattttcagttttttgctacaaaaaaacatgctacagtgaacatccttgcacaggtatctttgtgtgcatgtatggctagagtcgcacgggatcaattcctggaaggggagctgttggctccaaaggcgcatgcatttatgcttggtaaacattgccagattgccttccaaaatgtctgcgccaatttgcagttctaccagcggcctgtgaatgttttttgtttggttggttgggttttttcctttttttttttttttgcagtctggctgctggtggccccctcgcctaattacctgtcacttacacaccctgcatttctggccacagtgcctttgcccatgctgtacccacagcctaaaattctctttctccctagcctgctcgatgaaatagtccccttcctgtcaggccacagttcagttgtcacctcttttttatgtcctttcctgactcccctaagttgtcagagtccctttcctctgggatactacagcttcttgggcataattctatcatagaaccaactgagggcctactgtgtgcctggcattctgtgatcattttgacagtccccaccgtaagcacacaaaaaagtggttttgttctccacctccctccatcctggctctccagctgcgctgtcttttgtcagcacagtcctgccttggagcctttgcacttgcactctctatggatcttgtcctcacccatcgtggtgtcatggtgcctctctggagtctctgctacaattcacctgctggtagaggccttccctgagcaccctgtctcaagcacccctcctctagtccccgtgttacatcaccgttaccttcacaacttacaagctgtaatgaccttgttgctttggatgttgatccgtttattttctgtcctgtcttccaccactgagcgcacgaacacacacgcgtacagacacccccatggtaagcttcccgagaccaggaaccttgttttccttttccgctgcctccagccttaaacctgcaccactggactaagcgctcagtaaacattcgttgaattaaccattcctgttttacagaggaggaaactgtcattcagaaaggagagccgagtagctcaaggtcccacggttaataaaaagcacagctgagattcgagcccagcagaactccaaatccagtcgcgtgatttcttccccactcttcacacgccgcgttgtccccctccctcaactcccaacagactacgcgagtcttacggccggggcccccaggggcgcgtcccgggcccgccccgggaggctcatcggctacgcgctgtcaccctccccgccccctgtcagtcaggccgaaggggcggcgcggccgccagcgggggcgctgagctcagagctgccgcagcgccggagccggagccggagccggagcgcgcgagctcgcagggcgcgaggaacgagcggtggctggctacgcacccgagacccgggcactgctgcgctcctgctcaggacccgcgacccgagcgcctgatcccggccctatcccccctccggcccctggtccaccccggcctggcctagcggagcccccgcgtccgcccgccgcagccgccgctccatccccagccccggccccgcatccaggtgaggcggccgcgcgccggggatggggaacgggatgaggatggagaggggactggggcgacaggagggagctggggaaggggatggaaaatggagggagacccgggggatgcgcgtcagtgtgcaccccggagtatgtgagtatgctccggtgtttgcagctgcccgggcggctgtggggacgtgtgtccgcgcccatgtgggtcggggtattcgtgcgcgttggagcgtctgcgtgtcctgtgtgtgcacgtgagcttgtccgtggtgtatgtttgtgtgcatgaccgtgtgactgtgccgtgcgtgtacaggcgggtcctggatattcgcgccgaacccagcactccggttcgacggggctgcagtttgcagggcccggataaccgaggcagtggcccctcccgcgtccccaggtttcaaggacgctaggactctccgcggccctgaggcttcgcactggggagtggggtgggatggggggaaagcgggagggggctcagggtccagaagggcgccgcggtctcgggagtaggggggcatctgcgtcccgcgggaggggctggggtgagagtgcggggccagtgcaccggtgcccgtgtatcgccctccccaggccgccaggatggacgtgttcatgaagggcctgtccatggccaaggagggcgttgtggcagccgcggagaaaaccaagcagggggtcaccgaggcggcggagaagaccaaggagggcgtcctctacgtcggtgggtaaggggcggggtttctggggctgcagggctgggggtcccccgacagtgtggagctggggccgggtcccggggaggggggttctgggcaggagaatatgagtcagcagatggggcgaggtcagcaggggtcataggggacatagccagcccatagaagcctgggtctgtatccggaaatggggacacggggcgggctgatgaggtggggggctccagctgaaaggccagggaccagtgcagtgatgaaagcagacagcctcctttttcttatcttttttaccattattaatagttatctggtgttgaacactttctgtatgccaagtactgggtaaaatgtcataacatccatttcctcatgtaatgcttcggcccattctacaggtaagggaaactgggcttcccagagatctaagtaccttgcccaaggtcagcagctggtaaatgctgaagctggggtttgaacggagctttatagattctgaagccccacccctccccttgtggcgcctccctccagcacctccaaggccgagttgagttgcgttccaggtccacctgcatcacaactcttgtggttttacctttgccagctctcttccccgtccactttccttgcaaccactggctggtatcagaagaaaggccagggttggataacttgcccagggtcgtggcatatttggattgtggccatttgaaaaatattttgtgtccacttactatgtgccaggcatcctgcagatgctggggtttcacagtgaacaggaaagaatggttcctgatctcctgatggtgatacagagcatttcagcagtgcgagttgacatccagtggctccctgaa

SEQ ID NO: 317893 - DNA, 4001 bp, Homo sapiens
gcctctgagcttaaccaggcctgccagggccttcagctgtgtggctgagatgagaaaatcagcattgaggagaacactggagccaaggcatttctttgaatgtttactaagcagtcagaaggtgacttactccattccccagttccagcccctgagcatagagggtttagggttaggaggagtaccacagactgaagaggaagtagagttaagggcttggcaagttgcccactcctatccctggtctagctgcctcagaactaaaggaggcctggaactaacaagtcactcccttccagattagatgaggccagctggcctttggatgccccaggaagaggtggtggcagcagtggcatgagggatccctctgtaactccacatgccaggtcatctgcactggattagatgtccatttcaaattgtgcgtcatctggagagagaaaaggcaggaagacaggttgctggtctgaggatctgcaggctcagcatcagtgcagaaacccctcttggaactgaacccccgcactgtgtcacagtggcatttgaactcaaaggctgggacaattcttaattcctgctttccttaccgggtatctcttcctctgtctcctgctccttcagctcctccagcttggagagaggggctgttggaggagttgtgaccccgggaatctgagggaggcagcaggggggtgtccgggcaatgggtgagttcttgcactccagcaggaactttcggtcgtagatgatcctggtgcctgtcaaggggttgggactgaggtaagagtcaggagcttgggtaccgaggtgactggggtcccagactcaggccttttggggcctggaggtgagggtggtgtcaaatttccctgtgtatcaaaggacatcggctctgaagcccagctaggttctcagcagacaagccttcatagtgcttaaaatcttccagacctaaccaagatgtgggtataaagcaaggggggcatcccagctggtataggcaggggctttatgtttgggagagcttcagatcttggctctaagaggaacaccaaactttgagttcaggtacttcatgctgctcctctaccactctgaaacctctgctttggtctcaccagtgaaggtgagacctagactaacagcctcaggtggttcaagaagtgaaatagcagttgtgaagggttccacccagtgctgttacctgggctatctcctgcagggaggagaaacgtactgttctaatcctgacccctcccaggtcctataaggttcacactagctcagaggaacttggcccgcataatgtcctcaaagggtcctgccctgttcctcccctccgcttccgcgtggcaggaatccctgggtcgggagcccagcagctcgtgatcccaggctgctcgcccaaccaaacagacgccagccagcagcacaaaaacggagcaactgccccaactgttctaactactccacttctcaagacccggtgcttccggctgaggtcacgctcagtagggggccctggcccctattcctaggaagcaaagtcgcgaggggtaaggagcgtgtgtaaggctccaagaacccaggccacagtgaaggattacagcccaaacacccggaagctaggctcatggccttgttgcatcacttagaagtttttgggaactgagcttccgctccaaacattctcccccaaagctacaacctgtagaggggcctgcggacaagtcttaggtctgtccctcccctacccccgccccgcaacaacacgcacgcgctaatatgtccgcagcctgcggacccctgcccggcccgctgacctccgggggtagtggcgtatagcgtgccccccggcgtggtgctgtagcagtcgggcagctggtcccggcccccgggaatcgggcagctagtggacgttgacatagcgagcgggaggagcagcaaagtaaccgcctggcgttgaggtcgaggagcgcagctctgagtctgaggcggactcagccgaccacgtgcagctgctggcaacaacactagaacaacgtcacgcccagggcgggccaccggccgtcactcaacccgacggtcccgccctatctgctaggaagccagcccggttcagagaaagctggaaatgcgtccaaagtcccaggccccacaccagcttccagttcctgctggcccagcgctggccaacctgcctgagtgctgcagcagctcagctatttactgtttatagccgggagctgggggcaggtgaagtagggcaagcgtttttatcctgtattagttcacccattccttgccaacttttggatagtaaagcactatgattagccaaagtcacacatcttgcaggaagggaagctgggattcaaatctgactgcatctgattccaggactgtgcccttaagcccagctgtgtactgcctcccataaacagtaacagtacaaggccgggtgcggtggctcacggcctgtaatcccagcactttgggaggctaaggcgggtggatagcttgagcccaggagtctgagaccagcctgggcaacatggtgaaacctagactctactaaaaatacaaaaattagccgggtgcggcagcatgcgcctgtagacccagctactcgggaagctgaggtggaaggataggttgaacccaggaggcggaggttgcagtgagcggagattgcaccactgcactccagcctgggtgacacatgccttgatggcctggagcacagcaggaaggggaaggtcagtgagggctggtcatctttctgaagaagtggtacctggactaataaaaggatgagtcaagtttgggggctacagctgaggcatcaccagtcagaaggcctgccctttgatctctttgccagttaactaaggaggggcagggggctagtgaggagggcttggtctttagaaggaaagaaaggtcagagagtttggccttggagttttttttttgttttttttttttatgtagacacagtgatatgacaggctggagcaaggtggtgggattggtgaagatgtatatatgctggaaatcttgaattcatcaggctgtcctgtttggcttcctcaaaatcaatactgcctccactgtcccttcccctcaccaaaaattaagtatagaccacctgactgcatccatttatcaatattaactcagctctggcttcatcagatttctccttaggtctgatttcttcactcatttaaaaaaagattgcttctcaaactatttattttctgagatagggttttgctctgctgcctaggctggaatgcagtggtgtaatctcagctcaatgcaaactctgcctcctgggttcaggccatcctcccacctcagcctcctgagtagctgggaccacaggtgcccaccaccacaccgggctaatttttggattttttatagagacaaggtttcaccatgttgcccaggctggtctcgaattcctgagctcaagtaacctatctgcctcggcctcccaaagtgctggtgtgagccaccacacctggccagcttctcaaactttaatgtgcatataaatcatctggagatattgttaaaatgataattctgatacagtattggtctgggtgagattttggatttttttttttttttgacacagggtctcactgtcacccaagctggagtgtagtggtacaatcatggctcactgcagcctcaacctcctgggctcaggtgaccctcccacttcagtgtcctcaatagctgggaccacaggtgcatgccactgtacctggctaatttttaaattttttgtaaaggcggggtctcactatgttgcccaggctggtctcaaacttgtgggcccaagcgatcctcccaaacaggcatcctccgaaacaagaattacaggcatgagccaccgtgcccagccagttgtggattttttttttttttttttgagatggagtttcgctcttgccgcccaaatggcatgatcttggctc

SEQ ID NO: 317894 - DNA, 4001 bp, Homo sapiens
taaagtgcctggcactagtgggagctcaacagatgtcaattcttttccccacttttagctgaataactatgtgaatctgtgtctcggtgtccttctgcccctctgtctgttgtacgagaccggttggagtgtgttcctcagtaccgaacgggctatttgtaagatgccccgtgggttctatctcccttccgactctctcctctcctgtaaaacgttacaggttcccccatatggcatatccctccctcacgcgatgtatccactccggtctcccacagtactgcatgtccataaactgtttccccatgcaccctggttaccgcgtcccttctcggtgcttccctgtctctcccattttttttccaacatgaaagcgtctggatttgtagtccaattacagtgtatgtgcgcctatctgagcctctctctgtactggaggggtgtgtgtgtatatgtgtgtgtgtgtgtccatgggcttctctcgaaaacgaggggtgagaggcccgagtctctgcccgggatgcattgtatcctccccacaccttctggctctggctcgttccccgtttacacttcccagagtcagcccaagacgccgggagctttttcgggtacgttgagcgtccgtgaacctctctctccagaacccgatgtcttgctcccggggagcgctaagtgtgcgtgagtcctcaggtctctccccagggcactgtgttggtttgtgtccgtcctggacgcggcgcgtctccagtaacgcgatgcgccggtgtcccggagtccctgggaatgcaggtgtgtcccctccccccccgtacgcgaagcgccagtgtccccgccgttccagtgtgcgccgcccccttacacggactgcctaagtccctatctctatgagtacaccgtgtgcccctcaccatgcgcccgagtccccatcccttcgagcacacagtgtgtcccctgatacgtggagcgcctgtgtccccaagtccctgggaatacaaggtcccacccccacacgcggagcgcctgtgtcctgtctctgaggatccaccgtgcctatgtaactggaaaacgcgggcagctggtgcccgcgagtcgtccctggttccttgcccatacgctgctcgctaccctccttccccgccgagggtagcgtggtcatctcacttctcttatcggggcctctctccctccttgggacccaacaagccaggaaatcctcgggggccgtcggaaagtcccgcagcggcagcgcagccgacccagggctgcggctgcctcggccccgccgccaggggccgcccgactgcccgcttccccaacgcccaggctagcccgggaccgcggcgtcagccaccctgcccggccctgccctgcctggccgctgcgggcgctgacggtagcagctgccagccacggctccgccggccccgcacccgggcgcggccaggccgtgaggggtgcgctctgcctctctgagcccagcctgccggccggcccgctcaccttgtggctctggtaagtctcgagcgcccggatcgccgtctcggtgagcttcacatgcagtacggtgatgttgtcctgccccagccgtccgcacgacagcccatagcgctgctcctcccgcaggccccctgtcccccccgccgccatcttaaactccccggggtgccgccgccgccgccgctccggctctagcctccactgcggccgcggctgcttgggcttctgcagccgccgccactgctagggccatcccgctgctgacgtactgtcatatactgcgcggagccagacctcggactgccaccgccgccacccgccccaccctccggccccgcgccccgccccgggctcgtctcattggtcttgttcccttcagaaccgccctcatcggccgccctccactctcacgggggcgggcccaaagtcactagagttttgctcctgggacgggacgtccgagaggtaagaggctgacgtctaggtgacgcgccaacttaatcatgtctgacgtcacgtctggtcgtcttggctagccggccgagattggccaggctggcttggggactcccctgctaattggaagtccaggttgcctggtctggttacctggagttggagccccgcccctgtgggggatagtagtgaaaagtcagaattggggaatctcgccctacgcgggtggtccttggagaggaggatctccacctccactatgtaaggggatggccgtgaccaaataaggactttgttccccgacggctgcggaagctgtggaacttggtgcgtgcgtgtgggggaggacgcagcaggaggactcgctagagagctgctcctcaaaactcctagtactgtagttgagcaaacggcattgggaggaaactgctcactctaaacttgaagttatcgggtgccacacgcagagcttataaaaacaaaaacaaaaacaaaaacccttgaaattagtgagtcgactcttagatgtaggagttgtgttagatcttgtggagcatcttaaggacaaaatcacgcgggaggttaaatgcctttcgtatggtgggcatggtataatagagaattgagcttcgaggtctttcctacgccatgccctgttgtgattctctgggatcacaactggtggggatgatatctccttaaaaaggactctagaagaagagtaaaactggcattgatctaaattaaaagaaacctcgacaattctcattctctaattcagtttgagtattgtcctttttatttgatagggctgtgtgaaaacctagctagggtttaaaggtaagaggctgtcgaggttaagcgaaggagatgggggcgtgaggggcgtgcaaaggcctggcatactttccattccatccacaggatgcttcctgtgtaggcgtggctaaaagagggagcctaatctggagtccctttcagattgtgtgtggatagactgacagatgggttcctgtcagaggatggattaattggttgatcagaaacaccagataaaacaaaccattgaaagctttcaaactgttgaaaggcagtttaaaaaagttcttttaataaaaaaactgagacgcttgtttttaccctcagcttataaaaccatgttctgttctactgggattccccgggaaagtttatagatatttaatcagtatttttcattattttaaatggattagggccatgattccatgtcctcccctcccaataaatgccttccccaccgtacgggtacactcctttttgattcagaccttcaaacatagtaggtgtataatgtgaattacagaatgaattggattaagtggaaacacctgtattaagtgttactccatcacaggaaaacagtttgtaaattgacttaatttcaatccactaagattggctagctgttaagacgtgattaacgcttgctaatttcatttactttagtgatacagtgttatcttaaattcatgtagtagagatattaaggtaatcatcaaattggattaaaaagtttactcttagaagggaaatagaggctttactacctagttttctccgctttccaaaagtagaaaccttattcaaatagttcatctctaagcggactataatctaaaaataattctgtacttgaacttttcttttctctctctctttttttttttttttttttgatagtaaaggactgagcacatagctaaagccttaattatttgggaggtgagggggaagggaggtttgaccggaacaagtaaaacctgtatcccactgcttttccggtgaatgtgggtaaatccccacccacatgatatcctaacttggcctactcttactcagaatttctgatgacatccaagcgggtgggggaggagtaaggatggttttcgttgtagttttcaaatatctgacctgtagcttcttactagtaattgactttttttaaaaattataataggaaaatttttctcatgccctattttagtgggtaacaaatctttcac

SEQ ID NO: 317895 - DNA, 4001 bp, Homo sapiens
tggcacggcaccttggagaccaggataatggcaggacccttaatggaaatgagcatctggagctgttttggggaaaagccgggcaagtccaagcggaatattataatgtgcactgacagacgttacactaaaactgaagaagacatggaaagcacagaatcttaagccagataaatacaggtgatagatgaagtaacaaagtcccaaaaatctatttttcttaaaaaaaaaaaaagcgggggcagggggagggtgtggggatcctaaactagtataaagacacataagaaggaaaagagggacctgagattgacagcctggtcaacgatgcctgaaacagcacgggacttcagaaaataaggacgagcaaacgaactctaggtgaggcagtgtaggacagtggttaacagctccagtgctggagacagaaccccagagctggaatctcctaccgctgagatgggtgtggccttgggcaagttacttaacctctccgtgcctcagttacctcatcattaaaatgagaataatattaatatctacttcccaggatcgttgtgaagattaaaagcttttacacaagaactgacatcagtgcctggcacctaagcactgataaatgtctgccacggggtgaggggtggattttatttagttctcggtgaccttggggagaccaatttctgatcagtagtacgaagagaaactacaaagaaagggaatgaataagcgggtgcgtggtaagaacgcagaggcagccaccaggtatcgatgaccctttcggagcacgtaagcaataaaagtgaggaatgaaataaagggtaatccgagagcacagggttaagtgaacatgctttccgaggggagatcgtagcaagagggaaaagaccactggcgaggaactcgggtcgctaaaactgttcttcagtcgacgcgggactaactacactgggagcaggacaggtgtaaagacccgctccttcccgtcccgagttccccagggagctccaaagagcgctctgtccgcaccgggtgaagtttgaaacagctctgacttgaagggggaaagcccatttcccaacgaacctgggaaagcccatttcccaacgaacctgggaaagcccatttcccaaagaaccaacgatacctgggacgacaaaacaacaggctttcctgtttccatctccggcacgacctgttccacggctctgtattcatcagcctcctcccggccagcagcagccaccaagacaggatgcggctcggggagccgaagggacagcgccccaagttcatctggccgcgggagcaaaaaaagcgcccaaaggggaaggaaggaaacagaaagaaaggggctccggaatttgggggggtggctagcgaggccagaccccggagctgggaaaatgacctccgcgtccaaggtcgagcaggtccttctccctcccagtcccgccggcgagcacctctgcccctcccgctccgctccgcagggccagcgccgcgcgggaccccagtccaggctccgctccgcagcgcgcccaccgggcccgaccttcccttcgggatgctgccgggtgggggctcccgagaaggcgcaggtgagcgccgcggccccgcgctccggcgaaaagggcctcggtcctccccacgcgcaggcagcggggacagaacttcccaagcgcctcccgagcccagggagggcctggccccgctcccggggcccccgcacccgggtcccacttctcgcgcgccgcgcccaagttcctccatccggccactcccgacgccgttcccctcggctctgcctccctccccagtctcttctcctccgcgcgccgggaaagtttggcccctgcccgccggcctggaaccccgcactcaccgcacagggagcggagccgaagcgccgggcgcgcgcgggagagagggcggcgactggcagcgcgagcgcggagctcctcacagcggcccccgctgtcccggccgccgactgggttggaaaggggaggaggccgccgggtgtcacctgcccgctatcccacccagccgcgtgacgcgcgcagcgccgccccctgcccgccgccgccaggtgcccgccgagggccggagggaggagccggggcggcgcgagggggagcggccgggagggcggaggccgccccggcctcgcctccgccgcgcgccctgactctcgggactggggcccaccggccgctctgggttagcggggctggtcgtggcaccgatgacctttctttccgagagcagatgccatcacttgggggacatctccaggctgacatagcagagtggaaattgtcgtcatgcgtgactcatttgggaatgagcagtagaaaaatccgaaatgaggaaaacctagctgaggctggaggcggagaaaaaggggactccttgcttctgaaagggtattgggagggttaattcgcatctgaaatggaagccagaccaagaggagaaggccctgggaggggaaggccgacttggttcagctccatcccctgcttataaggaataagaaactagagaattgaggcagcctggggggcatggggagaggacttttagagcaatgaagattagattgtatatcatctaactttgtttctggtaacagcaactgctgcaggaaaaaaagtctagaaaattcatttctcgttacctactgttggattggaaagtgggggtggggatgagcgttcggagtgtgcacctgcgcttggtttatttattttttaaacgtacctggccttgtgtctggtaatgatcctcctaatcgctggtatgatttggatcatcaatagctgaaaggcaaaataggggcctagagaagttccctgcttctgaggcaaaaccaaaggctggtgttgaactgtccagaaacctaaaaaacaataatcatttttagttgcagtcctgacccaaccacctcacaaatgtgggctttgagtttgtattgcgagttctcagcatggaatcaagaaacacaaaaaggggctgggagcgtcaggaccaccagagaggatgggtagggagaaaaaaaaaattggggtgtcggaagcatattttcctcacatgtagggattgccttcggcagcttaatcccactacattaaacaagaggttttaatgtttttatgtaaaacttcgaaagtgtccattgaaagaaaagcaaaaaaaaaaaaaaaaaaaaaaaaaaaagcttaaattgcaaagaatctcgaagtcaaaaaaactaaagatttctcctttcttttagataactttgctttcatattaaaaacagatcatttagtagacttaggaagtcttttgggaacgggagacaattgcctaatgatactagcctttgagtctatcacaatttaccatttatatatacttatgaaatttcaaatatgcagaagctcaaatggattcatttatttaacaaatactggagtgctgctatgttccaggccctgaagtttcaatagataacaaattccccgttctcagggactatacgttcattctagttggagatgacagacaatacatgaataaagaagtaaaaaaaatgtagtgttcagccaggcgcagtggctcacgcttgtaatcccagcactttgggaggccgaggcgggcagatcgtgaggtcaggagttcgagaccagactgtgcaatacagtgaaacgccgtctctactaaaaatacaaaaattagccgagtgtggtggtgcgtgcctgtagtcccaacgacttgggaggctgaggcaggagagtcgcttgaacctgggagacagaggttgcagtgagcagagatctcgccactgcactcctccagcctgggcgacagagctagactctgtctcaaaaaaaaaaaagaggaaaaaaaagaaaaaaaatgtgatgttcagggtttgataagtgctatgaagaaaaataaagaagggaaggggatggagacttttggaggtggggagttgtgttaaatgttaa

SEQ ID NO: 317896 - DNA, 4001 bp, Homo sapiens
tcaaactttggactgaagcaatctttctgccttggcatcccaagcacctgggactactggtgtacatcaccacaaccgcacttttaatttttttttttttttttttaataaagaagggaccttgctatgttgcccggggtggtcttgaactcctggattccagccatcctcccacctcagcgcccaaaagtgctgggattacaggcctggacaattctttataagtggtattatggaaaagagatgtggcacaaggaaatctgcgaaggaacccacgatgttctgtccaagttgttaacaactagacgttttaaaaggcatttataaaaattaatagtcttaccttttgattatccttccttctctatggtgtgttacaaaaattccacatcttacaagcccatgaaaataaattcccatgagagtttgaaaactttttgcagaataatgtcccaattttagttactggtggccaatatttaccagcttgagaggtggtcttttattacccttactggctggtaacatttatgacacagaaacttgcaataggttggatggaatcctttcaatatgaaaagtaattataaacaggtgaaggtagaatggcaactttcgtgttggctttgttaatgttttgcacgtaatccctctgtcaaagtgtcttaaacaataaaacaacaagcaaaaatctcacacatacacacacacacatgcacacacacattttgttttcaaagaccacggtgtaaaatgaagatacacacacgttatcctgtaagttgtggatctttggttggctagttggttatgatgttttttcccctactcagctctaaaaaaacatcctcggcaaggtgaggtggctcacgcctgtaatcccagcactttgggaggccgaagcgggcggatcacctcaggttgggagttcgagaccagactgaccaatgtggagaagcccagtctctactaaaaatataaaattagcccggcgtggtggcgcatgcctgtaatcccagctactctggaggctgacagaggagaatcgcttgaacccgggaggaggaggttgcggtgagccgagatcacgccattgcactccagcctgggcaacaagagtaaaactccgtctcaaaaaaaaaaaaaaaaaaaaaaaaaaaatcctcaaagccaacccacctgccaagaggagggaaggaggtgatactcgagccttactctcgaatcaagaaaagggagtaggccttggggaaatgtggctttcaaaattcatgccatatttgcccaagccaagtcgctagctggtccctgcaaccacccacacaccccactgccttcttcctaggaaaaaccagactctgccctgttacctacgcgcccgactcgcggggcgctgttcgttcaagactcgccccaaagagcgcaggaacgcgagccgcagcagtttcagggttcagcttaggtgacacaaacgtagctaatgggaggccgccgccgactctcccacccgcccttaccagcatccccgcgcctctccccgccacccttgcccggcgcgccggcgatgccctctgcccgcggggacccgagcctcgcgcgccctccgccctccctaccctggaccctgtacccatcacacctggggcactgccgtccgccgagcttgggcgcgcggcagcgagaaggcactggaggaggagcagccggggcgtacgcgccctggcctccagcaggccggggagggcgcgcatggcgccagagggtccgcctgggtcctcgtggagactgctccctcagctcgccgccgcgggtgtccagagtccctgcgcacactcgcaggtggcccggcgctcgcagccagtgccgcgggtaggacgctgaagaaaaggcggaatgggaggggcccggccgccttgccccactcccccgagacgctcttaccgcgcccggccctccatcagttatgcagccctcagccggctgctggcgttcccggatgtgcggtggcggtgctacttcccggctgcagcctctccggcctccgccctctcggctctagcaggtcgggagagagcttgggcaggtgatgtctagccaatctcgtggggagaggtcgaaactctgcctacagactggcctttgcacttcacctgaggcaggtttcactaatttgctttgatgggacagatgagaaacacttttctcctcccggaccccggacatctttgggctttcttacgagggaggcttatttttgcgcaggtgtaaggttttatccagctgccagacaacttgtgttaatctttctttgctttgcctaccaatcacacacattctctcttctagtctctgaaggcttaactgattttctccggatgaaggttttagagtcccaaggccccataccgtgtctgattttactttatttttgtttgttaagcctaacagcttctgaggagccacctagagctcaagaagcaaaagctactgagagtagatactatgtaaactgcacaagacattgacctttgttaaatccgaacactctttaagataatgctcttacccacaaggctgtagcttggaatattcagtgctctgaaccaaattaaataaattagtgctttatccgggaggggaggagaaatctatattgtaacattgaaacacattgatttgatttctctccaggatgttataacgcattaaaagatatttttaaaatttttcacgagctttgtttcctctccctttatttttttgaagttcagctttcacattcgtaaattcaaaatatatcggcgttaaaaaaaaaaggattggaaataacatgagacaaattttgaaaattgagctatttaacaaaacctgtgtttattccaggcaggaatggttaatttgtaattggtacgtattactaaaacacgtctgtttctggtttagtattatatgcacaaaactttggaaacagaatgtagattcttcaaattggcagtgagataatatgaataatacaattcattcaacaatattatctaccaggtgccaatctaccattgtgttcaaaagaggctagataggcacacatgcacaaatgcacgcatgcacacatgtacacacacacacacacaaattagacaactgtttatctgtgaatgacaaatctcagaaaagcctcttctcagaaaattatggtcaaaattattaaaatcttctgaatgaaactttaaaagatgccttcaaggactaaatcttatacactgttgaccctctgagggcattgactgggcttgctaaacccaaattgcctaatcaatggctgctacatcacacctctttctttcaaccctgcatctggtctcaggactaactgcacacatttccctataattaggtagagtgtcaacagtaagcacttctcacctcaaactaaactctgactgacttttcccagttagtctcataaaatccttagacacaaattcacccttcttaaagaaacatttttttcagttgaatcagcctatttatgaccagaaaaacttacttacccaagttgatgctgatccccactgttgcttttgctgttggaacaaaagagttgagaaagaaatataattctcattttgctaagcattttgaaagtcttttcatcactgttcctgttctatatttagatatttgatatttccagccttatgtacattccactttttcaaatgctccatatcctttaaaacaagcttattgactgccttccctatataactttttctatccctgattcacctttcaaaattcatctcagagtattgcagttctgagaacctctgcactcctggggaattctcactctgtcgctcaggctggagggcagaggcacattcacggctcactgcagccttgaccttctgggctcaagacgaagaaattggggattggcttaagtaattgcccaagtaattgcttaagtaattgcccaagtaattacacatacttag

SEQ ID NO: 317897 - DNA, 4001 bp, Homo sapiens
tcaaaagggcttcagttacagtaacttcagttcacttcatgctcctaactcaggctctctgcctccaatgcttagcgtcccgcacccttctccaggttttgaacctgatctcaatccaatcaaaagagaaactaagcagatttttttctgggcatttacattaccggtaacaatagaacattataaagatcttgttaacaaaagtagcttcttgccagagtctttttattaacacttgcaacgctatttaacaagctggccatgcctgtgtgacaccaaaccgcatgtggataaattcagtgtttcatctccaggcccaccaattcctatcctttgtaactaataatgttaacacgacagatcaagaaactagtttttcagaaagcagttttcattcattctctatagacatttccgccgcagtgaacatgcccgcactcagggtgtctgtgcatggccccaactttcctccaagccggggaggatgcaacgtgggccaaccatcccgcgcgctcggccctggaggctgcggggagcgacgcagcgcgacattcacccccaggaaagcgctgctttccgcagaggagagaggctgactgtatccttagctcggctcctcgcttccccagcggctcgccccagacattgcaccgcggaggggaggccggtcgacctctccggcgatgcccggcttctgcctgctgtgggagggcagcggcgggcaccgtgatctccgcaccgagaagagctccccttgccctctagtcgaagctcccgagtgctcggagcacgctcacccctcgcgaacacacccctgcagccgaagcagcccctgaagcccgcagcgcctgcaacaggtccggggcagtgggggaaacttacagcagtggcgactggccgcaacgcacaactgagttctagcgacggtcacgggcaaggaggcgacgaaccggtcgtctcagcccagggaagcggtggcgaatgccccggagaaaggagggccagccggggagaggactgcgccccgaacgatggctcgcggaccggctaccgatggcgttcgcctccgtctgtcgtccccacgccgcggacccggtgtccaggacccgcagagcgtctccggagcgcgtcacggtagggcagagcaagcctgccactgcaggcgccgcggaaggaggcgggctgtgcgctcgggggagggagctagaaagcgccttgtgtgccggcggccgccaggcgtctggaccgggtctccgcagcgccaccgccgcaccgcctcctctccggctgccagagcagtctgcgccccgccgccgtgcgccccgctataagtggcgcggcggggaggggagggggcgcgtatgcaaagagaccgacaccgggggagggaggaagcgcattagcgcggcctgtggtgtaggaggaggaagaggaggagaaggagtgggaggaggagaggagctagagaagagcgtgtcgggggagttaatcgggagaggaagcgggagaggggggctgcggggagtgcagagagacaaagcggacgcactgtctcagccgctggcagctgcaaccccgggaaccgagaataaaataagttttcccgggttcgagtgtctgcgcctctttgggccagcctggttaatggacagccccggatctgagggacccaccttaggggagcgcagcccggggctgtgcgcttggtgatgccagagcccgcgagatgctctaaaaagggctgcaaggggcgagctgggtatccgcaggacaggccctgggcacgcatagacagcgccttgggtaggacacccagagtggggagagatagtggcaatggacgggcaaaagtctggacagtttagggacactcgggttgagcaagccaggacgtttaagtttcttgctggcagagagccaaagagactccagccccaggcatttcctatgtgtcctccctccccactccccagtgggtgcggcacccccggctggactctgccctaagccaggcgactgcaggggcagccggggcgcagtcctgcggggcgcgcaccacgtgcttttcagccaatcgccgcggccgcttgattcaaagtgaactcctcaaagcagcagccacgccgcctcctctcctagcgattaagcctccatcaccttctcctgttttttatcgctcggtggtgttagtttggagttcagtaaagaaatggcccagcacacacacacgtttaatagtcccgcgtgtcaggagaagggaaggcgattcgaaaaataatctcgcgtggtgatcacttttacgaatcccatttatctttgcaactagaggcttgtctttccactgggagttaaaatatctgtcttttattcggtatttggagctaagtctataaatgaacgggatagatgaccggtccagcccccttgttttacaggtggggaaccgaggcccagggagatgtgaattgcctggctcgtagtcacttagcaacaatgtcccagctctgcagctcgagagtgagggccccacgacagagtttattccgtccccgggtccccgcgtccccaagcgcccgcgcttcgcctcccagcttgctttaaaacactaggcgcaggagcgatttaaactggctaaggaggccccacatggcgcttccagagtccagactgctgaaaccaagactgtcagttcttcattctaatttcattttcctttatccttgttccttcctggtatttgcgccgagaaatttcgctccttgcaaacaaagaaagacagtgccctctgaagtcctttgttagcattaactcggcagcctcaccacgaacctttcaatatatatattttttaatgcagagtctcggcttgaggctgattcacagagacagcccggatcaattcatgtcaagaaccacgtatggagagccaggggggctgcgaggttaggagagggctggcaagcagcacccaggttctgaagcaaagaccagacagatggaaactctgtagactccagagataggtgctgaaaagatgggaggcggaaatgtgtaactattgcacatatgtctttttaaaacatgtttctgtagcctgtggcaaggtgtgggggagctcatcaaggcagccaccaacgcaccttttagacacctcctagacccactctgtctgcttcctttgtgagtcaaatctacctaaaacggcacctagatgaccttgcctagaaatggactatgtacatagctcagctggttggttggggattttgccacaggaagcgacagaactagggacaggtatgtatctttaccacctagaaattgcgggatgtccttaaccaagggaacagcaaagttcagatccctttgcaaagaactttgctaagcaggcagggctgagaaaggaaagaaatccgctggccattgtgtcaccatccgctggtgccactttcctgtatcttttctacctaatgttgccactttctatgcttcaatagaagaaagggaaaaaaagctgtagactggaaaatcttgaaatgcattcagtgaccgtatacattcgcttcatctgcctcggggagataagcaatacaagagaaaagaaattagcttatgtaagtcctaaaaactggaaaacattttcctgctgaaagtcacaagaactaaacttgcaagtttggaaatcatgggtgctactgatgacctcctacaaactgtactctggtttgcttgagccaatctatgactagttttcgggcagttgggcagtttttaatgcttatctcagctgaaaatgatttgcaagttagcaaatttatgatcatagcaattcaaacggtgtaatcccacagcatctctcagccaatcctaaaggtaactcttatcaccccactcacacaaagaaaagctgagcaagtcttcattttgtacaggaagaaacttctaaacagggctgtcatcaaaactggacgaccatagacatagcagatatctgagtcaca

SEQ ID NO: 317898 - DNA, 4001 bp, Homo sapiens
gactttgatgattaaataggaagctcacattccagatgactttagactccagataatttagactttgcacttcaaaaagatttctttactgtcttagtatctgatcatcagttacctttttctaattgtttctatctcgacacaagaatctatatattatctacaatttaggatgtttttgtgatttttgcctattttattcatacagtacaccaaagaatgttacatcatcttgtaagttacaatattttcctgatttcattgggcgggtgagaggagaaatattttggaacataaagaaaagttaaaaatacaaaatgtacaccctccccgaaaagagtctattttattggtcttgaaaggaaataccgaatgagaatcgaactgaattttgctcagtataattactggggaaacaatattcaaaacaacctcctaaaggaaagggttaacaatcttgtagctttaactgattatttttgctcctttctcccgcaaaagaattacacctatgaaactggaattctgtacactaagaatggcaacattaacgctgaaacttttagccaggaatagttatcctagtgtgcataaaactatgtaaaaactgattcacaaaaggaaatgcccagggcctaccccattatgattaacttctgagatgaagcgactaagagaggatacttggcagcctgaactcgatttctcagaaagccagctctatcagagcgggggcgggggggcggtttcccttcaccagactcagctgttgccttatctaaaatgccttagcgatctaaaactgaaagagaaagataaacaaaacaacaaaacgctccggatttagatctcctttaggtagttaacactgttgcaaaagcaaaacaagcacgcaggcgcgtcggtcaggttgtcactacaaacatacgtaccttctcatccaatgtaaggaagaggatctctgcgagctctgctgcctttttgtttgggctctctaggttaatgtagtgattgcattttaatgacccacaaacaggagcaaagttattactgggtcgctttgagagatgtttacttaaatgtgaggataaacccaggtcgctgtagaaagggaaaatattttccgtccaaacgtagcattacccaactacgaacccacgcaaaacaatcacaatgacccattaatgcgtttcaacgagtgaactagttcacttccctaataacactgtcaaggaaaacgccttcaacaaagtcgagggaaaccatgccttccacactggtgggacgcagctggtataacccattctgcccctctttgagagctgcggggcacccagaggcttttggagaaaaccggtttggggaagagttttggggtgctgctgggagccggtgtgctgagtaaacttagaaacgtcaaactcaactttgctttatgaaggaactcaaagttaactcaccctggtacgtccaccctctccctgcgcgcaggggacagcggcctctcctccccaccgcgcagagtcgcggccgccgccctcgacccaccggtgacagccctcaaagcgatggacccccgcacccgccctgccgccaacccccggaacgcgctccgggccgcacccaccttgatgccctgctgctgggtggtaagggttaacttggattcatccaggagcaaaacttcgcagtaaaattcttccggaacagcgcagaaacagcccatgtcggttgtggtcgtctccagccaggagagaaagctaccaccgaggcgcccagccgccccctccactcaagcgcgatgcattaatttattgtccgcgccgtggcgagggtgagacgagcagctcccggcggggtccggggaccggccgccgaaccgcccggcggggcgggagcgagaaaggcggaaaagcccgggagagtcagcgcccgggagccgccggggaagcgccggcggaactgggcgcggagggcggtggcgcgtccccgcgcatcctgcggctcgagctcctccgaaggcgggggcgcggggcccctcccgcagtcctggggacgacaaaagtctcctggcactgggggcaagagaccagaaaaaggagtgatgggaattcgaggctctccccggccttggaaaaccctggaagcgctgcacctccctcctgccgcacggatttgagcgcggccccgacgtcctggcgtccgatcggcctgcggagtcccccgcgggcgcgcacttccagccgcgaccccgccccgcagccccgggtcagatccgccgagtatgaagcgctcggcttttcttttgtgtgaggagcacccacgacgccccgaccatgggcgcaggggcagaggcgaaggtcgtcgctccgtccgctaccccgtcccccagccgcaagcgccgaggagccggaagagaggcggaaagggcagcaggctccttacccagaccagcgaggggaggtcagctcgtcgcggggtgtggctcccgtccggggactcccgagctcattacgggtggccgtgtgtagccaagttcaagctctccctccgggaatgcctgccgcggcggcggaatacggcttcttcaggacattcagcaaagcggggaggcggggacctgcgggcggaggagcgacgccccagctgggaacgcggcggacgggcgagcggggggtgcgccctgggcgcgccaggccgcagaggctccggggaaagttctcttggccgcgcgagtggtggcgccccgggcgggagcagcccaggtgcatgtgggcccggtccaggcgtctgcaaaaagccctggaacgaagcggaccccccagtccagcgctggccgcggcaggggagccccttctgggcggggtatcagctgggggcggagggcggggcagagaccgtggtcccagcggcgaggtgccggcgagtccacgctgccaagccgcacactgcgcccaagccgcggggcagtccagcgctcgctgcgtccttcccccgagagacctggaggctgggtggggagaagaggacgcggtgctgctcggaccccacggttcggcggtcccaatcccacgccctccgcgcggtcggccgcgtccaggactgaggggcacaatagctctgaagctgcagtgacccctggtgggtcccgatgtccgtgcacaggcagccgaggttgagctgcggacgacactgagccccgctgggcttcggagcaggtgcaatctgtgctctccagctgggaaccagcagcgagttaatgcgagtcgcagttaggggagacacgaggggaggtgtcacagaaaaaaaactctatattgagttttagagttagagctttggcatcagacgtagttttgagttgactattctactgcttgttagctgggtagccaaagctcaaaaaaaattgcttaaaacctaggacgttagcccttaaaacaaaaccaggcttccgtagcacagtagaaatgaaatgaacaattggcgacttttgatggagtttcctctcatagtgatttgccacaaaggaccttctgtaggaagcctcggccttccctgctattgtgaccccatccaaacacaggatcagcataaccgccaaagtgcaatataaatttctgaactttacctaggctatgaataaaactattttatcttctgaattttctgtgaaattgactcaggttttgaatttctgatcaaatttcgtgtccagctttgttttattgtcaaagtcttgcctgccttatgaggtgacaccttattatgctagattttagcatttctgcttgtagaggcttttcttttctgtaatacagtattcctgacaggagttaccaaatgtgattgaaagatggcttaacattttcattctttacctccatatccaaccgagacacttgaggctgcaaaaacaaaaggttcaagcaatcatctgttcccagtttttttgagttttgctctcacctgttttttggccctttgatttggtttttttg

SEQ ID NO: 317899 - DNA, 4001 bp, Homo sapiens
ccaatagtaagtgttccagtttgaaacatggcatttcatggttctggctggtctcctagggtctggttttactaacaattttctgaaagggaggcagttaaaaaaaaagaaagctctcaaaaacagtagtctactcaatataagcagctcttcccaagagaagtacaattctctttgaagttacactccactaacacttaaaggaatagaagccaaggaggaaaaagaactaatatttactaagctcctccaaagtgccaggcactttacacatgctcactctctctaatagcctattattctcattcaaggtggggtaactgaagcaaagaaccattcatgtaactttgctaagttcacacaacttgttggaatgcaatccacatctgtgtgagtataaactccctgctttttcagcttcaccaagatccctcttttttttttttttttttttttttgagacggagtctcgctctgtctcccaggctggagtgcagtggtgcgatcttggctcactgcaacctctgcctcccttccttttattggggcactatagtatatgaaatagatcatcaagaagtaattgaggttcttccagaatttcctgaacaatgaaattaacaagcactgttggtaaataataaaaatgctggattaatttgaaaaaaaaaaaagtactagaatgtttctattcaggccgcacctgaaaatgtgctacttatactaattaaaaatcctcaggcaagagacaactgtgcccaattttcaagttttttgttttgttttgttttgttttgttgttttgttaattgttgaccacgtcctgagttcagagcgaatcctctgggtgtttaataggaaacagataatttctttctgaacctagcctacacaaagaaatccaaaagcgtgaggaagtgtgtgctctcccccttcccctcatggaattaactttgtaggaccacctggccagtgaggcacccagataggaaacttttaatttgcgtcaacagaggtgctttatctgaataaaacccagccagagccagagcgaaggggagagagagaattgctgaccagaagaacaggagaagcagggagggaagtgaccttaagaacacacacggcccgcgcatcccaccccaccagagtctttaacccaaagcctctgggtttctctagcagctatgggcaggtgccctcctcagcccgagccagctgcccgccccaccccgccttttggcctcgcgcgggcgtcggtggcctgcaggactggcaggcatccaggcgccaggcggagcgctgagggaggctcccgccggccgaacagcggggagacccgtgaagcaggcgcaccggccacgcgcccggagggacagggacagggaccggcaggggtgggcccgccgccaacccgccgggcaccccgcggactcgggcctagccagcgactccccccgcccttcccgcgccctgtctcgcgccccgtcgccttcctcccgcgccccgtcgccttcctcccgcgccccgtctccctcctcccgtgccccgtctccctcctcccgtgccccaggccctcagccccccacttgacgggcgcagggaaggggcgggtgccgcgctctcctcccggcccgcagtcccctacccgcggctcgagcgcgctgtacctggggttctggggccgccctcacccttgcgccgccgccaccaccactgccgccggcctagctcccccaggaccgaaagtgaaagtggagcccggggagcggcaggctggcgctgagcggcgcttcggcccgagccctagcggcaggcggggaagcccctggctaaggcgggagctggggaaagggtaaacgggagtggggccgagcgagggaagccgcaactcccaggaagggaattggtaaatgagcgctgcacgccggggaagctgcgaggttgcgatgcgggggatcaggcgtaggaagtgcacgcctttctgaacgcggatccgtgtgtgtgtgtgtgtgtgtgtgtgtgtgtgtgtgtgtgtgtgtgtgtgtgtgtgtgtgtgtgtgtgtgtgtgttgagatgctttttgtttttgtctttttttttttttcactgtttagcgttgcgagggttaggggcatgcaggaaagggccggtgctcaagttggggaccgaagccaggcaggcgctgacaagtccaccaagcctagacgcgttcgacgcccattggactcgctgggtgtccgtcatctcgccactgccagtgggctgagagctcttggcccgcctcggaaagaaacatgaacccagtactctgtcgtggcaaagtgccgcaccttctggggcttcggtagagaatgactacagtgggagatgctgtagaggaggaaggtgggttagaggtggcccccaggactttcctgcactaccaagggccactgtaccccaaggattagctgcttcccgcatcaacacgttccctctgatttttcaaagtaaatgaccatttcttcactccccttagaacaattaaagctgaataaaatggccaaaaagaccatctttaaacagttgaggctaaatgaggtaacaagtcaagaaaacacaaacattaaaacaccaaatgctacaagtttattaccgaaaatgggtcccgatccagaccccaagagagggttcttggattttgcgcaagaaagaatttgaggggagtccatggagtaaagtgaaagcaagtaattaagaaactaaaggaataaaagaatggctactcataggcagagcacccccaagggctgttggttgtccatttttagggttatttcttgattatatgctaagcgggggaaattattcatgcctcccctttttagaccatatagggtagcttcccgacgttgcagtggcatttgtaaactgtcatggagctggtgagaccgtagcagtgacgaccagaggacactctcattgccatcctggttttggtgggttttggccagcttccttactgcaacctgttttatcagcaaggtctttatgacctgtgtcttgtgcctaccttctatctcattctgtgacttagaatgtctaacctcctgggagtgtagcccagtaggtctcagccttattttacccagctcctattcaagatggagttgctctggttcaaacgtctctgataatttggtgagtggaccatggtcctagtgggaacaggacccttttcatgcggttctcagactttcttctcccacttctttattggccttcttccctttgagaactggggattccaagtcactgcaacagtatttctctttttttttcaatattatgtttcctttttaaaaatataatgtttcatactgcctattatctctagtcaaggacattttataatataaagattaacaccctgttccaagactcaactacggtgggatccagggaagtttttttcactaaaattcaacaagaaatgaggactttgagatctggtaatttctgcatgttcagaatttgacaggaggtatcaatggatagcgtgtagcctccaagacctccagacatctcggagtgctcccagtttactcaagatgagacctctttgtccagtaaatgtatgcatttctttgcttttatatttatatttttgaatatgatggttttcctttggcttctagtaaagtttttttgtttttgtttttgttttttgtttatgtgtctttttaaatacatattgaaagtccagctggcagaactgaatgcacccaacaggctggaggttaatacagaagacagctgaggagacaaacagggcaatgccctgaatggatgtgggcagaaaggagctgaagtgtaggcgaggagagagctgacaccaccacccgctccacgccgtttccccaaaagctcaccctgactcagactttagcctgtcgccctggccgtgatttcgtctttagagttgaagtgcactacaaagagcgataagtcagaggatt

SEQ ID NO: 317900 - DNA, 4001 bp, Homo sapiens
tttcttgtccatttatctactggagaatcacaattcagttatataaaaattatctatgacacacaagagaaagcaatgaaatttctttaaaatgcaaagtgtcatagtcagtaaagctctactatttcaaagaaaacccacaaatgtgtctggataaatcatgtcaatttcttaaaaacccagatctatacccgttatggtgagttgtttgaaatatcagaatttactagatattgtcaatatgaacagattaaagcaaacctttgtttaggaggctttattttatttatggctccctctgccacagctatttcacaaagaaagaatgaattatccagccaggagtgaacatgatctttgcatatgcctaaaggaatgataaaaatattgggatgaaaaatatgtagatttgtttattgttattttttgagggaccatggtgttatgctactaactgtcttgccttagctataatgaatatctgttgcaataactaaacatgggaaaaataacttttcaaaaccttagtttctagaaggttaatggattttattatattgaaattaaatgagctatgatacaaaggagaaaaggaaagaaacgaataactttctcaatgaagttctgtaaagtatatacaattggggcctgaaaagagaaactcatttatgctcatccatacatggcagtgtgaaattgacagagtttggcttaagtgaagtctgtggttctaggaatgcttgcaatttattggaaaattagattgtgattatggaagaaatgactcaagtggtcttcaggccaccacagcctttcttttttttctttcccaacccttcctaagagacagttctccttatctcatttaaacttatgggtttgaactaagtggtgggaagtggaagaaagagacattatcttacccctataaacctacaacactcccttggctaccctggtgcttaggaatgctgactttatctgtccttaagaagctgtctggaccataggaggaatgcttggttttatttacaaagctgtctaaaggatgaacaaatgaagtgtttagaggccctttgagacaaagaaatactagctatcaaattgaagagaagggcaacaggttaggcataaacattttaaaatgcaagataatctctaagcctttgaaaaattttaagagtagtctaataggcaggtttagggaaataattaaaatgacctctaggccaggcgcggtggctcacgcctgcaatcccagcactttgggaggccaaggcaggaagatcatgagggcaggagatcgagaccgtcctggccaacatggtgaaaccctagctctactaaaatacaaaaatttagcctggcgtggtggtacgtgcctgtagtcccagttacttgggaggctgaggcaggggaatcccttgaacccaggaggcggaggttgcagtgaaccaagattgtgccactgcactccagcctggcgacacagcaagactcatctcaaaaaaaaaaaaaaaaaaaaaaaaaaagcctggactgcctgcataaggcatcttcatacacgaggaagataaacaccttaccttacttgtttaacaaactgtagttagcattctgttatatctagctaaaagaaattctaaaagatagccttacagatcaagccataaagagctaaatcatttcaaatatgtgttctcgtgttataatgtttttttagtgaatccaactgttatggtatttgtttaggaagttttccttgtcactttttactatcttgtctaagaaaatggcccatttccttcctttggaggaaaagtgtctcttattgttaattttattagttatctattattgtgtatcaataatacgaacatatcaacttaaaacaacacatttattaactcacagtttctgtgggttggtagtttctgtgggctgcaatcaagatgatgactggagctgcagtctcacctgaggcccagcagaagggaaggatctgcttccaagctcacatcattgttccagcattccgttcctcattgactatcggattgagaacctcagtgttttgctgactgttttctggaggctgctctcagatatgactagttccttgccatatcctatgggttagaagcaagtcacaggtttctctcacactaaaagaaaggaaattatgcaagagaatgaataccaggaggcaaggatcatgggggcaacttagattacgtctgccacactaatgttactgcacattgaagatatttctactattataatcttaggattggcatagtctgtgtttttgaggcagggaaggagacatatatcaaaaaaataactggtgagtggataattgggaagaaattacagaagtgactagattctagagactagaaagatttggttcttcattgagctgaaaataggaatatctcccaaataagagatattcatgagaaatcaatgatagcttttttcctgatggaaaaatgaattagcttatgctcatcagaagtgatgccaaattcaggagaaagaaggcagctgacatcctgaccaacaaagagaccaagccccgataactggatttgaacatcggtgaagaagatgattaaaggtagaaagagcctttacagtctagagaaaatagtataggcccaatggaagctcaaagttgaagagacttttaacagaaagacaaaggaaaaggtgtccttgggactaggggtccgagcaagacctgaattataaactgagcagccacagagaagcactacagatgtagctgagttatctaggcctaacaccaaatattctagaaagacccaaagtactaaccagctctggcagcaagaccagcccatgtctacctctgcagaactttgagaatctttggctgatttttattacctaactccctgtccataagagaagggaaagagaccaagactgagtggttggatcagccaaagatgtcaaaattaaacttcagttaaattagcaagaattctgggcttttctgtttctgtagcattgtgttagatttgttttttcccttggttttccagtcctggtggtagattgctaaacttttataaaatctgtgtgagtttagcattctgactgttcccattctaaaagatgaaaatagaaaactcaaagtttatgtcactaatttgatctttgtaaatgcactgctaaataaaacacccaaactattaaggtgttgttgttgttgttgttgtttgttttgttttttattttttttttttttgagatgggattttgctcttgttgcccgggctggagtgcaatggtgtgatctcggctcacagcaacctctgcctcccatgttcaagcgattctcctgcctcagcctcctgagtagctgggattacaggcatgcgccaccacatccggctaatttttgtacttttagtagagatggggtttcttcgtgttggtcaggctggtcttgaactcctgacctcaaattatccacccacctcggcctcccaaagtgctgggattacagacacactcagccattaaggtgtttttaattcttttttttctttactgtttttgtaagcagtaatttattaacagatgcaataagtaaattgaagcaaaaaaatacatcacaatgcttaagaaacttgcttaacagaaaaaagattcctgagccacactctgaaaaattctgatactgtaaatcttgagagataaatagacacatatatgtatgtgtggatagacggatggatggatagataaatggaaagatagagatcgagatatagcctaaacttcatggcaagtataagctacttttgggaatttaggggaataaaaaattattttatcactgttgtactaggaacaaagcagattttccacacgttagccagaaaatgtaggagaatcagtgaacctcaaagggccagcactaaaaactgggcagcatcagtatcagttttggatcctagaaa

SEQ ID NO: 317901 - DNA, 4001 bp, Homo sapiens
aacaattacttcaatttttcaatttgcaatattaatgcaggtgacaggtattgttaaaggaacaaaaataaaataatattaaagatacttctccctctttttaaaaacaagcattaaattactgctacaaatctcagtgttccaagaacgtctgataagtacactcataattggtctattagcttgaattttggagggtttaaaaaaaatggagtggcttattatgtgggtctgaggctttggaatcagagtgcccagattccaacgctaattccaccaacctcacctacgtgatcatgggcaaagttttttactttttgagcttcatttatctcaaccataaaacagtgtaataattataccttcctcatgctgggatgattaaatgaaataattcatgtgaagaagttggcacagcacagcatggagcatataggaagtaagtaattagtgttggatatgaaattattattgaggttataacttgcattcaatggccaaaatgaaggagtagctcgcccccacttgtagcagacactcctagagatgtacttgattgataagagtagagagaaaagctttactcacacagtctttaactttagaactagtaagggttgtaaaggccagctagtacaagtccttagtgttcagataaagaaacaggaccgggcacagtgactcaggtctgtaatgccagcattttgggaggccaaggtgggcagatcacctgaggtcaggaattcgagaccagcctcaccaacatggtgaaaccctacctctactaaaaatacaaaaattagccgggcatggtggcacatgcccgtagtcctagctactcgggaggctgaggcacgagaatcgcttgaaccagggaggtggaagttgcagtgagccgagatcgtgctgctgcactccagcctgggcgacagagcgaggctctctctcaaaataaataaataaataaatacataaattaaattaaataaacagatgaaggaacaggatggtgacttctcaaaatccacacaggaagtctgaaacagaatcaggactaaaacatagctctttgccctttggtctggtgggctttctattatactgcactgtaccttaaatagcaatgcagtgaacaaaacatcctgggattgaagaggcaagaattgtcacaaacgcttagaaaagacaaaaagatctctgaaagagagtcagtgcagcagcgtcttagatcaagtcccagcctcaactgcatacactttctaatacagccgcgcccaattcaccccagtcccccagaaccttgccttagattacaaaaccttctcaacacagcagttctataccttcagttcattattcttattgaaaaaatctaattttaagacaaacccaagagaaatgttgatacgttaccttaaatcatgctgctgcagatttgactgaaggggaatttacttttgctttcactttctgttctaagattcagaactttgcatgcttcctgagtacagtaagtactagctggttcattatcacgcaggtgtgaatggagcttaggataagagctttatttcaaaaaggacaagaaactttttgtagaatgcacaaataagtggctttggagtagaagccaaaccatggaaagaaaggatcgccagtggctgccacttctgctgttatcacctcccttcccttgtccccagggtaaagccttcagaacatagtttatgttttttagtgccaagttgttgtcttaggaattgatcttgaacttctccttgtgctgcatcctcagtgctatgaaatctgacttctgcccatccaccccacaaacgtaactccaagcttaccaaacacctcccgggcagcttctgtgatctttatcagaggtgattattctcagattttccatgtctgtaaccaccctgtctccttgggcacgaggggactgtatctcatgctcatctctttgatctctctttatctgcctgtttgagttgggcttcaacttcctctctgctctgaatacagaccttccacaaagatgaaacctctggcctttgctctgccctctctttatcctttccagtacccagatttagcatttatccccattcatcccacattgctcccattgtgatccctccttcaagggttctgctgctgtaattccaacagcctgatggaccaacagtacatggatgtctaaccctaacctgaaccagaaccctgacaactcaaatagtgttttctttccccagataaacaccctttgctttatatgcttccagccttcttccattatctaggattgaaccatatagttagttactttgattctgtccctctccaatttgttaccaaagcctgttgatttttccttttcttttcttttttttttttttgagatagggtctcactctgtcacccaggttggagtgcagtggtgccatcccagctcactgcagccttgacttcctgagctcaaatgatcctcccacctcagcctcccaagtagctggggctacaggcatccaccactacacccagctaatttattattttttttttatagatgaggtcttcccatgttgctcaggctggtctcaaactcctaggctcaagtgatccttctgcctcagcctcccaaaggattgggattacaggcatgagacaccgcaactggcctttttgaatcattttcaatctctttctatccaactaagaaaaaatcccaccgcttattaaagtagtccaggtcctcatccttcctcacaatggccttcaatcatgtcttcccagcttctcaagctcagcttcttgcagttacttgtacgatgccaccagattaatcctttcaactactgctcgaccatgcctcccccactgctcaagatctttccttgatttccccatttacagaggggcaagtcctagtgtgggaaccatagtggcctactggcagcctatatgccagcctatagttgttttgtttgaatcacagtctattaaatggcaatacatccatacaatttctattgtcaagtgaaatataacaagcttagctcttatcatgttgcagacactcttcatagacttgtatcatgtgccttgtcctgctgtggtttgtgtttgcaacctatgtttggcccaatagcacatgttgccatgattagatcctagttaagtctcaagctttaatttttccacctttctacattttattatttcaacctgaaagaacaagtcgataaagtagaaggggcagaaaggaaggcagtagcctacacctaaggcccgaaacataagactgaatggggtccctcagagctgcatttcatgtagtgagaggggcaccacaggaagggggatggctggaagccagtgagtgggaaaaagaaggggacaaagacgacaaagaagaggaggccccaagggcttatctacggactctaactctgcagggcgtgggggcaggtagaagaggtataggaggctgggagtatttctgtgatattccttgtcacaagatccagcctagctgtgggtatgtgggcgagtgcatgtgtgttttcagagctctctcctgcccactggaacagaagtggtgatggagaatgaagaaacaggctatggaattgagctgcagaatcctagaagtgaaaattgagccagattcaagtacttgtagcttatttaaaagagtttctcagcaaaatgggctcctaacttttcttttctttcttctttctctctctctttctttctttctttctttctttctttctttctttctttctttctctctctctttctttctttccttccttcttttttttttcttttctcttctcttttctttgggataagctttgggaagtttattgcttagggaattcatgtctcagttttccatttcatcctggtctctgaattgtctcttactcagagagaccctccttgttggctctaaggcagtaccactcctccctaaatccacc

SEQ ID NO: 317902 - DNA, 4001 bp, Homo sapiens
tttatacaaaatttactaataaataaccatcttcataaagcgataattctctgtaagggacttgctctattaaggttttgttgcttttgaagccaagtataagccatataaggaaactgaagttcaatgccatttattttgttcacctctttcagatgcccaagaataacctcttttgcagcctaatgatacgttccaaaatcataaagtagatgagttatgcactttaaattctttgataaagctagtttgacttaacaagaattattccatggttcacaaatcttaccaacaatgaaaaaaaaaaagaatctcctgagaccatgccccggggaggaaaaaaaaaatcaaaactacagtaataaataaaggactgcctttggagatgtacttaatgaagctgaagtagcaaagaacaaattgtgaaataatttgatcctgatctttaaaacttattttttctctttgaactaaagaaaatcaactctctcctcgggtttccggtcattacgtgagacagcataggcaatctaaacatcaatatatatttaggatatacctaccaacaggattaccaaatttattcaatatatattcaaaagtacagtattgtatttcacctccctgtaccgcaaaaataccgggaaaaaaagtaaacagaaaaagactaaaacaccactgaaaaaaactttgggtttactgctatcaaaactagtccccattggttcagaagtgttcatagctctgactggtggaatgtctgccatgcttcatgaatcctgcccccacagatgtaggcagaacctatcactatttatgcagaaccgaccaaaaacatttgggacaacacaaaaatgtaaagaccatactactcgaaaagcacagctttttatcacaatcactgtgattcccttgaaaatcgttttaagcgttttacttcccctcccatcgtctgttctgaactgtacagaagtcctattaaacgtcttacaggttgttaatgttgtttaattatctctccctattcttagtccttactccttttttcttcgtaatggatcagttacaagaaaagcctagtcgatccttgctttcaattaattaaacaagttatacggcgctaaacgtctgaaaaacacacactacacacaactaaagaaatatattactcaccctgaaaaacaactaagaatggcaagattttttggtttctaaaatctaactaaatatactgatcagggttggaaataaaaaaataaaaataaatacctctatatacaattaacgcaagcgccaatataatcggtatgagtataaacaaacgcggcagccatctcaataacagcaaatcactcactgcagcgaccaaactttcttcccaaacagaaggtgcctggctgagcaacttaatatacactctatacgttccagaaagccaaaacttctggcccctgtgctgaacaaaggcaatcgttcttcggattactaaaaacttttcgtcccaccgcattcttacaacctcttccaaaaaattcaaagtccagatggtggggggggcaggggggagaagggacgcggtggggtgcagttcgattatttagcccctcaattattaaccgcttcgatatgagaaaaggagggtttagggcaacttggagaagagtgaaaaacactaaagaatcatctcttttccgagtcacaaagtcccatgaactttgtgactcagagacacttttcgtgaaaattacctttcggcgggacaccgtctcagggcagctttttcaaggcttcgcttgacatgatttccttcccttcatcagtcactttggatccagctgaatatctctctcgggtgagagcggatgtggactggcctcccacagaagaagagtaggtggctttggtgggggttggggtgcgggctggcttcctggtctcgagttttgcaggagtttcccagccccaacgaggatctccgccgaaaaaaaaaaaaacaaaacttttcactcgtgacaccgcccggaattgcagtgcgaaactcacttcctgccttggcgagaagcaggatccagctccgtccaggggaacccggaaaaccagctccgcgcgcaccggagagggggaggggaggggacggccgccgggagcctcgggttccgggcaaccggcgcgcccggcacaccggacggcagcagcacccggccggcgggggcgaggacgctgcccgggcgctcggcgagcctcggccgcgctaggccgccaccgcttcctctccgttgcccccagagccgggcggcagggttattgtctcgatagcgcttgccgcgcccttcgtccgcgacgccgctgccgccgccacccggagccggagccgaggagtcgggcaggctcaatagcggccccctccccgggccgtccgtcgggccgtccgtccttccgtccgtccctccccgctttccctactcgccctcgaaccctcttctcctccctctcccgttttcccgccaccgtccctccgctgccctgcttgttctccttcgccagcggcggtggctccccgagacgcgcagggggcgggagcaggaggcagctccgtctcctcacgagcttgcggggccgcggcaggggccgagactgcgtcccgcgccgccgcgccacattcactcgagcgagagacggcgaggggagggaggacggagggagcggagagaaaggaggaggaatggggcaggggcggaggggagttactgcctcacaggccgcggcggcaacagcgccaccgccccggccgcgacgggtgaagaggctgcgcgccgcgactctgcggcgggggcgggggcggggcggcctcccgccggcttcgccccaaccgccaacagccgggcaggaggcctgcgcgggccagtcagcgcgcgggggcggtgcgggccgacgtcggcggctgggggcagcgggccgggggccgggggaggggcagccggcggccgtgggttcgcgtgcaaggcgcgccgtgaggcccactctggcccaggcccctcgaggcctgcccgctgctccctgcccgctccccgaccccgcactcccggactcccgagccccccagggtggggaacgctggcaacgccgaccctgctgtctgctcgcggcccagcgcccagccagagagatagagagcccacaggcctccgccgcgccggccgatggagtttctttgtacgacagtaatcggtgcacaggggttgttggagtccagccctgatttgaaggcagcaggtatctcttgcagctgcagcactccaacttcctctaatggcacggtcaggtcgcaggaaaccacagcggcagcgcggtgcagcttcccacgcccgcccttcgagcttgttccccagcggcgcagctcagcctcctccaagtctcagcctcataccggcggggagacaaagctggcgctgggagtgggaaaagggcccgcgaaatggcctcaagatcgtgcctttgttagaagaaacatgggtacgctccgatgcgacgcaggcttccaaccccagcggttcggtggtggtgcagtcgttgaattgcgctggccctaataattcagcctggcagggttcgcgtttattgcggagagagactcttaagcattctgtcaacacatatggcaaatagaaagcctcaaccataacattgcacagtttttgcagttcttgctttaaatatgttcacagaaaagacggccttgttttacccagagaaggagcgtaatgcggagcgaaccattcgtcacccccattctctgctgcacttaactgtgtacagtgatgataattagcctctgggtccctgaagtccctggttcagttcttccgtctgtattctagagataattatttattaccaagtttgaataaagagctatatcccctacagaccttttttttttttttttttttggcttgccaatggaaagagttcataaattccaccaagtaatcatttaccaa

SEQ ID NO: 317903 - DNA, 4001 bp, Homo sapiens
tgggaaacatagggagaccccatctctacgaaaaatttaaaaattagctaggtgtgtgggcacatgtctgtggtcccagctacttaggaggatgagatgggaggatcatttgagcctggaaagtcgaggctgcagtgagctgtaactgcaccactgcattccagcctgggtgacagagcaagaccctgcctcaaaaaaaaaatatttttttaatttttaaatactttatttgtcttaaacgtataagcaatcctcacttggcacagtctgatatgaatttcagttaccacagtttattaaccgtgagaaatagcataaaagtttgctactagcttttcagttcacaaatcattacataaataacatatgaatcaaaattgaccaatttgcaattttacttctttcaaagtctatgggtgattggtcactgtgcatctgttattcagttcacacacaggctgcaaagcatggaggtttgttattaatatttctgtgcccttgagataaacccacatggaattttacagattaaaagaggaaattggccaaaagaatgaaagtgcactaaagaagagtgataatactagaagtgaaacttgcattaaacataaatggagcaaatgaaaaaaaagctgcctgtgggaacatgctgattgtggcaacaatgacactgccgccatttgagacattctagatatgcagactgaggaaatcagtgaaggtgaacttatagacataaatgaggaaaagtgattgtgatgaaaggctgatgatgtgtcagaggaagtgacactggcaaaaaaaacacattaaaggaactctcagagatatttcacaacattgaaaacgtaatggataaaatgttggaaactaatatttaaatttctccagaacgcagaactcataagcaactgtgttctccaagtaaatatcttcacaggttcctcaattaatgtgggcaaaattaaaagtacaacttgcttcttccctttggaaaaccctctctcagagtatattaccaacattcaacttcttatacaaggcatagatctgggaatcattattcattcttctctttttgtcattcacgtatccactcaatttccatggcctgttgattctatttctcagacgttgttcaaatctctccactatctttattctacttggcaactctgtggcccaggcttccaacaactctctcccggacaagtgtaatcacaacagttacctaacttggctcccactcttgttctcagttgcaacccattctccaagcagaaaacaaaatgcaatagctgttaccttattctcatcttcacacctctactcaagtacacaaggctcttcctcatctagtttctgtctacttcatctcttgtcaatggtccctaccccaattctccgctctagtcattctgaactttgttcaattcctggcctgtgtcctctgcctttaataggctgcctggcacactgtaggaattcactaaatatgcagactgaatgaatgaacgagtccgtggagggcagttattctttggagtaacttaagagagaaggaatacagtacaacgaagtattcttatttaggtttatagtgtcttcacctgagcccgcgggggaaccccccccccacccccggggaaccccccccacccccgccgccccccgcctgcaagttgttaccagtaaataaaagggatcctattttagcaagccacacagcattagagggcaaataatagtttggtggcaggagagcgatgagacgggaaagtgtggggcaaagcttacagtcattggtccagattctaactggcctgttagccaaaaagtaaggttttctttacctccgtgttgactctgctctccgaaggcgaagagggtcctccaaacccgtttggcgtgcggacaaaaaccccagcatatcgtgtcctcacaccggctggagcactggacgtcgccatgacagagctcaggggcgggactggaacagcagagtctcccattggtcagtcggtgatatatccggccaatggtgagcgccgttactagaagggctccaggatggaggccgacctgacttctccgcctcggtgggctgggtcggcggctggagcattacccctactgcgggtcccgctgctggcagcgctggaaactgggtggacggcatgggttggtctcaggatttgttccgcgccttgtggagatcgctgtcaagggaagtgaaggagcacgtgggcacggaccaattcgggaacaaatactactacatcccgcagtacaagaactggagaggtgaggtggcggcgtgggcagcgattgcgtggtcagtgattgcgaggtcagtaaaggagggaaaagtgagagcccctagtcaactaacgcatcatgcgacacttagggtgtcaccggagagaatttcccgagttcgttctcccctgtcgaccccttcactctggcatcggagccctacccggcccggctctgggcgccttggcccggcctcgtgcgtccgcggtccctactacccagcgccttcccccggcgtgccccgggctgcttgcgctgttaaggcgcaccaccactttcctcccagccacgcctgtagaggagcctcagttttagccctggactggcgacggaggcagggaaaagtccacggaaatctttcaccaaaggggctagaagggccaggggaggggtttttcgtacgctgttccccgccttgtgacccagagctgagtggtgtaattgaagaggagtatcttcagcgcctcggctgtcttctttcttggtgtttacccttttcggtggcaccctggctccggcgctggccccatgcgccttccttactaccaagacttgtcagaagtaggtccatatccccacaaggctcgctgattcctttctcgggagttgacattccaagaccccgttgagctcaatttaagaaacgtggcaataatcatggtgttactgtgtaggattcgtgccaagtagttgagcgggttgtttggggagtaaggaggcgttgctgtccattgaaatcacactgtgtagccgccgtcgtaacctcttctgtgttgttccatcgccgcatgcagaaaatgtcaggttttgggcgaagaggcgtgggttagaatctcagctttgacacctgatagctcgggaatcacggaaaaagtacttgtcctctccaagtctcaacatcctcacttgaaagttagagataatataagatcagcaatgttgagaagcactaagacctttccaagattatgtgccattcatttcccacacatataaaatgtattctgtgatttatcactcaattaatttatttttgcctggcctttttctgtaacttattttaatatttagacttgtttccctaatgagctcctctgtcaggcagggaatatgtctcacaaaaaaagaaaaaagcctgcaaagaacatagcatggtgttaagtatttcttgacaggttgcaagcagagagatgtttcttttccataagttgtcagtaaaattaaaaatatgcaaactgtcagactgagtttttttaaattgaaatataatttacatacagtaacattcaccctttatggtgtacagttttattgtttttgacaaatgagtagagtaacctcactggattcaagtaatagaataattccatcaccatcagaatttcctccaactccttagtagttcattcccacaccctttggcaactactgatgtgttttatgggcctatagttttgtcttttctagaatatcatataaatggaattatacaggatttagacttttgagtctggcttgcttcacatagcataatgtagctgagattcatccatgtgtcagtagttgttcctttttattgctcagtagtattccattgtatgggtttgccagtttatctgttcacaagctgaaggacattaggatgtttccagtttctgtgattgtgacaaaagctctacaaa

SEQ ID NO: 317904 - DNA, 4001 bp, Homo sapiens
ggttgggagccatgtgtgacctgagacctaagtctacccttcccatttagcacccataaagtccaagataaggccctcatccctggagcctcatttcctccttggtaagacggaagggtgaggtgcagggagaaaggattaaaagatcaaaaacagcaatttccccagcaagctcaaaatcaccggaacctactgaatcacacaggggcagggggcggcggtggcacgaatccctatggttggcctgggtaaggggaggctttgtggaaccagaaattgatgtgccgaccacagctcttatggcccagacttaactgatgctattaggactgaccttgaattccaccagaggggctgtccttgttcaaaactgcctaggtctgctagcctcagggctgcccggcaggggcaagaagccggcaaacatttgctagctggtatcagggacccggacaggctggaaaaccatgtcaaccaatcaagaggtccaagaccagtgtcctctttgggcctaaaccccaatatatcccatgctatgggggtcatggcaggctaagggcctttctctctgggtagactgtcactttacactgccttcacatgcaagaagaggggaagaaatacctcctgtggcacaggcatctgaatcactattttgtggatgtggaaaacccctcctggagaacaccccccatccactaatgccctatttctgagctctaaatcatgccagactctgctaagggtgtttcacgcactcagtcgtcacaagcggagaccttatttttagccccaatttgcaggtggtgaaactgagggcgctcggagacttgctgaggtcagccagccgagcggcgacagggagttctgaacccagagcctttgcccctaacttctagaatataccgagctgttcagtagaaagggcagagccaggattctaatccagctcctccctgcattaaagccctgctcttttcccagccagacaccaagtgtggctgcctcaggccaggacatcccctggggctccacacctcaagggaacctctggtggagatctcttcccccgcaggcttccagaatgccccatgcaacctagaccatgaggcagctggaccccacaaaggacccattgtggtgactgcagaaagccaaggccagaccccggtggcccttctgcagagtcctgcccaaggcgcctcctccccttcccatggtgcccccatacccagcggacagggctggggctgagggagggaggggcgggggcaggcctcccgatctgcccggcctgggggagcctcaggctatagaaacttaaaaccctccagctgccggcaggctgcatggggccccaggcccctccggactcattccaggtgccctgccccacctgtcagctgaggtggggtccaccaaggaggctcagtagagggaggagagggatgctggggtgttatgggctgttcccatctgggaggagggaggaaatgtttcctagtgtgggggaggggaatgcaaggtatccgggcaggctggggagggggctcggcggagggaaggtgggtggatttgtctcccgctgcacgagggggcctccgcggctctggctggcttcgtgtgcggcagggggggggctcgcctggggtccctaggggcctgcggaggcatgcacagggcggggagccgcttttgcatgcagggcgggaggggtccgcggcgtgccggggcgctccctctgcccgctgagggaactcccgactggccggggtcgccacactcacctcctgaagtcaaagggcatcgtgccgccgccgggggtgggagcgctgcaggccaggcgggccgcggcgccgcgtgggtccgagcccgctgccaacgcctcctccggccgccccgcccccgccggccgcccccctgacactcgccactcgccactcgccactcgcctcccgctgccgggaagtgacgctccgcgcagcccattgggcgccgcccgcccggccgccccttccgccacccggttaaaggggcccgcgggcaggcagggaaggggcggagagtcgaggctgtcggaagggaagggagtcccccaaagactccagtactcattccttcaagcctcccacttagatttccttctccatctctttggatgccctcggacaaattctctgcttctccgagcccagttttttgcatttgtaaacagtttcactgaactgtgattgagttgggggcggggggcggggtgatacagactttggccgtgcacagcgtctagctctgagtgagggcctaatactgtgggggaagggaagaggtcggccatcctaggctgttaaggtggactcacctctgcccctgccgtgtctctctgggaaagccactgggcttctcagagcgccccccccccgccccgccccttttgcatatctgcacaaagaggacgatgacacctacttgagggggttttcctggggatcagctgagaaacaggagactggcttagcacagtgccaggcacctgaaactattgaggctggcagtggctgtccctgcttccatctgcccctgtcgttcactccagtgggcattcacagagcatctgctctgaaccaggtccatcgagaacatgcagggttgtggcagaggcagatgggacctgcactgtgacttggccaacgtggactgtgccgattgtctccttcttagagcctcagtttcctcctcaggaatacagagcagctgcctccgtgactgctggattagaggagatggtagttgaggtcacacaagacctgagtaggggaaactcactctgaacttccccgaggttctgtcactggccctttctccaaggttgtggtgggacagggcttcaaaaaacccaggggagaatggtgagggctcgggttccaaaagcagagtcaatggacagtttccccctgtgtaaatagaggggaacagcagtgctggttcctccgggaggattcagaagggacaacactagcacggggtctggggtagggtgacgtggtgaaccaaagccttcccctagagcatatgccgggacctgacctctgcgttcccttttcattcattcactcattcattcattcattcattcagtgtcagtggtctgacactgttgggggagaaaaggaaatctcagcctgaactggaaacctagggacagcagggagagttaagggatcttgagcagccactgcttccaaacagccattcgttggccctgtgtgggaggaaacatgcaatgatggatctttgacctcgaatcctccctcctcaaactgtggtccacagaccagccacatggccatcacaggacagactcttgtccccaggccagacctactgaatcaagtgtgcatttgggatgatatccaaggtcagcaaatgcctggcacagagtaaatgcaagacagggttgactatcattgctcttttcgagtggggatagagctcccaacttttggctgggcatgtgggtgctcacagtgaaagttgcatttccccagcttcctttgtagctagatgtggcattgagaagtaaagggaagtgtcttgtggggcatctgggatagttggtatgtctgctttaccctctgtgtccctttctccatctggctgccaggaatgtaggcgtcaccatcctggaccataaggtggaggccaccacagagcagagcaacaagacaaaaagagcctaagttcctgccgggcacagtggctcacacctgtaattgcagcactttgggaggccgaggtgggcggatcacctgaggtcaggagttcgagaccagcctgaccaacatgtggtgaaaccctgtctctactaaaaatacaaaaattagccgggcgtggtgccacacgcctgtaatcccagctactcaggaggctgaggcaggagaatcgcctgaacctgggaggcagaggttgcagtgagcccagatcacaccactgccctccagcct

SEQ ID NO: 317905 - DNA, 4001 bp, Homo sapiens
atctcgagttgctaaggctcacaaagtctcctatttccagcagagagaaaaatgcttaaaactagattcatcagcaacctgaagaaagccaaaagaagcaatcttaaagatctttttagtatcttgatcattcagtagaatactacagtgctaaagactccagatgccacacagcttgtttctttgcccatatgtaatgtacatttacaatcacatgtacaaaggcatattatgccaagagaaaaagcaatccactgcatatacatgctatatcataagtatgattgtgttaaccacttcctccctaatttccttatgtgaagtactgttttcttggtcaataagccccataatttacaaaatatacagatcctattcagttgaaagaaacatgcatatgtgttcaccaaacaaaatattttctcaatattctatttcttattgtatataaacaaaaataaactaagcaaaaaataaaactctcctaatactttaagaatttgtttttttaattttgtatgtcttgcaaattaaaagatgattaatttatacattatatgtctaagaagtaggagaattaatgagattagcacaatactggataaatattattcataaaaaatgtattaaatacataaaacataataattatttagaaatttctcagtcctttttataattttgaaagcttcctggtattacacaactgatggatggggttatagcatgtgttgcttcttaataatagctcttcataataagatcatgagatatctatacgtagagtatttttaaatcatcattctttttattctaaacatttttaaaatgttaaatattttaaactagttactatgtttaaaataaattctacaaatgcttaactacattatttagctaaaatttcaaccgacgaagtttttctttaagtgtacaagtggtcaacctcattctttacagacttccagtttttatttttctctattgttatttttccttgtcttaacaccatctgctatttttccagatgaccaaaacctttataaagtcagatgaggtttgttttatgcttcaggggaccctctttgaagagtgagttattttgttagatgacttaagctcactctattccataaagtgcatttgtgtttatcagaaatatttgatcttgagagtggccctccatcctgtggaccctttcaagatcaaagaatcactaaatctgggggctagaaaccattccaagaggttatctagtgcagacctttgtaatcgctgcctcgcagaggagagagcacctaagccatccttaacagattacctgtcaagtttctaaagttttccagaaaaggagccaacacaatcttccattgcagctttctttttgcgatctcctaaggcaacgagtaaaatgccacacttctttctgtgccttcctgcacactggtttcagttgctacttggagctatccttcagtctctacccatgacaatacctgtgtggtgccttgtcaagaatccacctgccttttccctcttactcttgaggagcaaagccacctcacctcccaagctggctaaaagctctcagcatgccccgggaggggagaggtaaggggtcactctttacctttgcagataccaaactcttcaccaaaaggatcctccccattagaaggctgacacctcagccccgggccacacttcatgccatccatgcctgagactgtgcggtagcaagtttctccccgccctgcagcgcacactcggcagcagccacagtcgtcgagcactgtcctcttgcagcgcgggctgcttttgcactcactgctgtcacagtgttgagggcagtccaccgcataattattgctccaggcggccaccaggtgtgcaggcacgaggagcgtggtcagcagcaagacgctcttcatgtttcccagctgcctccggctcggctctccagtcgtggtctttgctggtgggaagcagccgtccaaactggtagctgagcctctgcctacacgtttatgagttttatacactgggttgcccgcatgctttcccgtcatcaatttcctcaacccagcagcagcgctgtcctcctgccaggctctcttgttttggtttatgaaatccaggatgaaggctggattaacacgctgctgccatccaggaattgaaaagcccaagctgatgtcatctgttatgtttagatggttgttttgcatgaggactgaaaaactcactcacatccgtctcaagggctcaaggacgtctgtgaaggagggataaagaaggttgcacaccctccttcaggacgggaattgttctgaccctggcatatcacttgaggtgtagctttgtctcagagcctctgtagtcaggaggaaaatgatatcaacatgaatcatcaggaccgaagaagcttcttcaaaaaaaataataaacatttggtatttcccctcaacaaatagctatgagatcatttgaaagaagaaagggttatattgtgtcttttcaatacttagaagaaagaaaatattttgatagggctattttttaagaccctctcttccttcctctcacccctctcctcaaatgttatttctaaagcaattcatgttacatatatctaagcctattgtggatatagctgtgcttccagtacaatgtggaactgcctctgagaatttcttttaaaatcaatacaaaaagccacaagagaggtaagatcctttcggcactgcttctgggttactcaattctggaaaaacttatcagttggacttctgatccaaaacttcctcaggggaaggctcatccatcactaagtctgcttgtccaatgacggagtccacccagagcccttcccctcacctcctggcatctatcagagccctcactaaaaactgccaagcgcggcagccagcccaaggcaacaagtggctcagcaggaaaatcagaacacagcccccaagaaacaagtcacagggaagggaaacattacccctcaggaaacaaggtctgcatgctaagagggttaccgtgcctaggtccctctgggaaaacagagtagccctcttaaaatatcaactgtgccagggtcttattaagtaaggttaaagaggagagaggggagttcttacaccaaccacatgccgaattccatgcccccacctcacttgtcaaaagagatatagactcactgtcacttagtaaataacaacccagtaaagtgggtaattcttggtctgtcacaaatgagctgtaagaaattcacaggacttctcttggcctcagcttcctcttttgagaattgatggtgttaggctacctgacctctaaaattcttgtttcccatagaagatgaggcagagcgggcattggatgtaacttgaagatcggcttttgcaaatgcaattttagggggacacagggagtaaattcagaatacagagaattgaggcagtaggaaatgaaagcaagagttttagctttcaaattttccaaatttttcatgacaatccaatttgaaatactctatctccccagaagcacttacttagcaggtggcacactctgatgttttcagtaatgggtaatatttgttgagttaatagcttaaacactttacatgcattaactcatttgcacctcatcacaatattatgaagtggctgctattatcatgcttattttttaaaagaagaaactgagtaagaaagaggttaatttgcctaaggtccctatattgaagggatggatgttagtctaatgtcagagccacatattctattgcctattacaatacataattgtgctttcatggccaatagttccaatggcctaggtcgcaatttaggctgaccctagaaaatgtcccttgttactgaacaccactttctgaggagtagttaactggaatagtggttaataataatatctaacctttacagagatctgactgtgtgccagatgccatgctaagcagtttatgtaga

SEQ ID NO: 317906 - DNA, 4001 bp, Homo sapiens
tgtaagatcattaagaaggtctggatattctattgaattcaaagaaaaacctaaggactaacaagccgctgtcttcgattcatattaaactaacgtttctccagtaaaccgaaggagtgagcacaagcccgtcactgaatggggccaaacttttagaagcctcattccaaacagaactgtccctaatttattaagaacaaaacactagtaaaaccaacctgtgaattgggccttcagtacaattaagcacatcctgtttcatataacagtaataatgaagagcttggaggggctgtcattctaaaattgcaaatctacccataaatgacaatcctgggctggaaaccagaatgtcaaattcttgtgctgaaatcaacttttcacatggcctgaggcaggccattctactattctaagaatgctcagacatacaagtatgtaataatgttccaaacacttttttttgggggggggggcacttcctgtaagtaaaaagtttctatgactgggaaaggaacaaaataaagtaataaaagaaacaggaatacccctggcacaccttcctcaaacgaacaacgttaaaaaaaaaagaaaacacacacacacagctaattttaatctagcctactctccccccaatggacacacctacagtttcttatcaaaatgtacaagactcaaagcccatttaattcaattatgaatctcactcaacaagcatcaagcacatcaggcgcctctctacagcgatatccccacaagtttcagagaaatgccagcagggactctgtagttatgattcctatcaaacggccccctaacccgtatttctcctggacatacacatgcagattcattaaccaaaacctacccagcacccctcacatcgcgcgtacgttggcattttcagtttataggtgggtcctggaacagctaaaaccaggaagctccggggtaattagaggacttgggagaagtcatcttgggacaggtggaagacccagagaaatcaggaatcagaaagaagctgtccctggccacctctgcttcccgtcccatccaaacttcacccacccgggtctcagaagcccagaagggagaggccattttaatgaggcctggctgagaaatgaagggagaagaggaaatcagggaagggccctgggaaaggaaggccgaacactttgccacaatagcacccgagtcgggtggcagcacctggagcccgaagagggaggacctggacttaagggcccgggagaggtgcaaaagtagcggtggcctaccacgaggggggccgagtgatctaaaccggggagcgcgggccccttacccccatgcggggaaaggaccccttctcgggccaaccgcgccgaccctcgcccctgggtcaggggctactacccagagatccagaaggcgggagttggctagtgcctggttctcctcatccggccatgcggcgcgggggcgtccatcctgaggggtccgggaaccaagagggcacggagggtgccggacgcggcgctcacccgcgggccgcctccaagctcttaatgagcttcttgatcttccagatctccacgttcctgtcggcagcactggggtcgtccgccatcttctcgcctcctcctccctagagcggcccggcggggcccggagacaccaagaccacagagttagcgccgccgctggggcagagcggcccccttcctcgccatcccccagaggccctctcctcccgtccggtgcagctcgccacaaaggtcaccggcctttccctccctgtgccttacctaagggcccagtcctgggcggcagcggctgctcctccccggcggcggctccgcggcggcggcggctctgacgtaggacaccggctccctctctccaggcagctgcatgtgttgcaatccgctcacatggggcctgtgacatcacttcctccgccaggggcggagtggaaggcggcaggcggaagggagggggccggtgcgagtgaggagaagctgggcgtccgccgcgacttctcattggctctctgccccgcagcctacaatgagcccgccgattggctgcagctgggtccgcgccgccttgtgaggtaaggctggggggtgggaggtgccacctttcttccggcccggcaaggcgagaggaggaagcgggcggaagccggtggctctcgcgagtttactgagagcccccgtcaggctcgaatgggggtggttcttaaagagagaggaccggggtcgtcgtcttttcagtccattctccttgaatagggtggacatctgaggctttgcgactcgaagctaggcacttgggcccgacgcgcggtttgaacggtgcttgagaagccgcgaagaagcgcctcgcgctcagcggcttcttcgctgacgaagtgctgcggtctgcgtgcgtcatggctgcacggaatagtgtggaggagtcctggccagtaggtctggatgaggaacctgcctccgggcggtccgggaccctcacctgcaggggcgaaagaggcctgttttctctcgccccagagctaggacgggctcactttggacttagaactttatggggtggaagacagcgggggctgcctgagcttggagacctgaggtatctggtcccatgtatgatttggcctgagccgttgagaatgggggtggagagagttgaaacaaaatgggcatccacatacggttagaactttatctttttgagttaggatttttaggtggctactttgtcccccctcacctcgtctgggttcaaatattgagcccagaccgtgtgctggaccctgttttcctggggatacagaggtgaaccaaacagatgacagtacttacccttatggagcttatagtcgattgggtttttaagtttgtgattttatactttttgtaataaaataattacacaaatgcttaagtacttcagggtgctctgagagtgtatggcggggacccagctctgaaatgagacccaaaggatgattaagagtttgtcaggaggaaacagaatacagttgagaactacagaaacgccagtgtgctggcacaaggtcagggacggggagagtggtttgagggagcagcaggggaagaggtcatgtagggtcttttaagccagattcagaagtttggtttctttcaagaacagtgggtagtttaaagggtttagagccctggtgtggactggagagagtacaggagaagcccagagaccattttggctgcttcattatcatgtgagagatgattttcgcttacattagggtggtgacagtgcagatagaagtgaatgaagggcctggtgcagtggcccacggctgtaatcccagcactttgggaggccaaaggggaggatcgcttgagcccaggagtttgcgagcagcctgggcaacatggcaagattccgtctctacaaaattacaaaatattagcctggtgtggtggcccgcgcctgtagtcccagctgcttgggaggctgaggtgggagaaacccttgagccgaggaattcgaggctgcagtgagctgagatcacaccactacactccagcctgggtgacagagcgagaccttgtctcgaggaaaaaaaaaaagtgaataggactggatgatggattggttgaggaaaaccaagaatggttcccagagtactgaagtggtgacatttactgaggtgggaaaggtgaggagtaggtgttgggggatgattgagaatttcatcttgggcctgttaagtttgagattgcttatgagacatgtaagtagggatgtccgtcatgcgctttcatttgtatggtttttgaatactttttgcatgtgttataaactgtgtccacactttgaagatgggggtatgacctccatttcatacatggggaaactgaggcaaagaaaagtgaaagggatctgctcagagtccacagctagtttatggcttcccgactccatttttggagtccagtgtattatacagtgacccc

SEQ ID NO: 317907 - DNA, 4001 bp, Homo sapiens
tttagtaatgtggcctctataaatgctcttctacacacgtgtaacataaaatagaatctgttatagctcagactacattttaaggaaatctagttttgtattttctgaaaataaaatatacccattatagcacattggtttaagttctgaactctgctacatttttgctgtgacatcttggacaaattatctcttagcctcaggtgccttgtctaccaaatggtggcaatacttgtgaggattaaatgacttaataatgtactgtagcacagtctataatatagtatgtgcttaataaattattttgccaacatacttccctttattcagatgtagttagtgagcccattttgcaggtggttcctttttcaagctacattaaatttgggtcatatatcaagagataaccacataggattatcttaatttcaaaatcactcttattctagcatattttaataactactgttaaaaacaaatccatgattcctatgcctagaattctacactgctaaggggaggaaagggctttttcatttccaaaacaatactgttactcaaccactaagtctcactaccttgtcctaataaccatgcctgaaaacctcagtttcctcctgaaaaccagagtatccccaaaacatcagcaaatacagattcattttgccatccacttaagtctttaaagcccattacaattcttctaaagatattttatcactaggtaaagtaggaataacattttccactgtaccctatctatgaaaatctagagtctgactttaacacaagttggcaatgaaaatattcccacctccaaaaactggtatatactggggaatcttctgactcccttaccaatactcagagatggccaagattttaaatttccatgggatcaagatgcaaccaaatcctgattaaaagcaaagtaggacatgattattaaccacaatgtgtagcggaaggtcctccagctattttagacagcttaatcatgtctgaaatatccaaactcaacaacttgaaatacaagttgtgtcttataacttcatttttagcatgctttaaactttactgaactttgctaaacaaagaggtaaagccttcaaaagccttaaagaggcgcttaaaagtttctagtggctaggtaacatgggtagaacaaatttaagaatgagtttccttcattaagcagtagaaaggaatgctgttacttattaagcaatgtcatcttcaatgttacttcattcaaacaggcaaattatagtcatgatttaattttttggactgtttcagagaatataacgtatgcaaattaaaatgtgtaaacctgcctgctactgaaagcagtaagaacaaatccagaggtcacatccacctatatacaatactgcaacaacagcaatctataaaatgcaatactggattgaaggcttcaagtaacaaaacaagatcctactgaaacaaaagaacctggctaattcttggtagtgcaacataatgggtcgtgacctatgttaccctttctgtacagtattctcacattttgggaataactggtcactctatcatacggcacaagttcctgtaagatcattaagaaggtctggatattctattgaattcaaagaaaaacctaaggactaacaagccgctgtcttcgattcatattaaactaacgtttctccagtaaaccgaaggagtgagcacaagcccgtcactgaatggggccaaacttttagaagcctcattccaaacagaactgtccctaatttattaagaacaaaacactagtaaaaccaacctgtgaattgggccttcagtacaattaagcacatcctgtttcatataacagtaataatgaagagcttggaggggctgtcattctaaaattgcaaatctacccataaatgacaatcctgggctggaaaccagaatgtcaaattcttgtgctgaaatcaacttttcacatggcctgaggcaggccattctactattctaagaatgctcagacatacaagtatgtaataatgttccaaacacttttttttgggggggggggcacttcctgtaagtaaaaagtttctatgactgggaaaggaacaaaataaagtaataaaagaaacaggaatacccctggcacaccttcctcaaacgaacaacgttaaaaaaaaaagaaaacacacacacacagctaattttaatctagcctactctccccccaatggacacacctacagtttcttatcaaaatgtacaagactcaaagcccatttaattcaattatgaatctcactcaacaagcatcaagcacatcaggcgcctctctacagcgatatccccacaagtttcagagaaatgccagcagggactctgtagttatgattcctatcaaacggccccctaacccgtatttctcctggacatacacatgcagattcattaaccaaaacctacccagcacccctcacatcgcgcgtacgttggcattttcagtttataggtgggtcctggaacagctaaaaccaggaagctccggggtaattagaggacttgggagaagtcatcttgggacaggtggaagacccagagaaatcaggaatcagaaagaagctgtccctggccacctctgcttcccgtcccatccaaacttcacccacccgggtctcagaagcccagaagggagaggccattttaatgaggcctggctgagaaatgaagggagaagaggaaatcagggaagggccctgggaaaggaaggccgaacactttgccacaatagcacccgagtcgggtggcagcacctggagcccgaagagggaggacctggacttaagggcccgggagaggtgcaaaagtagcggtggcctaccacgaggggggccgagtgatctaaaccggggagcgcgggccccttacccccatgcggggaaaggaccccttctcgggccaaccgcgccgaccctcgcccctgggtcaggggctactacccagagatccagaaggcgggagttggctagtgcctggttctcctcatccggccatgcggcgcgggggcgtccatcctgaggggtccgggaaccaagagggcacggagggtgccggacgcggcgctcacccgcgggccgcctccaagctcttaatgagcttcttgatcttccagatctccacgttcctgtcggcagcactggggtcgtccgccatcttctcgcctcctcctccctagagcggcccggcggggcccggagacaccaagaccacagagttagcgccgccgctggggcagagcggcccccttcctcgccatcccccagaggccctctcctcccgtccggtgcagctcgccacaaaggtcaccggcctttccctccctgtgccttacctaagggcccagtcctgggcggcagcggctgctcctccccggcggcggctccgcggcggcggcggctctgacgtaggacaccggctccctctctccaggcagctgcatgtgttgcaatccgctcacatggggcctgtgacatcacttcctccgccaggggcggagtggaaggcggcaggcggaagggagggggccggtgcgagtgaggagaagctgggcgtccgccgcgacttctcattggctctctgccccgcagcctacaatgagcccgccgattggctgcagctgggtccgcgccgccttgtgaggtaaggctggggggtgggaggtgccacctttcttccggcccggcaaggcgagaggaggaagcgggcggaagccggtggctctcgcgagtttactgagagcccccgtcaggctcgaatgggggtggttcttaaagagagaggaccggggtcgtcgtcttttcagtccattctccttgaatagggtggacatctgaggctttgcgactcgaagctaggcacttgggcccgacgcgcggtttgaacggtgcttgagaagccgcgaagaagcgcctcgcgctcagcggcttcttcgctgacgaagtgctgcg

SEQ ID NO: 317908 - DNA, 4001 bp, Homo sapiens
gcaagcctgccttccatgctccctccaccatcgtcctcctcggggagctaacacagctgcttggtgagcatcagtcaatgagggaatccgatacacctgttccccttgacttcagctgtctgattttcatcttcatgaatattaaaaagattcaccttctcctggaatttttcattctccatgcccacatgctttcagacacctctcttctcctttttcatctggacctacattgcaacctttcctttctctttattttctgattatgaaatttggcataccaacgtagaaaatctggacaggacaaaaatacaaagatgccagaggcaactccccttaaatcccatcatctatgggcaactcctcttaaatcttgctacccaggggcaacttcccttaaatctcacaatccagggacaacttcccgtaaatcccaccactcaggggtaacccccgctatatcccaccactcaggggcaactccccttaaatcccgccacccagggacaactccccttaaatcccgacactcaggggcaactccctccaacagggcttgtttccttccagttttttccctttgagtttcttttaaagctaagattccactgcttatatgactttgtaggtgcacacttttgttttcttattttgtttggacattatcatcagcatttccattgacattaaagcctgtatgattttgattatagggctggataataacccaagaagtggacccccagccgctctgctggggcacgcggtgaggtggctgcgcccatcttaaggctggagtgaagtctgtcacgctgtgggtggaagccaaggcaatgtgagtggagagctgtgaagcagggctcgccttggagtcagaataaagctactcatgtggaaaaggggaaaatctggagttaaaaaacgcaccgcagaggcttccatcccagcctgaagactaaagattttgggtcacagaagccaaagaggaactcagagaccataaacagagacccaggtccagcccctaccagggcctttctgactgccttcccctggcgctggctccgctgtgagcctctccgccgagcggggggacaccctactgcggggaacatcagcacccacggagacacctgcgccagggagacacctctgccgggcagacacctctgccaggagggaccctttaccggggggacgcctgcgccgaggggaacacctgtgctgggaggcacctcacggaggggacactccgctggaggacacctgcaccttggaggacacctgcaccttgaaagcttcctaaaggccaggaaggacgcttgtgcccagaaggacacctgctccgacgagggacacctggtccgaggggggacacctgtgccaggaaggacaactgcgcctggggggggacaccgtcaagaggacacctgcaccaggaagtacacttgtgcctgggagggacacctgtgcttgaggggacacttgcaccttggagaactcctgcgccgaggggacacctgcgccaggaaggacacttgtgcctggagggacatctgccccaaggagggacacctgctccgaggggggacacctgtgccaggaaggacaccagcgcctggggcgtgggggaagacactgttaaggggacacctgcaccaggaaggaccttgtgcctgtggggacacatgtgccaaggggacacctacgcctgggggggacacatgtgccggggaggacacctgcgccgaggacactcgcacgagcgggatactccacggggtccggaacggcctccccgccctccaggtcccggtccggcctccccctacgcgcccccgcggaagccagagacagggagagcaaggatgaaagacggcgaccacctcccaaggacccgccggccgtcaggacctgccaccgactcaccctctacggctacgccgccgccgccgccgccgccgccgccgccgccgccgccgccgccgcccccgccgccccctccgccttcgctgcctccgcctccggggtcccggccggaagtggacagcgcgcgggcacttccgcttccggcaacggcgccggaagcacgggtccgggccctcccgcggggcgggtactcgtctcccggccgagcgacttcagctcggggacctgccccatggccgctccccagcaggacagggaaaccgccgaggtggggggcttcttgtccgtcccagcccccccaactcaggccctctcgctgcccctggcgaccaccgcgtgcgcccttccccagggcgggcgcagtcctggacgcctccgccgagcgtgactgcgtgcattttctctcctttcccttcccaacctgcggagagaagacagccccagagccgctgtctccatcctctgctgatgcctgctgtctttatgttggcctcgtcgtccgcactgcagtgtggcaggggcgtccctcgtttcccgcggactgaggtgggcgccgggcattcagtaaacgaagaaaccaaagcggagaaggttgggaatcaaacgtctgtcatacctgccaccagcagacaagcggctttgggtacctcctggacccaaagacgaactcagcccctccaggagcgcagtcattggcaccctcgtgggaacaatgccagtgggatgggtggccaccggatgtttccggggcccctcagaggcccagcagcgcaggtcttggagaatgaatgtgggtcactgggccgcgctgcagagggccggtcctgagtcgcttcctggaggagaggcccatggccagcacttggcttcgcctggaggaagaagcacgtgctaaaccacgagcgttcagggtttgtctgtttgataaaagatgctggctttgacacaccaactgacaaagtctttcataggttggagctgctaggttgtgcccctgcccctcctgaaaattagccacacgaaaggaagggtctggaaggtggcagggaagccagcagagaccagggaagtggcagcagcatggggcaggggcacacaggaaggagatggagcttgcgggagcccccactgccactccgacagggagccctgccccgtgccctgctgatgttgacactgaccccggctctattatttcagtttttccttgtaatttctgaaaatctagcaacaagttgagcaatgaaaaaaagtaaaaaagttaaaattgtgttagaaattatgactgtaaagaaattttgaaactaatgaagaaaaaattgccaaaattgccaaagcttttaggactcttaaaaatatagtaacattgagtattatgaactaaagactcatactattatatcagtgtctggtagtgaatttggatggaggactgtctagtaacttcttaacaaaacattgattagaagtctttcttggcggggcgccgtggctcacgcctgtaatcccagcactttgggaggcgaggcaggtagatcatgaggtcaggagatcgagaccatcctggctaacatggtgaaaccccgtctctactaaaaaaaatacaaaaaaactaggcaggtgtggtggtgggcccctggagtcccagctactcgggaggctgaggcaggagaatggcgtgaacccgggaggcggagcttgcagtgagccaagatcgcgccactgtactccagcctgggcaacagagcgaggctccgtctcaaaaaaaaaaaaaaaaaaaaaaaaaaaaaaaaggtatttattggctgggcgcagtggctcctaactgtaatcccagcactttgggaggctgagatgggcagaccccttgagcccaggagtttgagaccagcctgggcaacatggtctttttggtaggaaccccatctctaccaaaaaaaaccccacaaaaattagccaggcatggtggtgcatgcctgtaatctcagctccctgggaggctgaggcaggagaatggcttcaacccgggaggaggaggttgcagtgaactgagatggcaccactacactcca

SEQ ID NO: 317909 - DNA, 4001 bp, Homo sapiens
gagttcgagaccagcctggccaacatggtgaaaccctgtctctactaaaaaatacaaaaattagctgagcatgaagttgtgtgcctgtaatcccagcaactcgggaggctgaggcagagaatcgcttgaacccaggaggcggaggttgcaatgagccaagatcgcgccattgcactctagcctaggggacagagcgagactccatctcaaaaaaaaaaaaagatgcagatgggatggacggacagagaggagggggaccttaggcaggggattaggcaaggatagggcaccaagtttgggtaaggcaagagagaggagaaacttttgggtgtggggtgaagagaggaggctgagggagtccagggttggaatgtgctgggcctcaacgccatgcttagagactcaaccccaccaagtcaggcccaccagggtaaggtccatctggttcacaggccctgctatgtgccacactctaggtaaattttttttttttttttgagacggagtcttgctgtgttgcccaagctggagtgcaatggtgtgatcttcgttcactgcaaccttcacctcccaggttcaagcaattcttctgcctcagcctcccgagtagctgggactactggcgcatgccaccatgcctggctaatttttgtacttttagtagagacagcatttcaccatgttggccaggctggtctcgaactcctgacctcatgatccaccgaccttggcctcccaaagtgctgggattacaggcatgagccaccatgcctggcatgtaggtaatttagtgtctggaagaatgaaagcaatggggagctatggcagagcttgaggaagggggaaatggcaggtacccttcatctaaaaggtagtttcataataaaagctaatatttgtaaagcatttccatgcaccaggtgatgggctgaatacctcacatgggtttcccttctcaacaaccctaagaggtttactgttatcaacctggtttcacagaaggggaaattgaagcttggagaactcaaatccctcgcccagagtcacccagctcataagtgataaagctgggcttcagaggcattcagatgccagagacaagctcttgatccttccttgcccattgaaggccctggcctctgtgtggcatgaatgatgcccatgagacgtactggggaaaggaaaagaaggggagaagctggggaaactgaggaaggctggcaggagcccaggtgtgatggcgccagcagcacatatctcaagcacctgctccgagccaggctcgtgggcacttagacacagcccataccctgccctcaaggatcacacagctcacgatcactctagtgcccatgggcataagacctagcaccaggtaggcactagactagactgccctgagactgcacacactgcaccatacacatccccacccaagggttcccgggaggaggagccaggccacttaccgactgtgtgctcttcagctttgtacttatgctccttgggggcttcccaaggtggaatctacaagggagagaagaaggcagggaactgactataagtcatagcctgccaccgatctgttgctagtctgcagcttcctctcacagcccagaaatgcagagatttcttcccaagacccaaaccctttctacctccccccgttgtcttcttaaggcccatctcccccagaaatgcaggctgtgcccttgtatccacccagtctggttgtctgtctcctctgcctgggccttccgggctggcctcacctttccacataggcctcctagtcacctggacccacaggtcatgagcagaggccatggctcatggctgtgatagcgaccccccagaacaatcctgggacaatcctggttcccacagcactcaccgaaagtgttgactccaagctcaccagcaggaaccccaggagcagcagagccctcatggcatccgtccgttggtccagctgcctatccaggagtccagatcaataggactggccaaaggtcttggaaatagagattggtcaagctgccctcctgagcctggtggggcacaggctgtttgtggaaagccaagtggagcaacttccttggtcaccccttgagggccggaaagttgggagtttgtgggtgggggtgaaatgaagagctgggctcctcctctcttttctagatagtgggactggaagcagaagaagggacattcttatgctctgggtcctgtggagatcaggaggttaaggagatcaaagatcatggggatcttggagtccactgtgaagtgtgttcattttctattgtcatgtaacaaactaccataaactcagcatcttacaacaatacccacttttaattttcttttttttttttttttttttgagacggagtctcgctctgtcgcccaggctggagtgcagtggcgcaatctccgctcactgcaagctccgcctcccgggttcacgccattctcctgcctcagcctcccgagtagctgggactacaggagcccaccaccacgcccagctaattttttgtctttttagtagagacggggtttcaccatgttagccaggatggtctcgatctcctgacctcgtgatccacccgcctcggcctcccaaagtgctgggattacaggcctgagccactgcaccgggccatgtgtcgccttttaagaactcacctgactaggtcaggcccaccaaagccattctcctttttttttttttttttgagacagagtctggctctgtcacccaggctggagtgcagtggcacgatcttggctcactgcaagctacgcctcccgggttcacgccattctcctgcctcagcctcctgggtagctgggaatacaggcacccgccaccacgcccagctaattttttgtatttttagtagagatggggtttcactgtgttagccaggatggtctcgatctcctgacctcgtgatctgcccgccttggcctcccaaagtgctgggattacaggtatgagccaccatgcctggccctgccattctccttattttaaggtcaaacaatttgggacttaaattacatgtgcaaaattctttcacagaagcatctacattcatgtttgacagaataactgggaggtgtgcaaacaccaggggtagagatcttggggccatcttagcattctaccaaccacaggaagtgaggcaagaaagcaaatgatttaatgagaaaagtgctaaaccaaggggcactaagatgtgcagctggaacatgagaagaagacggggtgcacatgtgctgcccagcatctgtcctggttcggtaatgacactttgatttttcctttagcaacgactcctctcttacttcttccatgggctctagtgctgccaactctaccctcagagctagggctagagatgtggcctaggtctggtcaatcagagcatgacatctctaatccacagtgattggttcagagataagcatatacacaatttaggccaattaaagtgctagcttgggacttttgccagaacttttgggaaagcaaaaaagttgcactggggttactaagcacagagcatgtgggtctgaacacattgatgatcacctttgtcactctctagggagggcctgtttgagaatgaagcctacacataggaaaagcaaagcaaacagggcaggaaggatggaaagatgctgtggtagacagcctcaaagacagcccccattgatcctcaccacctaggattcatgcccttgtatggtgtcttcccacattgagttagggctgttctgtgtgtccatcagaatatgacagaagtggctgggtgtggtggctcacacctgtaatcccagcactttgggatgccaaggcaggcagatcactctaggtcaggagttcaagaccggcctggccaacgtgttggccaaaccccatctctatgaaaaatacaaaaattagccgggcgtagtggcgtgtgcctgtaatcccagctacccgtgag

SEQ ID NO: 317910 - DNA, 4001 bp, Homo sapiens
ttcctctatcatactcctttcttctttccctcccaaagtggttccagaatccagtgttgataaactagccaagttcatccacctgcctttctgtctacaccagcactgtccatattaacatgcaccactcctgccatgaggatgtaagaagcttggcagaaaccagtacgctttgacttcactccctaatgaggctacacaccttgctgggaggccactgtgagaaagggtgcagcatttctataagctctgttctccaccccatgatccaaatctcaaacaaaacactggattctcaagagcgtgtcctcaaactacattgtgcaaattacataatggtatgtgaaatcatatctcatcgcaaacaatttttcaggagttctcggtgttctctcaaacactttcggcaacaatgctcacttatctgcaggcaggctagttactgctaaacactgggccccagtctggagctcttagttttcccaaaagcatctcaaaactcaccctgaacaaagacagagaggcgagaacatgctatgtctttgtcacctcttaatcttgatgtgtctacacttttttttgagtgtgggagcaatatagagtgcacattcttttagcgataacaagaaaacccgctagaacttctttcagcgtaaaaaaaatggctcaaagcttataaaatactattgttattaggaaattcaaaaacacttttctcactttctaattagcgcctttacaggctaaaaacaactcatctgtgctgctcttggggaaagggatacagaaaatatttgaccaaataaattaatcaaatttatttatttggtcaagtggccagatacttaaaaatagactactagtggggaaaatattctaggggagcaaccttcttgcagtggatcagaaatctcgttaagaaatactgggatcccacagtgttcgagggagcccggtcctggggagggatctctctcttcaactcacttagaaggaatgggttctaggtaacaacaaaatcctctccatgtcccctcccccgccaccacgcggagcctctgctattgtcaccatatatctcgcaccctgcgcacctcctggacacaaggccgggccgggggctgctggtactgattctctgctaaacatgccaagggactgcctgggcttttctctacatcacttttctcgcctgtaaaatgtgcaagaaaaaaacttccaacaaagcaaaacttcagcggcagcggttcgccactttatattttaaagatcgaaacgtttattggtggagcaacgtgagagcttttctttttgggggtggtcctgggagaaacacaatgacaagtgcaacgcaggactgcaggctcccccagggggcttccgctccatcctcctccatatccaacaccccgtggcaggcgggctgcaccctccaagatcgagtccaaaggggcatcggctgggcccgcgaagggggtggcacgccccacctaaacgtgactggaaaaaactccagatctcagcccaaatgccagtttggctttcggaggaaactgaggcaggggtgaggagaaggcgcaacagtgacccccgcagtctcccctcggcgtccctccgcccgcgcaccccattcccgtgcatctctcacctggcctgcgggcccgggtgcgggcagacaacagcgggccgcacagactgaagcaggcggccaccagcagcagccgccgcggccccattgtcccgggctctgcgcggcgctgctccgggaggctgccccgcctcgggctgctccgcttcaccctctctcctgacttctgcgggtcggggagccggtcttcgcggcaggcagagcgcagggtgcccacgggtaagatcagggtccaagcgaccctcggcgagcgctgtgtctggggcggttagcggggcggggcgggactggggcgcgcggtcgcgcgggcgcgagcgaggaagggcgccctccggcgtgcagtgagagtctctgcgctggagccgctcggcgccccctccccgcggtccctcagccgccgctcgcaagcccctctggctctgtgcgccccgccccgccccgccctgccctactggggggccctggccgccggccactgccgggcctagaagtccaaatgagaagttttttcctctgggcaccgttgattcgcgaagctgtcagtgactcacactggcggggtccttggaatggggccgcacggctcgcaggctgcttcccgcggccgtctcgaccctcctgggatgtggagacgtcgacagtggacgccccggccaggatgcgtccacgccctgcagccccgcagccctggcgtggcctcccgtcctccctccctccgtgtgggacaccggcaaagttcagttttcgctaaaagtctaaaagggacttctgcttttgtaacgtggggatcacggatttaaaagtttatgatgtagtgacagggttgcccctaaatgagaaagggcccttgagtctggacagaattcttgaacttttatacgtctctctttatttcgcgaagttaggcgtttcatacgccgggcactcgtttcccccacacgcagactgcgagtggaataggaagagcggcttctcccgcttcccccccgcgcggcctcgcggagctcttccctttcccgcgccgcccgccggggtcacctgcgcatctgggaggagggcgcgcgtctgccggtgaggccggcgttctagggccgcgggcgcccaggagagaaatggcctggtaactttccaagtgtccttcacacgttcttgaacgatattacagtttgttttgtttttgaggcagggtcttgccctgtcgcccaggctggagtgcagtggcgccaacacggctcactgcagcctcgatctccctggctcaggccaccctttcgccccagcctccggattacctgggaccacagaaaggcgcgcgccaccatgtccggctaatttcactgctggcctcaagcgatcctcctgcctcagcctcctaaagtgcggggattacaggcgtgaatcaccgcgccaggcctgatattaaaggagtttggctaaattcaaggcacagggcggggacactcgcttggcagtctgctaagggcccccaggggcgtcgcggctgggggtgggcaggaggagcctgcagcttaagttgctttgccactggctctggtgcgtgcgcctttcagactccaacaggaaatgggtccccaaatagctgtttctaggaaagctcagccgcagccccttctcctcttaacccagcgcactgatgtgcgggcatattcggagttctgtggttgataagctgcagctgagagccggtggtcagttttctaagccttttttaaaagtgaatttcgcacgaagagtatcattcccccactagagcccggacacttacatccgtggagaaagtacgatcagaggcgatttcgttcttccctgtattctcccatcatcctcaaaggacagtaccttgttgtacacagaagttgatcactaaattgcggaagtacccagttaaataaagctttttaaaatctatccccgttcagttatcctctggaaacatacccaagagtaaatgtgaacagttaaaattacatagttcttcattcactattaaactatttttcattattcctaagacgtcattgattttacaatttatcattttaacccattaccacaagccagaaaaaaatgtgacataccaatgattgtaagaaacactccaatttcagggttatgaagaaaaggcattttagaatcaatgaaacacagtggaaaatataaacacatatgacaaaatttctgatagttgaaggatatgaaatgaaaaataaattaccttctgcctcccctcccctagttgccatctgaccactaagtttcccctccttccttccttccttccttccttccttccttccttccttcctccctccctctcttccttccttccttc

SEQ ID NO: 317911 - DNA, 4001 bp, Homo sapiens
agggcagaaaagctttgctaacactgtatttcttattaaaatcaatttagttttaaggtgggaggaaagctccatctgcctaaatcaattgtcagtgttacttcactaaccctttgggaaagttactttgcaagggaataaaagtatggtggggggaggatgaggaacaaggtgcaatattaagtggctatagttaacaagtaacctgatttttccttattgttaaatcaagttcgccttataatccagggatctcccaatcccccaagagtagtaaacaagaacaagacaaataatcggggcatgcttcctacagggatctctgaatcataaagatgttgaatcagctataccaacatgtatttttttaaagtttgcacatactaacctttgctcctgaattttaagtttccaactttaaaggacatagaggagaggtgtccattacagttttcaatacttcctggaactaaatgcctttattctgatgctgattaagaaaaaaaaatataccagcggtgcacagttttcaagcttacaccattaacacccttttccctaactgcagagggaaaagaatcacattcttccatctaattccaacccactgtgacttgctcttttacttcgtctttatgaagaggaggataaaagtgagaaatgcgcatttctgagggaaattaaaagctccctttgctacccaggctgccccaaacagaggggcctcggttaggatcacagtggcgcgatcgcaggtcaaacatcccccacggccacagcgaggcctgctgggcccggaagaacacactcccagcaatacaagttcgagcacacccggagcagcacatccaaggaacgcgacggccgggcgcaagtgctgctctgttcccaggccagccagcctctggcctgcagacctgggtggcagccagtggccgctccgggtggcacactaggaaagtcccggaaccccaggcccagagggtcaactggtcaaatataaggcagggtccaaaaagttccgctcgtaaatcctcgtggcgcccaacgggcctgagcgctcattaccaccagaacccatcagggaccggccctgactttcataccccgggccttccactgtgggtgccaggagcagcgggacccgggtgggtctcgaacgcaggggccagaacccgaagaaaggcttccagcagttggagagggacgcaaaaaacaacctagaaggctcccgggccgcgggttcccacccactccgccctgccctgcgcaatcagctcgctaaccccaccggccccgcggggccagcggaggaagtctccggagttggcaaaaagctcttaatgacttagtgtttacaaagcaaccaagcccggggaggggactaggtcctctgcgtaccctttagacacagctactccttccttccctccctttccccgaacccacgctggggcctggaggtgcccagcatgacagcctctacgggaagtggggtctttggggaaatctctgcctctgcccggctccgctgacttcagctgctcccgcatgtcccacctgggtgcctccttggcgcagagacctcacatcaaagccaccaaggggaggctaagggattcgtagagatgggtgccggcagcagaacagccttcgcacacctgcccggatcccaccgtctgcccagcgtgcccaggaccccagctcctcagagataagagccctccttggccaggtttctcaccttggatggtgccactgcaggagagagaggctgctagcaggatggcggcccccagcagccacgccgcgctggggctccgcatcctcctggaagccccgacgccgggcgcgcggggaatccgccgccgccgattcgaaactcagagctccactggacgcaccgagagaaagtcagcctctcacctgccccgaatcggagcctctgctgcgcgcctccccagggcgggttaggtttcagggaaaccgaaggagcagcgtactcacctgcgggaggccacgccccgggaccggaacgcgcgccctggtcccgcccccggcccccttccctgcgcagctgcgccctccgcttcccggactcgcgccaggtcccttagactgcgggagccgcctgcgggcggggttgagcgcatgaggtgtctgctttggaatgcaaatagcaggagcgctgggaccacgggttaatccctgcctaggctataccgcgaactacctttaatctttacttactcctagagaagcgggtcgtcggtctcccttgcctttcctgactgtgggaaagccacgattcgtactcactgcaattgtggttggtaactgatacagacagggcttcccggtgcggtggaccctgcaggaggagggatgcgttttttattgtagaggcaggtgggcaactgcggacatcacgaaagcggtggggagcacaagaggcggggcgggaaagaagacatggaatggctactttcagcgccaagtgccaaagctttagagaattatcttgcttaatccccataacaaccagcgcaataagtatgattattcttcccattttacagacgaggaaagtgagcttagaaagaccagataaattggccagagttacacgacttataaacacagtgtataaatgtttatcacatttcaactccagtataagactatcactgtcttctattcatcgctgcactataaatgcgtccaccagggctcctctgcattgggatcccataggctaaataaatacaaaagcagatagaaggggtgggagaagagaagtgtggggttggggatgagtgcatgagggttggcatcatattggtaatgtcttactttttgtttttgagacggagtctcgctctgtctcccaggctggagtgcagtggcgtgatctcggctcactgcaaactttgtctcctgggttcaagcaattctctggccgcagcctcccgagtagctggagttacaggcgtgcaccacatctggctaatttttgtatttttagtagaggcggggtttcaccatgttggtctggctagtctcgaactcctgacctcgtgatcagcccacctccgcctcccaaagtgctgcgattacaggcgtgagccaccgcacccagcatgtcttactttttatttgctttttaaaagattgaataaaacaaagtctactgttacccatttaaactattggtaccagaagagcacagaagagagacataggtattttcaaatatttaaaggattcgcttgtagaagaggatttagatgtgttttgagttgctccagagagcaaaaattggtggaagccacagtggggtttaatttcagctcaatgtataaagaaattttctttattttttattttaatttctattagaaaatagaagtggggtctccctatcttgtccagtctggtctggaactcctggcttcatgtgatcctccccactcagcctcccaaagtgctgggattacaggaatgagccaccacacccggacaggcttctccccttgttgacatctgtgtgatcccaagtttacttatcctctctaagctttcttataatatatatatatatacacacacacgtggtttaaaggtttataggtgtctgtctgaggataaaatagtgactagtgactgggtttgatacatggtagaagctcaataaatattttttgtttatttcctttctctgaggagtcttcatactccacctgcaccccagctctcacctcagcccatgcccacttttcctcccaggaaaagctgacttctagaagcagaacaggaacctttgacatcctgaacagcggacagctctcctgatagggatcaggccattcctgaaggtccctccccaggggagataactgattcctaagatgtcccttcaaacttttcaagcatccatttcctcatctgtagcttattaatattacatctatcatctgggaatgatactagtacctctctcg

SEQ ID NO: 317912 - DNA, 4001 bp, Homo sapiens
tgttgtgtgacacacaaacccttctgctcacttttgcattttggaaaagttcttgcatctgacatcacccaaagagaagtgcctttaaagataggcacaaagttagagaatggtgcctgaagagcatgccgtacaagttattagcctgattttaaaaagctgttaaaaccaagtgtttgtccgttttcagaaagtttctgggatttagcaagacatcatgcctccagacatgccaaacagtgcctgtgttttgtggaaaagttgatttgattccattttccgtgagaatgccagatctgggtccacttaaataaggcttttattcctcagagcctggttttccttatgaattgtactcattgttaaatttttttattgtattttaattctttatagaggcttccattgggcataatatttcggaaatgtttttctatccgggaaaaggccttgaagaactaatccaaagagaatgaactccggcctctcaggggtgtccaagggagagaatacagtcatggattcatagtttctgtttctagttgagccagtaaagccccttcctcatccctcttttccatttacctctagagacagaaactaaaaaccatggcttcaggctgctaaaagcctaaaacaaaacaaaaccacaacgaaataaggcaggttggacaagcttgcttcattcttccttcacatttctcccccaccccatggaagaaagcaaattcactgcctctttgtttccttcagaggcccccgttttcacctccatcaaaccctattagcgtcttgaaggaaccacccccgaaaaccttgcttcttttgcaattctgcttctcaacatattggcccatctactcccagaaagagcgtgcacttattatattcataaatcccacatgtgcttactgctaatcaccacagattctcttagagctctctgcaaccgctcagggattccaaatgtgaatttaagcaatgttcctttagaaagcattgatttctgtttttgtttcccttgctatgtccagtctttgcctctcccactcctaacaatgttgactggagtgtgtgacctaacaaagagtaacaggtacagacctatcccaaatttgttatttttggaaaaagcaggaggtttcaggctaacattgtgatgggtaaagtggaaagtacattcaaagttgaataatagtatttgggagaccttatttttaaaattaaaaaatcatatatgagggtagggagaactccccacttaaagtcaaaaaaggtcattcatttcggaaatactgacttattagcattgccagctattgaaagcagatgactttctctttctggcagtattcttgtttctcccatttatgtctcaccaagaggtttaaacacaggatatatattttaatccctagaaaaagtgccatctttgcttaaccagaagagaaattcttacaaacacaaaaacgactttcaaaattgctccctgacttaatcgtagacatctaaaatcttgaatatgccacacatttttaaacatcaggagggaacacttagtctatgaccaggtttgaatagagtgaatgaactatagatgttcatttccatgattctaccttttaataataaagatcaaactgcctttggggtttacagtttgtgtgagatgcaaagaaacctaggttcagttgactcttaatttgtaacagaaacccacatccccatcctaccccctgagaaaattgcttaccactctgacaaaaagtgggcaacagaagcaggaggccagcagctgcaaagatgagggctttcattttgatgacctgagtcccgtctcttaaacgttatgaaatctgtaaaatcatggagcacaatttcacctcagttccatgtgtcagcagcaaatggaagccttggtctgtctgtagaagtttgctctcctgtgccgtgcaggcaggaaacttgccctggtcctccgcagggaaaggatgtaatccactcgatgcttcagtaagcatgactcaggccaagcctctgaacgtgttacgttatccctggagaaaggcatttaactcttacccacccccaacaatctattctgaataggtgctgtaattctcccctagtagatttgcttttaaagaatggcagaaattacacaggcctttacagaactaagccaaaaacagatgttgaacagcagtaagttttgaatctgtcccacatttcatttcttatccgttttaaaaatgcagttccagagtgtaatttctacttaataaattatcctttcctttatcttcccagctatttcaaatcttaatccttaaacactttacataattataaattaatcatggaaaacaaacttttaagaaattcaaattgagcggtgaatcactttgaaaattttccatcaatgtaatattgatttcagtttgtcgtcagtgcctggccagaacctggcttttgagtggtggtggtttttcttcgccgggtgaggatggcgtttgttcaggcttttttttttttttttgccttatcttgatgtgttttgagccattcaataacccttagggtcagataactggaggaacctcccaaacaacgctgttcagttaaactaaaatcatagcacatcatgaaaatgaggactccctttattccatgagtgttggtgaataagtctacaataagatatttttaatagtggtaaaatatacgtaacataaaatttactatcttaaccagtattaagtgtacagttcagtaatgttaaatacattcacattgttgtacaacatataagcttttatgaattgttatattctgtagagtatgacttaatatacagtaaaaaaatgcattataacacatttttctgtagttaataaaacttaaacttgaagcctgaccatcccacagcctgctctttacaaaatgcagcaagaatcagaaaatacaaatttcacatgagacttaaaggctagggatatgctaggaagaaattgatctgcggaaacctttcacatcttgattaaattacattagaccaagatttttacaaaggtcagtgtttaatacttcaactacataatatatggttatacaaactgagatagaatgttattatattgcagaaatataaaacctaaaatattgacaaaggttttttttgtttcattagaacttttctgggagttatctaaattcaggaatttatgacttgatttgcacatggcctagtttctggtcatttaattcatttgtaactcttatgttgaacctggctgtttaactgaagtggaggtgtggccgtcccataaatatactattattttcagtcttctggtgaacaactgaaaaagcagacttggctgggcacagtggctcatgcctgtaatcccagcactttgtaaggctgaggtggggggatcacttgaggtcaggagtttgagaccagcctgaccaacatggtgaaaccccatctctactaaaaatgcaaaaattagctgagcgtggtggcgggcgcctgttatcccagctacttgggaggctgaggcaggagaatagcttgaccctgagaggcggaggttgcagtgagcaagcctgggtgacagagcaacactccatctcaaaaataaaataaataagaaaaagcagactttacattgataagattcagcttttacttttggttttacatttaactctagtaatcgttagttcaatgtttcataatttaaaccgttgacttaaattcatctgatttgtaatttctctcttcagtttggcctataagactaatactttaagctttgaagtaagattgttactgccttctcatctgggtagaaatctgtgtggtgtatcttctacagtgataagttatgaaggaaggcaaatacccttcaaaagaactgagacacataaatgaactcatagagcttagtttttaggttatagctggggagtgttgggttctcttagatcttgta

SEQ ID NO: 317913 - DNA, 4001 bp, Homo sapiens
ttctgctcacttttgcattttggaaaagttcttgcatctgacatcacccaaagagaagtgcctttaaagataggcacaaagttagagaatggtgcctgaagagcatgccgtacaagttattagcctgattttaaaaagctgttaaaaccaagtgtttgtccgttttcagaaagtttctgggatttagcaagacatcatgcctccagacatgccaaacagtgcctgtgttttgtggaaaagttgatttgattccattttccgtgagaatgccagatctgggtccacttaaataaggcttttattcctcagagcctggttttccttatgaattgtactcattgttaaatttttttattgtattttaattctttatagaggcttccattgggcataatatttcggaaatgtttttctatccgggaaaaggccttgaagaactaatccaaagagaatgaactccggcctctcaggggtgtccaagggagagaatacagtcatggattcatagtttctgtttctagttgagccagtaaagccccttcctcatccctcttttccatttacctctagagacagaaactaaaaaccatggcttcaggctgctaaaagcctaaaacaaaacaaaaccacaacgaaataaggcaggttggacaagcttgcttcattcttccttcacatttctcccccaccccatggaagaaagcaaattcactgcctctttgtttccttcagaggcccccgttttcacctccatcaaaccctattagcgtcttgaaggaaccacccccgaaaaccttgcttcttttgcaattctgcttctcaacatattggcccatctactcccagaaagagcgtgcacttattatattcataaatcccacatgtgcttactgctaatcaccacagattctcttagagctctctgcaaccgctcagggattccaaatgtgaatttaagcaatgttcctttagaaagcattgatttctgtttttgtttcccttgctatgtccagtctttgcctctcccactcctaacaatgttgactggagtgtgtgacctaacaaagagtaacaggtacagacctatcccaaatttgttatttttggaaaaagcaggaggtttcaggctaacattgtgatgggtaaagtggaaagtacattcaaagttgaataatagtatttgggagaccttatttttaaaattaaaaaatcatatatgagggtagggagaactccccacttaaagtcaaaaaaggtcattcatttcggaaatactgacttattagcattgccagctattgaaagcagatgactttctctttctggcagtattcttgtttctcccatttatgtctcaccaagaggtttaaacacaggatatatattttaatccctagaaaaagtgccatctttgcttaaccagaagagaaattcttacaaacacaaaaacgactttcaaaattgctccctgacttaatcgtagacatctaaaatcttgaatatgccacacatttttaaacatcaggagggaacacttagtctatgaccaggtttgaatagagtgaatgaactatagatgttcatttccatgattctaccttttaataataaagatcaaactgcctttggggtttacagtttgtgtgagatgcaaagaaacctaggttcagttgactcttaatttgtaacagaaacccacatccccatcctaccccctgagaaaattgcttaccactctgacaaaaagtgggcaacagaagcaggaggccagcagctgcaaagatgagggctttcattttgatgacctgagtcccgtctcttaaacgttatgaaatctgtaaaatcatggagcacaatttcacctcagttccatgtgtcagcagcaaatggaagccttggtctgtctgtagaagtttgctctcctgtgccgtgcaggcaggaaacttgccctggtcctccgcagggaaaggatgtaatccactcgatgcttcagtaagcatgactcaggccaagcctctgaacgtgttacgttatccctggagaaaggcatttaactcttacccacccccaacaatctattctgaataggtgctgtaattctcccctagtagatttgcttttaaagaatggcagaaattacacaggcctttacagaactaagccaaaaacagatgttgaacagcagtaagttttgaatctgtcccacatttcatttcttatccgttttaaaaatgcagttccagagtgtaatttctacttaataaattatcctttcctttatcttcccagctatttcaaatcttaatccttaaacactttacataattataaattaatcatggaaaacaaacttttaagaaattcaaattgagcggtgaatcactttgaaaattttccatcaatgtaatattgatttcagtttgtcgtcagtgcctggccagaacctggcttttgagtggtggtggtttttcttcgccgggtgaggatggcgtttgttcaggcttttttttttttttttgccttatcttgatgtgttttgagccattcaataacccttagggtcagataactggaggaacctcccaaacaacgctgttcagttaaactaaaatcatagcacatcatgaaaatgaggactccctttattccatgagtgttggtgaataagtctacaataagatatttttaatagtggtaaaatatacgtaacataaaatttactatcttaaccagtattaagtgtacagttcagtaatgttaaatacattcacattgttgtacaacatataagcttttatgaattgttatattctgtagagtatgacttaatatacagtaaaaaaatgcattataacacatttttctgtagttaataaaacttaaacttgaagcctgaccatcccacagcctgctctttacaaaatgcagcaagaatcagaaaatacaaatttcacatgagacttaaaggctagggatatgctaggaagaaattgatctgcggaaacctttcacatcttgattaaattacattagaccaagatttttacaaaggtcagtgtttaatacttcaactacataatatatggttatacaaactgagatagaatgttattatattgcagaaatataaaacctaaaatattgacaaaggttttttttgtttcattagaacttttctgggagttatctaaattcaggaatttatgacttgatttgcacatggcctagtttctggtcatttaattcatttgtaactcttatgttgaacctggctgtttaactgaagtggaggtgtggccgtcccataaatatactattattttcagtcttctggtgaacaactgaaaaagcagacttggctgggcacagtggctcatgcctgtaatcccagcactttgtaaggctgaggtggggggatcacttgaggtcaggagtttgagaccagcctgaccaacatggtgaaaccccatctctactaaaaatgcaaaaattagctgagcgtggtggcgggcgcctgttatcccagctacttgggaggctgaggcaggagaatagcttgaccctgagaggcggaggttgcagtgagcaagcctgggtgacagagcaacactccatctcaaaaataaaataaataagaaaaagcagactttacattgataagattcagcttttacttttggttttacatttaactctagtaatcgttagttcaatgtttcataatttaaaccgttgacttaaattcatctgatttgtaatttctctcttcagtttggcctataagactaatactttaagctttgaagtaagattgttactgccttctcatctgggtagaaatctgtgtggtgtatcttctacagtgataagttatgaaggaaggcaaatacccttcaaaagaactgagacacataaatgaactcatagagcttagtttttaggttatagctggggagtgttgggttctcttagatcttgtaaacagagaaaaattagctcct

SEQ ID NO: 317914 - DNA, 4001 bp, Homo sapiens
gatatatgtataaatgcacgcaaatatgtatacattcatatgtgtatatatatgaccctcttgtagggttaaatcccctgaagtagaacaactgggtcagaggattgccagacactgacgaagcctccatgaagattgtgccagttcatacttccctggcaatgctaaggccaccttcccctctccccacccaagggctaggtttgaaggattaggtgtggccaggccaggaggaagtgtggagccatcccaagagatgcccatggcaggagaacacagatgagacagctggggacagtaacacagacctctcctcaaactaaagacttgccgggtgcggtggctcacgcctgtaaccccagcactttgggaggccaaggcgggtggatcacctgaggtcaggagttcaagaccagcctggccaacatggtgaaaccccgtctctactaaaaatacaaaaaattagccaggcatgatggtgggcgcctgtaatcccaactactcaggaggctgaggaaggagaatctcttgaacccaggaggcagatgttgcagtgagccaagatcgtgccattgcactccagcctgggcaacaagagggagactccgcctcaaaaaaaaaaaaatagaaaaaaaaggactcaacgggcgtttgcatcctctgctgttccctgcagcctctgcccacaacggcagaaagaactagggcctgagagttcagaggtcagatggggattctgggcctaggtctgccacctctgctcaataggtggccatgggtaggccactttcttaagaataatgactaactgcaggcacagtgctaagcatgttgcatgtgtgttctcccataatcctaagaggctgccacttccgcagcttgagctcagagaggttaggaaggctgtctaaggtcgtccagctattaagcagcagagatggaatttgaacccagacttcacactagtttcactgctggagcctcagtttaccccttagtgagataaggcagccagactctgcctaagccttttccatcacaggacgtcctgtgtggtgcgcctgcacggtgagtggcacagtcagagggcccctggctggggtaggtgggagggatgtggagccacctccgtggggaagaccatgtcctgccccacttcttgtaggacggcctgtctctcctcagcagtcctttcaggaggcttcattgctctgggctggtgcgggggttcaggttaggctgtgaactccctagtgagcggagatcccactgggacgcgtctgtgtccctccccgcgccggacactggggctcaccacaagataggctaccatgcgggtttgctaatggagacgaaggagggggcaggggatgaagatagcagggggagatgccaggtagggagagagggagacaggaatggcaagacagagaggaagtgcgaggcctcagtaggagacagccgagccccgcccgccggccccaggccgacggggagccgggatgccgcgacctggcgcgccctctggtggccggcttggcacggcacggcccggggtggcgcaggagggggtgagcccagggggccagggggctgccccggtccccaccgccatcgtctctaggggtggccgaacctgccactactccaagtgtccgtcctctgagggaagccatcttagtaacaacaacaatgagactgtcacaaagacagtcacagagagacagctgaaaggaggaaaagggctttggagccatgacaagtctgttattagcatcacagagaaaggcgagcaagtcccccacccaaggtgttctccccactgtgacctgggtcatcctttcatttgcctcaaatgacttatttccagcttcacggagctacctgagtcagcgcctgcatctccaccaccatcatcatcgtcactgtcttcatcgcctctgggctggaccagcccctgcctgtgagctccctggagccagaggtgcaaagtctgcaatgacacaaaaagccagcacgctgggaggggctctggagaccatctcattgttcattcatttgtctattcaatccattttattgactgctcactgtgtgccagacacatgggccctggagatacagaagaaacacgtgaggtccctgccctccaggaattaagaagataaagtcaaaagtgctgtaaagaacaacaggatgatgggccagtatttgaagaggtcgttttcagatggggtgggcagggaaggcatgtctgagaaaggaatctttgtggacaccttaatgcttaggacatggggctgagaaaagcaggcagaggaatttcagataacgcctcagttggtaaaaagctagggggatggtgcaggcaaggaatagaaggaaggacagtgtggtgggagtttggtggtgagtgaaagaggggcctggggaccgtgcacacttgaaggctgtagccgggcatctggcttggattttgaggactgaggggaccattacagggctttaggcatggggatggcacgatccaatttacatttttcatgtcattccatctgcttcctggagaacacatgataggaagaaggaacgtggaagcagggagaccagtgaggtggtaactccagaaacaaagaggtggcggctgatggggcgagtgggaggagcctgaccctggtggattttggaggcacagaaggcaaacctgctgggggattgtctgtgggggacagggagagcaaagactgggtgccttcctcttcctgccttcctcttcccgctttgcaccccttctggcctgaatcatctccctcaggtaactaagaggagggggcaaaggactccagactatgtagccagatatagccccaggtccccagggctatatcttgggtctgtgcagaaactagggacgtgggggccagaggtatttttagccttctagctctctccttctgtcttctgcaatccctctccctacccccttcccccttcttctctccttctcccttccctctccagctccttcccccacctcctgctcctctttctctctctctcacacacacatacacacacacacacacatacacacacacacacacacacacacacacacacgaagcagccttatcaggaggaagcctccagcagagacaagcggtctccagggacagagcagaggagctgacaggagtttccggagcagggggaggctgacttccctgccttccccattccttccagctcccactgcctctcgcttcctgcagcatttctctccagacgcgcgcttctcaactggaggccactttgtcttcctgggacatttggcaatatctggaaacattgttggttgtcataactgaggagggggcagggttggcatggagtgggtagagaccagagatgcacaggacagcccccataacaaagaatgatcggcgccaacagtgctgagagccctccctaggctctgccggcagagctggaagggactgtcctcttccttgtggtcccactatcaccacactggccacactgtccctgcattatctctattggtcttctcagccacactgtgaggtacatagtattattcacccaaggtcatgcaggcagtaagaggcagagctgggattaagactgtgaagcctgtggtttaactggtctctctctactgaaggggttgtcacagcctgtgtcattgttattagcaatgggacacgctgtctcaagtgaagtcttattcagaagtccaatgtaagtccactgtgtaagacagagagcgtagaactgcctagggtgaagcagtgtgggaggttatgaaccccctgggcccacccctcttcccaccttatggagcctccaaaagccatctgtctagccgggcagggcccctgtggagggctgcacaggttgtgcactgcaaaactctaggagaggccactcccatgggcttcttcgtggggcctgttgaggtaaggcagagctcctttagg

SEQ ID NO: 317915 - DNA, 4001 bp, Homo sapiens
agggaggctgaggcaggagaatcacttgaacctgggaagtggaggttgcagtgaaccgatatcctgccattgcactccagcctgggcaacaagagtgaaactcttgtctcagaaaaaaaataaataataagtaaaatacgatttcttgacctgtgagaatccaaatgtcagctgcaataaacaaagcttcatggaaacacatcatgcccactcgtttatgtcttatccatggctgccttggctacaatgacggagttgaatagctgtgacagagagtgtggcctgcaaaacccgaagtatttactctctgaccctttataggaaaagggtgcataaagtgtgtactctagatgtaaaaaggaaagaaggagggaaaataaagaaaaacaaaaaaagaaaaagggtgcagagccctgctgtaaatcacagctgcagggcaacattttctctcaaggcggcagactggataagcaccacccagataatccaggggccaccccaaggggatgggggagggaagagtttcaagttcagagaaggaagggaattgcagggaaccgctccaaccgggaggggccttgcagaaatgagtccagccccctctttttagatgagaaaatctgaggcccagagacaggaggcaatctgcccaaggccacccagcacgtggctaacagcccggtcccggcgctgcctccttctccgcagggagaagccggccaaagtcgggggtcgcagcccaggggcgacacctccgggcctggggtctcctccgtttagcggggtccccggagggtcggtgcaggccgagcgccgcgcggcggcggcctctccccagcgggaaaggggaggcgcctgcggagtggcctccctgcagttcctgtttcccgctctttggctttggagcaagggccccccaatccctcccccgtcccccacctcccaccgcccagttccaagagtccgccctcagccagccggctacctgggctggggatttgctaatgtttttttcgtttcttttttacaaagcacagaagacacacccagcttcctagagctctgaagcagcatttgatcgcgtgtggctgaggaaactcgagcttgtagctgataaggaatcgggaggagaggccgggagggcattcctggggtgcttggctccagctaccccattccaccagggcttcccgcccctctggaatcctagcccggcccctgcctgcttttctcccgggtgaattgggagggctgccccagaggaattcaggagattccctctcttgtagcctggagaaataaaaaatattagcaggccggggtctcagtggctcacgtctgtaatctcaacactttgggaggccgaggcgggtggatcacctgaagtcgggagttctagaccagcctgaccaacatggagaaaccctgcctctactaaaaatacaaaattaacctggcatggtggtgcatgcctgtaatcccagctacttgggaggctgaggcagaagaatcgcttgaactcgggaggcggaggttgtggttagccgagatagcgccattgcactccagcctgggcagcaagagcgaaactgtctcaaaaaataaataaataaataaataaataatagcaaatatttttaagggtgcagctcagaacagttgctggagaggaactgttgatggaatgggtagacccttcagcactacaggctcaagcttcccacagctcccagcttccatcacctgcacccttgttcccccaagtcagggctctactcctgatctgactcgagttttccctttccccagtttccccacccttccatgagctcccccccaacccccaccccgtgctgttggttcctcaaggataacttctggagcctcccctcttccctggacagtcccttcacctttctgctctgtaacttgccagctgccttcctccaggaccctgtgtcctccttctagtcccttcaaagtaatctgttttgttgtcgctgttgttgttggaaacagggtcacccagcctggagtgcagtagtgtaatcatagctctctgcaggctctacccagcctcctgggctcaagcgatcctcccgcctctttctcctgagtagctgggactacaggccggtgccacctgtttttaattttctcacacaccctgtagatcagggcctgggaggtcagttcactctcttgcaatctttttttttttttcactatgtcacccaggttagagtgcagtggcccaatctcggctcactgcaacccccacccccctaatgccccactctccagcttaacttccacctcaacctcccaagtagctgggaccaccgatgggcaccaccaggcccagctaagtttttgtatttttggtacagacgggatctcaccatgttgcccagactggtctcaaactcctgagctcaagtgatccgccctcctcggcctcccagagtgttgagcttacaggtgtgagccaccacacctggctcttgcaatccctttctcctcccttcttccaaacacattaccacctgtgggttcattacatcaatctttcctgcccacaactcttcttgttcctctcttttgccagcttcttggaggtggccctcactggtgttgggaacaggtgcttggtgtcataaaaaacaaaggatctctcagcaaggctagtttactttctgcagaaagggtgccatcactatcagtaattctcgcaagagcacacacgaacaaaggagacagggtcatttataacctgatgcatccaccctactgctgtgtccagtttccgttggctggaagggtacctcacattctatacttgtcccgattggctagtcatttagaactttccgaaagaggcaaaggcagaggagaacaaaggaaggaggaagcaacctgtggaatgctgagaaaggtaaaaacacctccgaataaggaagaggaacaggctatgacctactgcttgcttggatcagtataagcacgccagggcaaatatctaggctaaaatgtgggtgctaagaacacaaagtacattgatttctttattatggctagcagatttctaagaatgttagcacaggtctttgaataaattttgcttctaagagaagttactgtttattcctaattagacgggaaggaaagtccctttgaagaggaagctctacttcactttctgcactggtcagagtggctcacagctgtcttcatctttattcctgtcaccaccacttcagcctccagctgaaggacccactgacatgtggcctctgtttcttagtccctgtaatcaatggtgccctccacgcacctcagccatcctcccaccatcacgtccctgcctcccatcctagcatcacacttcctctgaaattccaaggtcaggggttctctttgaccagcacttcctcctcctgccattcatttactcctccctccagcatatcttcaacttcatctgggccccaaatccaatgtcctttgttcccctcccttccagccctgtctgtccccagacagttcccttacccagattcatccactagtattggttttatattacttcctcttacttaaaaggctttcttgcaaagcttttgttctttcacagaaatgtcctggttttcctcctgcctcactggctgctgcttctcactctccttcacaggttcctcctctacttggcaagaaaatataatgtgctccccccaggtgaggtcctggaactgcttctcttccttgtcaacgctcttctcctgagtgattccttcccatgctgagacatttaagagcacatataggctgggcatggtggctcacgcctgtaatcccagcaatttgggaggccaaggtgggcagatcacctgaggtcttgagttcgagaccagcctgaccaacatggagaaaccctgtcgctactaaaaatataaaattatgcccgggcatggtggttcacgcctgtaatcccagcatttggg

SEQ ID NO: 317916 - DNA, 4001 bp, Homo sapiens
cagagcaggactccgtcccctcctccctgccagagaaagactgtgtcttctaatacttttattttacagataaggaagtgagcacccagaatgggaaagggacttcccagtatttcactgaaatttaatgaccgaatcaggtctagaaccaaagtgggctcacttcccatcccacaacacgaggctgttataggtgaagccaagtcattgctccttcagggccactgccaatacatgactcagagggactctcgactcctcaaggccccaaggcacaagggccctggtctcagggttgctctgagccagctggcaggcaagaagtggccaccaagagggagggcacgggtccccttgagctgtcctctgaaccttgagagttacactgcctgagactttttagatagtgagatactgagatttccacaagattgtcagatccactgtctcattggttcctcacaacagactggtgttacaagtcaagcagtgagagaaggaatgaaatcactggtctctctgcccacagtgtttggcacagtaagaggcctgtgtttgctgaatgactgtgtgaagaagtgacttgtcaaacctggtctccatgctaaccctttggtttcctctcccaggcaggatgtggtgacaccactcatcacagggtcctgggtgccaatggcctctgccactgacttgggcaagtcacgctgagtccccattggtaacactgagatagccttgcatatagctggtgttcaataaatgtttgatgggctgggctcggtggctcacgtctgtaatcccagcattttgggaggccgaggtgggtggatcacctgaggttaggagttcaagaccagcctgagcaacagggtgataccccgtctctactgaaaatacaaaaaattagccagatgtggtggcacatgcctgtagttccagctacttgagaggctgaggtaggagaattgctggaacccaggagacggaggttgcagtgagctgagatcatgccactacacttcagcctgggagacagagcaagactccgtctcaaaaataaatgaataaaaataaatacatgtttgactaaataaacatcaaatctctacttcaccaaccaagtctccactttaccaattactagctgtgtgactttggactagttaattccctgggcctcaagttttccatcagtaaagtggaaatactaatatattctatgtgtgttttaaagtcaaagagtgtctatgctgggtgcggcagctcacgcctgtaattccagcactttgggaggtcgagctgggtggatcacctgaggtcaggagttcaagaccagcctggccaacatggtaaaaccccatctttactaaaaaaatacaaaaaaaaaaaattagccgggcgtggtggtgcacacctgtaatcccagctactcgggaggctgaggcaggagaattacttgaacgtgggagccgaaggttgcagtgagccgagatggtgccactgcactccagcctgggagacagagtgagactctgtctcaaaaataaaataaaataaaataaaataaaataaaataaaataaaataaaataaaataaaataaaataaaaaagttaaagagtgtcttagttcttattatcctcagagcctgggagaaagcagttgctcaacaaatgtgtgaatgaatgaatgagtgagtgagtgaatgaatggatgaaatcctgtcccattctactttagggttcctggcccagagctggctgtgacaaaccaaccccgaggaagggatacccaggagctcactcaccaaggagcttcatgaactcatcataattcttctcactctccatctcgaacttgccggtgaaagccatgctgctgggaggctggaggccagagagcagagggatgaggagaatgggtggtgctgaggggtctgctatcccagcttataaactctcccagttgctgaggctcagcccctaagtcaccccacttcttctccctcctgtcctgaagaggaagcacttgctgttttatgatgtgggcaggacctggagggacagagccccgaggttattcaccctggggaagtgctgtcaccccattgccagcagggtcaggatggcaacgggtttgaggagtcatcacctctctgcccatctctccctccgttcccgcatgccctgccctcaacccatgctctcaccatctctcatcactcttgcaccctctaactctgcagccaaagcacttgagcacttgctgcatgcagggccagcactgaagaaacacagatgaacgagacacacacctttcccaaaagagcctttggtttagtccagagacaagcacacacctgcagagagttcttgtgtaagcaggatgtgatgtgccccaggagaaaagcagatggctgacctggagcatggggaaggagcaatggtgtccagcgcagggctagtgcatgtttggggaggaggtggcatttggcacccgtcttggaggaccaataggacttggatgtgtagagaagcaggaaggttggaggaggctgagaacaaagggagacgatattctaggacgagggaacagtgtgacgaagatggaaagggccatgatgaaaggaaacaatgagtttagctggagcaaagcaaacttgaaggagaacagatgctcctaagggtgcagataatgcaaccagagtaaagcagccacccatgggcctaggcagcgcacctggaggagaaggtgccaggtgccttgaagatgcctgtgcaccaggcactgggctggatgctggatgagttttattttgttcaagcttcagagctggaaggggttaggggttcagaatcttgacttccatttcctgctgtgtctctcagtaccacttcacatgcagggactctatctcctccgtgatcactccggcctacccatcttgtgagaatgtcctctgcattgggcaaaattgacagtgcaaagtataaaacactctgcaaaggctctcgtgattattatgtatttatttatttttgagatggagtttcactcttgtttcccaggctggagtgcaaaggtgtgatctcggctcactgcaacctccgcctcccgggttcaagcaattctcctgcctcagcctccagagtagctgggattacaggcatgcaccaccacacccagctaattttgtatttttagtagagacggggtttctccacgttgcttaggctggtctcaaactcccaacctcaagtgatccgcctgcctcagcctcccaaagtgctgggattacagacgtgagccaccacacccggccaattattattattaattcaggaaacctctgcacgtctatttccttttcccaggcttgctctccatgaatctccttcatttccatctaaagctgaattcaatacagttgctgactcccagacctgggactaagcggtctctgaactgatgaaaaaccaactctgccacattttaccaggctttaatctccaatcttggaatttctaactccagccaggactcttactttagtctaacaggcagacagacagacagacagacacacacacacacacacacacacacacacacgtcatggatttttttaagttatatatataaaaatttcaaataattcagagcaagtgagagtcctgtcagaggtggcctgtgatagtagtttggtacctctccttctaggctttttctttccttttcttttttcctgagacagggtctctctttgtcgcccaggctggagtgccgtgtgtgatctcagctcactgcagccttaacctcccaggctccagtgatcctcccaaatcagcctcccaaacagctgggactacaagtacatgccaccatgccttttttttttttttttttgaagtgaagtctccctccgttgccgaggccaaagtgcagtggtacaatcttggctcacggcaacctccgctcccaggtttaagcgattctcctgcc

SEQ ID NO: 317917 - DNA, 4001 bp, Homo sapiens
ctctgaaattggtggtctacctggaagtgtaagctggttgtctgtttaactcattctctaataataatttgctgggtcatcaattcaatttctctaccaaaaattccaatcaaatgtcaattacatctatgacagcatttttccatttatacacttccaacacactgctcaatttaagaggggaaaaaataaccacttcaaaatttattatagtgaagtctattcaaggaaattgcaaaaaagtgagaactcgccaaaaaaatatttattttctcagcatttgcattccacactcaactgtacactgaaatataagttgcacaagacagaagtcagaagcctgggaagggttctggaagatggacatagctttaaatctgacaccatcattttctagctgtgtaacctaagcattttatttcttagtcctgatacccttcatctgtaaatcagggactagaacagtatgaacctcatagggttgctgtattaaatgaggttatgtatgctaagtgtttacaaagtacttacatctgaaatagtaagtgggattctacctagcagcgctgcgcactaaggttcttcatatagttgaataaatgaatatttacacattttatataaggaaataagtgtatcaataactttaggtctatcctaagtcaaattaatagcagaaaatactatttgggggcattttgcagtctacaaggcccttctaacatccatatgtccatttgatctcccgaacatcctcaggaggtagatttttttttttttgagacggagtttcactcttgttgcccaggctggagtgcagtggcacgatctcggctcactgcaacctccgcctcccgggttcaagcgagtctcctgccttagcctcccgagtagctgggaccacaggcgtgcaccaccacgcccggctaatatttgtatttttagtagagacggggtttcaccatattggccagagtggtctcgaactcctgacctcgtgattcgctggccttggcctcccaaagtgctgggattacaggcgtgagccaccgctcctggcctgggggtagacatttttaagacagtcctttcagagataaggaaactggtaacaaagtgccaaggttacccaccctagtggtatcctccaaccattctccagctcaggggtaagtgatcagtggcaaatgttcttaatacaacatcttgtattaacataacatttctgcaagttaccaccctcctcaagcatagttaagcacaggaatccaggaataagccaaaagtaataaatcccgacagaccactgatgacacttatcatcttgcattgtttcctcacttggtgtcctcccacacctctagggcggggaccagatctgtgtgtaggtgccccctccccgaccggaacccccaacacgaaacctggtatccaagaggccccagtttgtgggagtgtatgtggaaatggcatgggatgctggcaggaggttttcctgtcagagacccgaaatgacgccaactccgcggtggggactaagcttctccggcagatatagactcgttgggcggagagggtccgaccgataaccgggctgggaaggatggctgaggactgacgccgctaaggcaaaccagggaagctgacacgctgagggcacagaggcacagacgaggcgggtctgcccgcagcgatggctggaaggctagggtccaacagaggcttgggggccgggggaatcagggcagttggagtctgggggggagggggccggcctgctggtctgagaaggatctgaacccaatctgaggagggttctgaactcctctaggggcctactccccatcccacggaggcatctgctgcaccgagtactcgctgctacctgaaactgcagcagcttctctgtctgctcctgggttagatcccgctcctcaggcgccgccattttgccgccgcctctacgctcctgacccgtccgcaccgtcacccgccggaactgacctcagccacaaccacatccggtctgaacggccgccggcgcgcaactgcgtctgcgcgcgctggcccactaacctccccccgccccccgccacctctggccgccgccagagggcgccacgctcgggcctatcccgaacacttccggaaattgccgagggactgtcggtacaagtcgctcttaccatttaggcgacgaaaggatctgctaagattaggcgacgaaaggagacctaagattccagtgcagtcttgcagagccgagagggcccgaatgtgcctcgagaagctccggagcatcccgaatggcattcggctgatttcggctgctctctaaccattttccggcaacctcagatactcttggaggtttctcgggagacgcagccgttccgaaataccagccttttggtcgctggcccctgacctaaagtttccaaaagctcctgaccatctctcgggaggttccgaagggctctggatactggcgcggcatttccgacgccgccttcgaagcggaagctgtgggcagacttcggccaccgttccattgccgcttcggggtcacttgcaggaagatctggactcggctccccggatcctcgaccattcatggcgcccccagtcgtccgcacagcttgccgtccaccgccgtgactgcggcgctggaaccccggcccggcatctgcttttccgtgcctggagccttgtctctccgcactagcgctgcactggccccttgtctctgtgacaggcgaagaaagatccctggaccgggattaggagacgcgggttctagttgccaccttgccaactgctggacatccttgggcaaaccacttgggctccattttgccatttgttgaatgagattccccaaaagcccctgacgtgctgccgccgccccttctcctcgaggcagtcccctgcccttcccttctgctgcttacactaccctatcaccacccctcaatctctatcttcctctgcacgtcccttgccccttctagtccgccacctctctttagatttcccgttttcatttccacctctcccgccgaacgcctcctctgcccaccttccagagaggcctgggtctggtacacgcttttccactgaccacctgtgtgattctcagcaaggctctcggccgcctgcgccccaccctcgtccccttgcagggttgatccggtgagacagaaaaggctttgagagctggttctgtgaagagtacatgaaattttggctacttctttcaggacttatcaggtcttaccaggtctgcacaaaccacgacgtcctggaaaaacagcacatggtacgccctaaaacacaacccccaaaaagtgctaattggaaaaacaaaacaaaacaaaacaaaaaccctgcaaatttggatctgcatatgaaatctttccgtttaaaaatggtgtcggccgggctctgtggctcacgcctgtaatcccagcgctttgggtggccgaggcgggcggatcacttgaggtcaggagttcgaaactggcctggccaacatggcgaaaccctgtctctactaaaaatacaaaaattagccagggttggtggcgcacgcctgtagtcctagctactcgggaggctgaggcaggagaatcgcttgaatctgggaggcggaggttgcagtgaactgagattgccccactgtactccagcctgggcgacggagtgagactccgtctcaaaaataaataaataaataaataatatgtcaattaagtaaaaacccccgaaggtaaaatcggaagcagatagctgctactctatagagaatttattacagcagctcaaagctcaaaggaaactcagtgttgttcaatctcaccaataacgttgggttcagataaactaaatgagggttggcaaagtcagatgtcctcaggaattgtgtaattctcacttaagatatatacttgccagcaggcatggtggcaaatgcctgtagtcccagctactcgggaggctga

SEQ ID NO: 317918 - DNA, 4001 bp, Homo sapiens
aactggttttatttttgttttgccaaacaccactggcaaagaagggaaactatgcttgtaagtcatcagaagttatgttttggagaaaaaagttttccataatctgatccttgaatcacattcttcctctgctgcacaccaactgcagatcccacaattggagcagaggaaagaatctctccctgggctcgcagcgctggcatgcattgaatttggtgcaaagaaaggaaaaattccgggtgatgatgttaagcctggagaaggcacctttctgcctcctaaaccagcctttccagctgtgctcctgcctctatttccaatttttgtttctctgccaaactaaggcagggaggagaaaagaaaataacataataaaaagttcaaatgaatacacccataggaaatatgtggctaattttataataacccaaggtgcagaaaggttgaaaaaaatgagttcattctccaaacttttgagagtgggaggtaggacagagttcttctccactgggaggggctgcctggatcagctaactggaggctctcattttatggatgaggacacatcagaatgatgtcctctgactcccagaaaggtgctgtttccactgcacccaacagtttgctctgtgaattaaaagctcaagctgggaccaaaaacagcaattcataaacaatccccgcacctgccaatttgccataatcactgcagttcctgcagcccaaactgtgtgtttgggaaacggaatcctcccaaaatccactagtgggctccagacaaatatagacacaggaatgtgttccttcaaaaccaagcagcagctatgctcatctttctcggggctggttaggagaggaccccgctaccgagccagcgggtggagacgtcgagacccagcacctgactgaactcccaggctgtgctgctgcccttgtcgggtgatttttttttttttttttttttttttggacagagcaaggctctgtctccctggctgagagtgcagtggtgcaatctcggctcactgcaacctccgcccgccgggttcaagcaattctccggcctcagccttccgagtagctgggactacagctactcgccactatgcccggataattttttgtatttttagtagagacaaggtttcactatgctggccagggtttcgctatgctggctaggctggtctcgaactcctgaccgcgtgatccgccagcctcggcctcccaaagtgttgggattacaggcgtgaaccaccgcgcccggccccgtctgggtgaattttttttcagccagagtattctgtgttgttagcaagtctcgactgccgcgaaggtgtgcgccacatcctctgccagcagggcgcgaaacgcaactccctccgtcagcgagtcgagctccccgagaggacacggggccccgcgggtccacgcgccccgggctcgctcccaggcgcagggcgcgacctccgccgctgcctgggctccccgcgcggctctgaggggaccccgaccccaaagaccggctttcttccaggaacctgcgtttcctgcccgggcaggcgacctaagcagcttggcctcccttattcaagtgctaccccgtccccgacagcggctcgaccccgagtgggggtgcagccccgccccactcccgcccggctcaggggcgcgctccagctcccgggctccaggattcccagcccccaacaggcagcgaaggtggccgccgaggagggcgcgtccctggctgcctgcgaccccgcccgccttgacggtccctgctcgcgccccccgccccgccccgcccggccccaggctcacctgcggcgggagcgccagaccgctcccgctcccttgcccgcgtggggctccttgtcgccgccatgccggccgcgctgcggacgggcgctgggcctcggcccgtggtctgcagtggtctgtcagacgcgacggccgcccgccggcgcccgggctcgcttccctgaggcgggctggggagggcgggggaggcgtagggcggggatgggtaccgactgacgcgccgggcagccaatcagaggccgggcaggggaggagcgggccctagaggggcggggcctccgcgcgctgtcggggtcgcgggccccagaactgcggagacctccgaggctcggcagcggggcgggaagctactcctggggtccaggcgcgttcctgaggctgctccccgggaaacatcttgggaattccacttgggcggatccggcgacctccttggcacttttcatcgaaggcccgttgattgggaagcacaatcgcggagggccggctgatgagggcgaggaaccagtgctgtttccccccgcgggcaggttgctgcgcgatgctgctctgttactgccggggtgggcgagcctggagtccagatgcagctgtcggcccaggacctgttcacttgactggggagattttctaatttttcttcccccgctgggtcagcagaacggggttacacttactgagaactcacagtttactttgggagcgcaaatatgtgcattattgacaaaactgtcctcttatagaatgatttatccaaaggaaaaaatatggggagtagtttacagtagaataaacagcccaaaaatgaaaaggcgctcaccttgttgttctcccccgcactctgccggtcagatgggccttttccagaagaaaaatgaagaaaatgaaaatcctgttgaacacttcctttttctccaatatacacagttccagagacaaactgactgcatgggaaatgttttggcatcttttgaaagagaagttccataactaaaaaaagatgtgagaaacagcctggaatcttgtgtggcttcagtagcctgagggcaatgtccacaagtaattggatcgctttcctcccttcgcctagtctcagaacacaggtctttggccactccagtgagattctttatcccagcaacaacagttaacttaatgccaagcatttactgacagctggcatccagccacatgctttgatatatgtcttttacatgcattgcttcatttaatcctcacttgcccatgaggtaggcactgttattatctccaatttacagaccaggagactgaggttcaggaagtgctagtgcatagtttgaacctaagtctgaaccctcaaccacccaaccattcttcaatgcatgattcacagaagataataaaaatgttcccaaactctactgcatgtttagaaaataatcccttttatctaaatcagatctttgacattgatgggtagttttctacaaccataaaccatcgcttgcgtgtatagagccacgttactcatacaaaataaatgacttaaaattgttgcgcctaattaacctaaacaagggtatgagcagtgacaagtacaaattgtctattctacaaactagaaataccaggactaatttcttgcggtataataaaacaaaatttacttagtcctttaaccacaaaacaaattagccagttccccttccctcctcccacaagacaatatttatgaatacagctgtttgttcttggcctaaaatcctgtcaattaattcacatttaggattttggttgcctgtaatgttcattgttactccaaaagctgaatgagaggcctcttagtgtggtacttagtgaccaaaccttggagccagactgcctagtgtgccttcatacaagccacatggtcttacataagttagttaacctttttgttcctgtttccttatctgtaaaatggagcgcctaagagtatctaccccatgggatttttatgggggttaaattactaaatatgtgcaaaactcttacaatacttggcacataagcatcatataaagacgtatatacatggagatttctaattggctttctggtgattacatgagtgattacatgtctgcacaattacgaagttattttttaaaaatacctagttcatgagctctttgagggcaggaactctgacctag

SEQ ID NO: 317919 - DNA, 4001 bp, Homo sapiens
actagcttgtgctaaatagccgctgggcccttttagctagggcagttgctctccagctccctacaatcccccacgcaaatccacttcactcaaattatgctacctgattaacctctgtaggcatctgagttggcaacacctgccttaaaagaagcttatgattttgacagatgatgatgccaatgacaggattcaaggatatggaaataacatgagggtacagccaaaggcctgaggtctgacagtatggaacatggacagttacagtagggagtagttaccatggcagagagaagaacaatgggaaggcatgaagctagaaaggtagattaagacaacactatggagttcagaatatatgggcatataatataaacacattacacatttccaaaacacatagagaaaaaatccagatacaactactcactgacatacaaaccaacttagaagtagccattcattcactcgcaaacattttttgagtacctactacgtaccaagtagtaccacagtacctgtggagatagagaactaatgtaagccattcactccaagggcctatctaataggaaagacgagacagtttttgcacaaagttcaattaatgttttgtgtatatgaataaatgtttcctatcttttccttatgctctctccaggttgcaacgcatcattatcatcatcataaatatatacagtatactatatgtagaatatataatatacatattacataaattcatataattccatgaaagactggaaggacatactccaaaatatatttttaaagacagggtctcgctatgttggccaggttggtcttgaaccctaggcctggcctcaagcaatcttcccctgcctcagcctcccaaagtgctaaaattacaggcgtgagccaccatgccctgccaaaacagtccctttactaaaatattaaacactggttatctctattctttcatttgtgccagatatttgagctaagccagaagagaattttttatggtgatggttgtttatattatcattactatcgttattagaatgactgtaccatctctttcctcaactcattcataatctaggagaaaggttaaaaaaaaaaaaggaataaacaccaagtacgtggaactgcactatttagtgtttttgtaagtcttccaggcattgtgtagtaagcgtgtagaaataattgtagtttctcctccagttattttctcagttggaggagaaagattccaataactgtaaataaatacggctgagccatatttttaagaaataaaaacgcatacgcttacacacacacatatatattacgtatatatacactccacccgccccatttaccaaaatgaagagcagtacagcttagtagctaagagcacgggctctggagtttactttcttcctgtcctgcagcgattgtggggaagtcaggtcacctgtctgcctctccgtttcctcatctgtcaaatggagttctgggtccctataaagattcagtgacgcgatatgtgaggggcttggaacagtgaccggcacgtaaccgcccacaggttaacagctgctatcacttggtggggtgatggtttgtatcctatcgttattaatacggctgtctctagatgagcaaacatgcgctctcacttcttcccacattcaagaatggggtcccaaacgagagattcgacgtaaacgtccgctcccaactaagttctcaggcgctgacaacgacaagaattcctcacacaaacgtagcgcttcaatcactaaaccgctttcacagccctcgaccctgccgcgagatgtccgccgcccaccgtcaggtcaccgcctccctaacgacttcggctgcccgggccctgcccctgaacctcgcacccctcctgcctcgttcaggaagctccgcacctatccggccgccaccctcagcacagccacggcagccgactcggcgttcctactgccccggaagtgctccttcagcgcagaggcgtgccggtgtgtccgagaaaacttccgagttaagccgccgctgaggccggaaggagctagacggcggtcgggtaggtgacggcttggttggggtcgctgcgaggggactactaggagcgccgaggcgtgagtcgtagcctgtggcttggggtcgggagtgcaggaggcgaaaatgtttgccattcttttgaaagtctggcctgggtgtgggagttcggtcatcgaacacttactgagagccagatacctgccaggcactgccctgggctccagggacacatcagtcaacgaacggaagggccctgctctcaagcagtgcgaaaagcagattataaacaagtcaacaaacgggattatctaaggtggtagtaagtgctgtaaagaaatttagactggataatgtgatggaacgaagtgggagagtaataagccgtatgaaaatctggaatagagcattccaggcagagagaatagcgcgtgcaaaggccatatagtgggaacaaacttagcaaagtcaaggaaaagacaaaggccactggctagagcaaaaggagcaaggtgagaatggagagagatgaggccagggacttgagcccaaatcttgtaaggcttatgagcaaggataaagagtttgatttttgtttggaatccagtggaaaaccattgaaggtttctaagcagatgaatgacatgatctgatttatgactctaagattactcctgggacctcatcagaaagatgcaactcttctgttgccctcgagcagtgaaaatgcatgaaatccagactgacagagctagtaaaatattaaaatcaatcttattgtacagataagaaaaactgaatcccagagaggtgaagggacttagcctttaagaactcatgttttccaactccatttaatgccctcggaattatcatcttaattcccagataagagtaattgtcacttctaaaactcttcagatattttcctttgcttttgacagtggttctctaaatttaggttcatcaatatcacctggaagcttgttaaaattccaaaaaacaacaacaaaaaaacccctgcttaaatataaaatggatcatttcctctgattttctgttgtaatggaaaatgcatagaatttggggctaaagtatggaatcttgggaagccacttattttttaaatgctgctgataattatagcagcagttctcaaactttttgatcttagaatttctttatacttttaaaatgtattgagaacttcaaagggtttttgtttataatagctatcaatatttactattttagaaaacaactttcaacaaaggttattcattttaaaataaactcattatatgttaacatagatagcatttctgtaaaggatattttccaaaatgaaaaattattgagaatggcattgttttacattgttacaaatctctttaatgtctggctgaataaaagacagctagattttcgtaacttctaccttcattctcttacaatatcaatcatcatgtaacttttagaaaattgtgccatattgtgtgagaatgtgagtgaaaaagggatatgtcctaatattatgtaaattgttttgaaacagtgtcagggacacccaggagttcctgcaccacacttttgagaattacactgaattacggtgattgtcatgccagtaaaagaaatatgagtttgatttgtaaatcaataaacctatatgcacattaaaaatgcagatgcccaggcatcccctagagatcccaattcaataagtctgtggggtcaagaaatctgcatctttaacaagcaccacaaattaatttgatataaatggtctgaaaattacagagtgagaaaaccagtcaaatgattctctagagtgttctgcctactaaaactcaagataggtgtctttcttatcttcacctctctccatcaatagtttccagagcctgaagctctggaaagttaataagtttgtagcagacacctttcacact

SEQ ID NO: 317920 - DNA, 4001 bp, Homo sapiens
gagactgtattagttttttaaagaaataaaatttaaaattaagaaataaaatgttaaggccgggcgcagtagctcacgcttgtaatcccagcactttgggaggccgaggcggacggatcacgaggtcaggagatcgagaccatcctggctaacacggtgaaaccccgtctctactaaaaaaaatacaaaaaactggccaggcgtggtggcgggcgcctgtagtcccagctactcgggaggctgaggcaggagaatggcgtgaacccgggaggcagagcttgcagcgagccgagatcgcgccactgcactccagcctgggcgacagagtgagactccatctcaaaaaaaaaaaaaaaagaaagaaagaaagaaaagaaaaagaaataaaatgttaaaaacatcgtaaacattagtgagacacagccctaagactattagactattgcccaatctagcataagacaatatgtccttcttatttgagtgctcgcattcactccataataagatagatttggaataaactctattccaaacacagatacctaagagatccaaagttaattcactttcagggacctccgacaagatacagctagttttaagagaaaacaccaggactagcagagatctgaggaaaatattcatcttgctcaagttaacctagaaaatgacaggctgtctattttgtgcaatttatttatttctcaactttaaggttcagaaatctctgtcctgtaacaaggtatctgttaccggagtctgattattctgcactgtgtaggtcatgtttgttatgaggacacttagcaaacaaagaaggtttttctccgccctcaatagcgtggtaacggatgacaggacaccactttcaacgaaggagacagacatttccctggcctttctgaagagcgctttttggagagacaaacctgttgctcaggggctgagcattcccgtgtgttctccctgtacttcacctaaaaatatgcctgttttccacactgtgcacacccgggggtgggtgctgggcatactccacctgcttgtttgcctcccgttttctcatcagggagtaaacacagtaaacctaacgctccaggggaaggaaaaaacaaatcattcagggcccatctcaggtgactgatgaatgcggcaccgttttgaacgggtacctaatctggtccagatatgcctgctggggctgcaagaaccaagacacgttcaagcacgtttgctccggcaagcttgggcgagcaggtcaagacctcagagttttagaaagcaggggcgaagttttcaagcacgatgggaacacctgtaggtgcaggtgcctgagggtcggccgaccacctcgcatctgaggctggatccgcacacggagaacgacaactgctcacagggacgtgcgtccggaggaaagttgcggtgagtgtctacctgttcgagacaggtggccgagaaagtggggcagggctgacaattcttcctccgcagtgtcccgcgggctccccctgcactgggtccccggggccccgggcgccccaaggtcacctgccctcctcagcgcccccaccttgcccaagctctcaccagaacagcaggttggcagcgacgaagccgagcaggctccgcagcggcctcttccagctcagcagctcgtcggcgcggcagcccagccacagcaccggctccccgagcagccaggttaccgcggccgccgcccggcccgcggcctcctccacctgcaaccccgcgccctccgccgccccagcttcctgcgcttcctcctcctgctgctgccgctctgcgggggatgcctggggcggtggcggcgacggcggcgcctgctcctcggcggcaggagccgggcatccctcctcggcgtgctccggaggcgccgggctcgccatcttcagctgtgcttccagacagggacggggccgggcgcgcgcgcgggcgcgcctgggtgtgggtgccgccgagggcggggcggcggtggcggcaggtcccggagcggggcgcgcaccgcggggcacaggcggctgggggccttgtgacgccacaggccacggagggggagccgcccgggaaagtgggtgcggccgagttcgcgcaggggcggggccgggcgccgggagctgggcggtgtccccggggggctctgggttcctggagggcctctccgggactcgaggaaaacgaccttttcccttgcagcggcgggagagggcgaagtggaggactgctgctcggttccgtatccaaaagagacccaaggctccaggcaaaatagattggacattttcactttctcaagccagggccaccggtcgcccaaccagcagccactgagggtggtatcggggcgccccttcccctggcagcgtatttcagcccccagagacatcccccacctcggccatccccagcgcctttgcagggacagcagcacaaccatagcagaggtcctgggcatcctggaaataacgtgctggtataaatgttggattgagaaaggaagaaaaaacatttggggtcaatttggggccctctcgtttgacacgggaggaaacacaaggccgcagcgttgggggaagctgcttcctttctctctcttctttctctctgtctcaggtgcttcctttctcttctctgtctctctctctctctctgcctctccctctctctcccccgtctctccccctatcttcccctctctcctcctatctccccctctctccccctccttgtggctaggtgatctggctcagaagtgcacgttggcccgcgcgtgcggggagctgagaagcaagagattggaactttgcacgtgtcaagcaaggtttggcctgctttgaagacagtaatttcagagccactccggtctctgcgtcacaagcgggcatcagggcagtggtggggcggcaggggatcctgagacctcccatgccctctctttggccccggtgcttctgggtgagtgtggggagagaggaaaatagttgtttatgcttttcaccatttgcatttttaaatttttgtcttctttaatcttcctggtcttacttttactctagaatgacaggtccttcccccccatactaagggttctgtctgcggatgcatcagggcatctcatatccctttactggcaaccagcctgcctgcacaggatggaagggagggcaattaaattccctgcgtcaagggagtctctaggggaatgttctgtaacgctcctctgggtggccattgtaaacctctgtgtatacacacgtggaatccattgatctgtacattcactgcaggtgtctgcactttactgcttgtatgttgtacttcaaaggagttatattcccagagcccaggcaaaggcttactgagcacctaccgagtacacaaagcattgctaagctctgtggatgcagcttccacccacaggaagctcccagtctgatgagggcccagttacaattgtgatatctgccacagcgaagaagccttcgctaagtgctaagagattccttacttaaactgtgcatccaaaattaggggaggagtggagggatcaggtttcaagagcgttttgtaataaatggcctctgccctaaattgtagggcccccattagtgtggggattggggacaggggcaataactgctgttgggaattcaacaggagaggaggcatggggttgcaggtggagacgcacagttccttaagtaactcaccaaagggaatagtggacattgaatggtctctagtaacaggaggcttggtttttaactaaaggtgatacagaacatctggcatttccgactccccttcttaggagtatcctgacaacccgatggaaagtggcctgggtgtcaaggaaaaagcaacgtggaaacaattcaggtttcttccatataagagagacaatcttttcccaggtgtgggtcctccctcttggcagtagcggagaagtttttgaaagataaatgatgcttttattg

SEQ ID NO: 317921 - DNA, 4001 bp, Homo sapiens
tatctatacactcctatctggttacgccttgttaaccagtaaagcattcttagaaaaaaattcttatgtttgttcagtatatatcacaaactgttggttcaaaatatttatcaataattactacttaattgtgaaaatattgcatttcattaaagcaaccctaatcacatttctgccaaatctctcccttctttcaacctctaaaatgagtaggccccataaatatgtactgcacatatcaaatagcttatcaatacatttcattctacaagtatgtattaaaaatgcctgttctgtgaaaattctatgaagagagctggtgggagtgcctaggtgccaagaggaaaataaaagtcctgcttccagaaatgttaaaatgtcatgaaggggatacatacgagtaaatcaacccatgatctcaaaactgaacctgacatttacacttttctggaaatgttttcttaaccagctagttaacccatatcccactctaagcatttctgtaaatgtcatcttcaagtacttggtttactgtgtcattttatgtagaaagttgtttcattgttcaattaaatgtcaacataatgttgatgtactaggaaggaacttgtaagaaaatggaaactagaaaactagagaaaagtagcttttacagactctactacaactgattataattaccacacacacaaacatgccccatatacccatggctgaaaggggatgcttgtctttaatacaatgacaaaaatatattttggtgcccttgttcctagagagttaccagtttccactttctttggcaagaaaattgtccaactccttttcttgtttaataatgttctgtctacttcatatccaaatttcaatggccccaattagaattccaatgaaggcatctaactgactcatacaaaagttgttcacagcaatggggctaaaatgcagactttcactctgggcacaattatgctcatatgagcaggaattaattgtctgcttcctttctgtactcttgatctcccccttctcagagttagatattaatataaacagtgatacaattaatgtactccctgtaaagggaacccaagtaatcacattttcaacaataggaactgtggttttaaaaagttttacaatatcaaaatggtatattggtccaatgtttaaactgtggaaatgcttaacaaatctttaaaatgcaataggtttttaaaaatgttcaatagcttagatttccaacaactatcatctaatgttaaaaactcaacattaaaacattcaagtagattctacattatgtgctgggaaacacttttttaaaaaatttcaggccatcactttctgattcaagaaaagcacttattggcataagtttttaagaggacattaagttatttgcctctcttgagtgagttcgtgccaaagaaaattatgtttcctggaattaaaggactgcattcttcatatttttacattttaaactcctttttaaattagtcataatatttttaaaaagataactagccagtgaaacagactgaagaataagtacgtacgtatatatcacaattaccttttgcctggtccaaagtcttcaccttcaggcatttctgccctttaaaaataataacagtggcaaaggctgcagcacctgctaaccacggctaatgtggccaaacaatagtttcttttctactctaatgctgaatatcaggaggaaaaaaacccagtagagacgttctttcctttttggaaaaaaagtgctcctcccttactcagaaagttggtgtttacaaacttccaaagcgcctgcctcccttgaatgaagctaggagctgggttattatcactgcccccttctaaaaataaataggtcacctcttactcccagtactgtgacaggcggctggaagtgagccctgcccagctgccccgcattctctctccagtcctgtgagaaggtgtccccgctcagccagtaaccttcattggatgacttcacctaggcccgcctgccctttttcttcccccggcttttttttttttttttctggcatgactaggcacccacctaagggtggagtggccacaggaggttgaaacatcaccctgggctatcaaatctcctccttcaagtcacaggagggagttggagagcagacagcaaaacaggctgtacctgtgagggttgggggttttgtttggagaacgcctagccactcggcaaaaagatcccttactcaaaaaggtttaaaacaaaagccattatgcaatggggttttgagggatattgctttgcaagaaaatcttttcgggtcatctagatttctcaactcaccggaagcatgcacacgaatgttgagttcacgtgttcatctgggcaaaacgctttctccccaggacttccctgtccttaggggcagcctgacactggcacaggaaggattgtgggtctggatgttttcatagtttggcttgtcactgaagagagccatccctcatttgcttttttaaaagagtacgacaaaaatcccttcaaatcttgctctcaaaaaggccagaagaaatattactgagatttctttaggaatatatcctgaaagctttggacaaaaagttgaagccattttttttttcttgactaggaatgttagggatggcagaaagtaagatctgcttattaagaaacaatattattttcaaaatgtgttgccaggtgctgtggctcacgcctgtaatcctagcactgtgggaagctgaggtaggaggatcatttgagcccaggagttcaagaccagcctgggcaacacaatgagaccccatctctaccaaaaataaaattagccgggcctgatgggatgctcctgtggtcccagaaacttgggaggctggagtgagagaattgcttgagccccagaggtggaggctgcagtgagccaagatcgtgccactgcactccagcctgggtgacagagcaagaccctgtttctttaaaaagctaataataaaataaattttaaaaataaaaaaataaaaatctgtgtattctgttgttatgttatagctaatcctagcatgttatctatatttaatgtatattttaccatttgtatgtgtgaaagtgactttctaccacattaaagaaatgtcaaaacaaataatatctgctttcttttggatagtgttagttattttgtgatgtatgcatctcacaattaacaattccttaaggcatttcatattttacgcaagacctaacattttagacacttcaaagtctaagatgaactgggtgtggttactcagacacacaactgaaataccagggacttgaaagaaaacagtcataggctgagctctgaaggtcggggtgtgcgagagcctgtcagaggcagggcaatgtgctatactattagaaattccaggtttttaaataactgaaaagttgaaatgctgaaaatattatcaatgataatattttggcacttgtacaaaatcttatcggctgggggtggtggctcacacctgtaatcctagcactttgggaggccgaggcaggcagatcacccgaggttaggagttcgagaccagcctggccaatatagtgaaaccctgtctctactaaaaatacaaaaattagccgagcgtggtgacgcatgcctgtaatcccagctactcgggaggctgaggcagaagaatcacttgagcctgggaggcggaggttgctgtaagcctagattgcaccactgcactccagtctaggtgacagagtgagaacctgtctcgaaaaaacaacaagaacaacaacaacaacaaaaaaaaaaaaaaaaaaaaaaaacctaatcaacacaaaaggctaattctcttatctaactttcagctctgatcattctaacccatgaattttaccttttctttctcctgagcttctagcttactatttcttgcatacctgaacataactgttgttgatcttagttgctggttaccacaga

SEQ ID NO: 317922 - DNA, 4001 bp, Homo sapiens
gatggattgaggttattcataactgattataaaagcagttattttattggtggggaaacactgacaagtcaacagattcatttcagccattttctctcctaaaacaatgacattctaataaaaaaaactaacatttacaccacccaatgaattatgccactgcaatatgcccttctacattttccaagaacttaagctgtgtcacacacgtgtctaaattagtaataaaattaaactggagaaactattactccaattttaaaagcagcacggattaaaaaagtaagaagggggcaaggcacggtgactcacgcctgtaatcccagaactctgggaggctgaggcaggcggatcacttgaggtcagttcaagaccagcctggccaacttagtgaaatctgatctctaccaaaaatacaaaaattagtcaggcgtggtggcgggcgcctgtagtcccagctactcaggaggctgaggcaggagaatcgcttgaatccgggaggaggaggttgcagtgaaccgagatcgctccactgcactccagcctgtacgacagagcgaaactgtctcaaggaaaaaaaaaaaaaagtaagaaggcgctcccaatggatatacaaataattatcagtccattcaattccatcaacaagcacttagtaaatgcacagtacctgtgagaaaaccaggccaacaagcatttcaaggttaccaaaaaaggaaggttgaaaatagcctcacactaacccagctctaaaaagacaaataattcaaaaccaccctttaatgtctgtctctctaaacaggtgcaccccagttaatgttaatagtctgcattactactggtaatgattctggctaccattttagattatcagatccttcaaagtaaatgcccaacttttttcactgattagaaggcgaaacggggaaccaaatgaaataatccaccgtctttctaaaagtcagtttgattttaactgattacaaacaaaaagggcttaacagtttcccactgcgcaaatgtgccaaccgattcctacaacctcatctaggaaaccaggcgtgccacgcgaaccctaatgctatacaaagtgtccccctccagcctggcctatgcagagcgcattctagacaaggccccagtgcaccaacagcccaattttggctatattctctgagcgatttaaggaagtccgcaaccactcatctcacgtgaccttaaaaaggggcgcagttgagcccagaataaaacacactcctttttcttctacatcaacttcactgcccagcatgaaggaagtgggcggggaagaggcgcagcgccagcgggcaggagaggtcagcaaagaaacgtggggtgtcgcgccatctactctggaggggctggaggtgaggggcacgcccgctcaactgcactgcagccgctgcaaatccaaggctgccacaccccccggcagccagggacacggcttcatcttcctctttctccagcggaaagggggccctctccacggaacgccccacctgctagagtcctccacatcccgaaacgcaacgcccgagagcaggcgcgggtggcaggcggcgctggggggcaacaggaggggaagggccgcggcgacctgcaacccgcgcatgcgcagatccgggtacccgcccgtttacctaccgttggaaccgcgatgccccgttccctggccgcggccgcttctccaggacccgcggcgacggcaagagggcgagaactgaggccccaagtggctccgcggccgagaagcctcttcctggggcggccgctgacgggaggttaaagctacggctgtggcgcggggccagcccggtaagcgaccccccggatacccccggcggtggtggcgacgcagacgcggaacagggggagagagtggcgacagaggcggcggctgaggtgcagagcctccctaacggcgagcgggaggagagcggctggcgggcggaggccgggccggacgtgacgtgcgtgggagggggcggggcaggccgctggtgggggcggggcggcgagggtccccacccccacagcattccgggcagcggccctgtgtcctgcaagcttgaggaccgcggttcctctcccaccaattggggtcctgaattagggtgcgagcagccaggcgccatcccggggcgggttgtggggtcctcggtatggggaggttgggaaacagagaggacactggggagaggaaagataaagggaaaatccggaacacagagatcgcttctggtctctgcggaggaagccaggcccccagggcgcccatatccaggtgaggagcacagagacctgaaccgaaaaccgctgggggagacctaagcggtgacttcggttcccattcccagagatgtgagttagatccgggaccacggggctgcacctgcgtcctgcccgcccccaccctaccccttcacctcaggacctgacctagactccagagagaacagtaaggcttcggtgccttagtctgggactgtggaagtcgataggctgcgggcttacagggagcttcgtatactaaaatcagccagctgcggaggcagagctgaaaggaggcagaaagaatgagctctctgaacttgcatggctacccagaccatccctacaactcccttgaactcacaagggtatgaatattcagccaatctcttctttgttatagtctgttaagggctttgagatcttccatttggactccttgacagccggtagatcaacacctgcacaaaaaatagcagccaccacaattcagttgtcccttacctacctgagctggaagttagtaacttggaaaatgtaaaacaagaaccctcatagaacttgggacaagatttgaaaaaaataaagttaccctatgaaatgatctgtaaatgggctacagaggccacagtgtctcccacatttcatcagagagagtaaaccatgtgtaacctaagtgtcacatacccagttaatgctgtcataaccgaagggtggggtccacaaagagtctaaaaccagaagaatctgaataagaatgttctatgaggctcccaggaactctgtccaggaacgaggcaactgattctaatgaccagaaccaacacttactctcagggcagttaaatcttaattcagattcactcactcattcaacagatacttagtgaatgcttactatgttctagtctcttaagatacgtcagtaaatccctgccttcgtggagtttatatcctagcaaacctaaattctggatctccgttaagagcatacaaaggcccatactctgattccaaactcagctagtagcctttccatcattcagggagtctctcaaataaatctacatacccaataagaagggattgtccaaggcatataactaggactagttatactagctgtacagtttttgtcaataaattcatatcatggtttacaaatcggacactgttcactgggttgaattgttttatccgaattaatttctcagagcctatttaaacttgagcgaagtgaaataaaagtttccaaatctgccaaacaggatcaacagagcctgatttcagagcagcccagtgaagatgcagtctgtgcatttagccttgtatctctctttaaatatcttaaatgaaagctttacctgtgattccatgcttggagaacaggagcaatatgattgcttcaaaagctttatcataagtgcgtaaaagtcttgagagtaaatccgaagagagttaaaaacctcctccgcctgccccacatatgcaacacaggctcttgttgacataactgactgtaataaatactttgctctgaatatgaaacctaagatgtaagctcccagagggaaggattcccttgccttttttttttttttttttttttttttttttttggtgagacaaggtcttgctctgtcactcaggctggggtccagtgtctggattatggctcaatacagcctcaacttcctggcctccag

SEQ ID NO: 317923 - DNA, 4001 bp, Homo sapiens
agaattagttttatcaataactcggtaatgagaagaaatttttgtttttgtttttgttttgagacagtttctctctgttgctcaggctggagtgcagtggcgcaatcttggctcaccgcaagctccgcctcccgggttcacgccattctgctgcctcagcctccttagtagttgagactacaggcgccgccaccacgcccggctaattattttggatttttagtagagacgaggtttcactgtgttagccaggatggtcttgatctcctgacctcgtgatccgcccacctcggcctcccaaagtgctgggattacgggcgtgagtcaccgcgcccggcccaaaaatttgttttttaaaaaatggcatttgtcagcaattggacatttttcacttgtgcacacattttattccaagattttgtaaaccttgcatcgattcagaagagaatctggatttatacagcctgtgagtgagaatggtgtaagtcttgagtgtgagctttgtcccagatttgtttggattcttaggaaaactaggcattaaaaggatttatactgagaagagcacaagggttaaaaaaggaaaactctggtctgaaaaaatgttctacggaggtttagcacagatcttaaaaaagagagagagaaaaaagttcacatcctttgatccagtaatttcagttacaagaatcgtgtccaggataaaaacaaaccaaaaacataactgaggaagaacaatgcaaaaatgttcattacagaatgaattctaacaaaacaaaacaaaacaggaaacgactgattaacgttcaacattaggagactggttaattacaatataattgtatacaatataattgtataaaacacttcagtcattcaaaattatgtttataaaaaccttggtgacatgggatagtataagatgcaggattttaaaaattatgtttaccatgaccttaactctatttttaagagtcagggttgttagaaaataccaaaaagttagtagtggtgcctgtgggtatcagcatttgggggatttttttttcctatttccctatactaatatactttataaatgttctataatggcatttatcaggacctggacatttttcgcttacacacacattttattccaagattctgtaaactgtgcatcgattcagaagagaacctgtatttatacagcctgctagtcagaatggtgaaagcgtgtattatttttacaattagggaaaaaaatctaaactgaagaaagaacgcgtcactgacgttgtctcatgccactacttaagtttacagaaaagatactgtaaccttcaagagcggaactgctgtcccgcgagttgaagcacctgattccaaggggaatcaagcgagccgcacactctgccagctttccaggcagcgcgctcagcagcgggactatgccgggcccggcccagtccgcattcccaaacctcccccagctttcaaagaggaacctactgacccagaccgcccccatacggtcggctgaaattaaggattagggaaacgtcacattcctttctttccaacccagacctcaaaagacactgaccctgccattctcgacctcccctaacgcctgtcccttagagcccacccggcaaaccaaggtccttgccaggcgatcgcgggcgcgccccgagtgcagagcgggctccaagcccagccgcccggttctgcgcggcgcgctcccaggtccctagcaaggaagaccgcgggagcccgcaaagggagggtacggccggcggagcctctcaaagcgccccacctccaggcagaggccgcgcgctcggcgcttacctgggcctccagcggatgctgccatggtgacgacgcccgccgtccgcgcaggcgcccaggctggcgcccctgctaaccgggcactggtggcagggaaattcgactccacaaaccacaggcctcggcgggggaagagcccggcgggcgccagcgaagcggaaccaaacggagccgcggcacgcaggcgcaaaggctggcgttcgaggttcgtttacgcgccgcttcgccgtgcaggtggtggcgaagcgctcctccgaaaggtttcggaagctggtggtagctctgaagataacgctgcgttagggcatactgcggcggaggatggaactccgattgaaagcagttgctggagtggagcacgaatttcaacagttgggtatattttcttttaaatgttagtaatatcctaaaagggtgtggaatcattactgataaaaatcagtgtttctggccgggcacggtggctcaggcctgtactcccagcactttgggaggtcgaggtgggcggatcacttgaggtcaggaattcgagaccatcctggccaacatggttaaaacccgtccttactgaaaatttaaaaaattatcctggcgtggtggcgcgcgcctgtaatcccagctactcgggaggctgaggcacaagaatggcttgaaccggagaggtggaggttgcagagagccgagatcgctccactgcgctccggtctgtgcgatagagctagactgtcaaataaataaataaataaataaataagtttttgtacaaagttaccgagctgataacttgaagttttctctccccttctgtctctctaccagtgttcactcagaaaacgctctcagcaactgggtcctcccatccactgtctttctagccctccttaactcattactttttgaagccaaactagtgatcagaattaacaacaaagctctgccattttcagcttctgtgaccaaaaaactcaatctgccagtggtagagttaggataactaacatcacctgacacgtaatacaaaggggagttattcttgcccagcctttcagataaaatatttttcatcactccaaagcaatcactctccatttacccccttcctacccccaggcaacaactcatctactttctgtctcatgaatttgcctattctggaatttcatgtaaatagaatcacagactgtatgtatgatctttgtaactggcttctttcacttagcatgttttcaaaattcacccatgttttagcatgtatcagtacttccttccttcttatgctggaataaattccagtttgtaaataccacattttatgtgtgtccattcaacagctgaaggacattcgggttgtttctacattttgtcttttatgaatgctgctgctgtgaacattcatggacaagttttgtgtggacgtatatgaatacattcctgtgtgcatatctgtgtacatacctaggagtggaactacttgttcatatagtaactgtttaactgtgtgaggaactgccagttttgcaaatcagctgtaccatctttcattcccaccagcaatgtatgaagattccaatttccccacatccttaccagtcagtacttgttgttatgttttttaaattatagccatcctagtagatatgaagtactacctcattatcttgatttgtagttccctactaataatattgagcatattttcaggtgctatcggtcatttatatatttcctttggagaaatgtcttctcaaatcctgtgctcatttcaattgtgagaattctttatatagtctcaatacaagtcccttaacaggtaatttgcaaatatttgcaatattttctcccgttgtgcagattgtcttttcactttcttgatggcattgattgcagtacaggtcttttttaaaaaacttgtttttctttttttttagatgaagtctcactctgttcccccaggctggagtgcagtggcacgatctcggctcactgcaacctccacctcccgggttcaagcgattctcctgcctcagcctcctgagtagctgggattacaagcacgcaccaccacgcctggctaatttttgtatttttagtagagacaggatttcaccatgttggccaggctggtctcgaacttctgacctcaagtgatccacccgcctcagcctccc

SEQ ID NO: 317924 - DNA, 4001 bp, Homo sapiens
ccataaaatcctagcattttgggaggccaaagcaggaggatcacttgagcccagaagttccagacttccagaccagcctgggcaatatagtgaggaaaaaaaaaaccttaaaaggaaaattagccaagtgtggtggggcatgcctgtagtcccagctacttgggaggctgaggtgaaagaatcatttaaggccagaaagcagaagttgcagggagccaagatagatcccaccactgcactccagtactggcaacagagggggacctgtctcaaaaaataataataataaaaatgaataaataaataaacaaatgattgtgtatccagctagatgtaactacacatagctacaatcccagctactcaggaggatgaggtgggacgactgcttgagcccagaagttccaggctacagtgagctatgactgtaccactgaatagacaccatattctagcctgggcaacatagagagagcccatctcttataataatgataataaattaattgtgcatcattcaagtaacttgcataactggaaaaaaacataaccattgaatatagtataatagtataactactgatcatagagttccttttacttgcttctaatcttttcatttcttataaaactaaaatatggttgacccattcaaggcagttcatcacagaacaagtcaaaaagccaaaagaattgcatgcaagctgtaggctgtgttatccactactccctgcaagcagtggatttggtcattaacaatcagcaggacttttaactttgtgtgcgtgtgtgtgtgtgtgtgcgcacccgaacgcacatgtgtgtatgtgcacgtgtgtgtgtaaactatgacagataaaaccattttgcttatgtaagaatatgtaacataacttgtgcttctcacaaaggaattgcttttctgtcttctgcactcagtaggtatcttcaaaaaataatctcctattcgtatgggtgcacactggttcacttttacagttcttactgccatttatttattctacgagaaagggattgttgagttcccggttctaaagatacttccttagtgacacaaattaacaggtaatacagttcacccttgaacagcaagggtttgagctgcaggagttcatttatatgcagattttcttctgcctctgcaacccagagacagcaagaccaacctctcttccttctcagcctgaacaacctgaagatgataaagatgaagacctttgtgaggatccatttacgctttatgaaaagtcaatatatttttcctgcagattttctttctaacagcttcacttgtctagcttactttattgtaagaacacagtatataataatgcagcacaaataaaataggtgttaatcgaccgtttatgttatcaggaaggcttccagtcaatagtgggctattagtagctaaattgggaaaatcaaaagttatacttagattttcagctgcactggaatcagagcccctaacccccacattattcatgggtcaagtgtaattatgtatttactaaatataaacaatttattataaaaataaacaacttattacaaaaatgaactagaagatccatatgtataacaagtccaatttgttacaatgtgactatagagaaaacataaatattatataggattttcgggatcataattaagtaaatgattttttttcagataatactgtttgagattataaatcagctacaactaccttcttaaataactcttaattccaaactaaagaagttaaatataagaaactaatttacatgtatgtatatatgtatatatacatgcaatttacacatctttttaaacttttcttttccttcaaaactaccttaatcttacatcttaatttttttaaaccaagagtaggaccaccatgagaaatgagaaattcactatcagaagtcttacctggattgtaagttttaagaatcttctttttaagttccaaaatttggtgtcgaattctgtatataaaaaagtaataaataaaattgctattttaatactgaaataaaagttaccatattaaattcttaatgtttggtaaatgtgtaatcaaactgattcttttttcctcgctggctaaaacaaaatacatcttcgcacatcaacgtacttctatatctattgtcacctttgatggtcacatattattgcatcctatggatgcaactgaaatttacttataagatccattctatgggttctttttaaaataagtgctgtgaaaaacaaagtgcatgtatctctatttcccaagggtattttagtataatggaattgaagggtaacgggcatacgcatttttaaaatatagtacttaccaccaaattatctatttaaaaagtaatcagcaacttaaacttcaggcagcagtataaaaaacatcctcacacattgtggatagaaaacagtttcattcctcttttaatttaaattcttataccagaaaagcaaaggctttttttcctatttacataagaaacttgtagatctgcaaaaaagtactttgcccccttttacagtttttgattatttgatttgaaagaattccctgtaaaatgaagatgcacttttcaggccgggcgcggtggctcacacctgtaatcccagcacttctggatggcggctcactgcaagctccccctcccgggttcacagcattctcctgcctcagcctccggagtagctgggactatgggcgcccaccaccacgcccggctattttttttttttttttttttttttgtatttttagtacagacagggtttcaccgtgtttgccaggatggtctcaatctcaatctcctgacctcgtgatccgcccacctcggcctcccaaagtgctgggattacaggcctgagccaccgcgcccagccctaaaatttttacaaatgtcattacaatagtaaaagacagtaggtgtcatgcaaaaatgttaaaaccttgattttttcattcggcttatgtaaaattgataatcacagaaagagctcacattttgagaaaaatgtgtcttcccattcaggaacacagaacccacctcccacttccaagtttccttctaagaaccttcagtaaagaaccgatctacacaggtggatacggatgtaaaacggacagttttaggtgagagcttttcgctactgaaaatgactcacggttttttgtttgtttgtttgtttttcttttttggagacggagtctcgctctgtcgcccaggctggagtgcagtggcgccatctcggctcactgcaagctgcgcctcccgggttcacgccattctcctgcctcagcctcccgagtagctgggactacaggcgcccgccaccacgcccggctaatttttttttttttttttgtatttttagtagagacggggtttcaccgtgttagccaggatggtctcgatctcttgacctggtgatccgcccgcctcggcctcccaaagtgctgggattacaggcctgagccaccgcgcccggccgactcacggtattttttgatagaggaatgagttctctcattaggcacctcctataatgtatataacaccatgttttaaacgtgtaggttaaaaataacactgtgtatgcttagcttggtgagttaaatcactcacattctccaccaagcgctccagctggggaattatgggggatgcagagcagctgaggctccgtttggcaccacccctctgagggtgccctctgaggccccatcccaggggctgcggggaagccgggcctggggaccccctcccaccctgggctgagcccccaccccactgcctgtgctgcctgtccccggcttccaggtctctgctcctgcgcgccaggcagcgctccacttccgcggcttcgcccttgacagcgccctgtggatcttccgattcggtaccccgaacccctgtagacgtggcctagggagccccggaccgccggcccctgcggctcccaaagcc

SEQ ID NO: 317925 - DNA, 4001 bp, Homo sapiens
acatccgtaaaatcctagcattttgggaggccgaagcaggaggatcacttgagcccagaagttccagacttccagaccagcctgggcaatatagtgaggaaaaaaaaaccttaaaaggaaaattagccaagcgtggtggggcatgcctgtagtcccagctactcgggaggctgaggtgaaagaatcatttaaggccagaaagcagaagttgcagggagccaagatagatcccaccactgcactccagtactggcaacagagggggacctgtctcaaaaaataataataataaaaatgaataaataaataaacaaatgattgtgtatccagctagatgtaactacacatagctacaatcccagctactcaggaggatgaggtgggacgactgcttgagcccagaagttccaggctacagtgagctatgactgtaccactgaatagacacaatattctagcctgggcaacatagagagagcccatctcttataataatgataataaattaattgtgcatcattcaagtaacttgtataactggaaaaaaacataaccattgaatatagtataatagtataactactgatcatagagttccttttacttgcccctaatcttttcatttctcataagactaaaacatggttgacccattcaaggcagttcatcacagaacaagtcaaaaagccaaaagaattgcatccaagctgtaggctgtgttatccactactccctgcaagcagtggatttggtcattaacaatcagcaggacttttaactttgtgtgcatgtgtgtgtgtgcgcacccgaacgcacatgtgtgtatgtgcacgtgtgtgtgtaaactatgacagataaaaccattttgcttatgtaagaatatgtaacataacttgtgcttctcacaaaggaattgcttttctgttttctgcactcagtaggtatcttcaaacaataatctcctattcgtatgggtgcacactggttcacttttacagttcttactgccatttatttattctacgagaaagggattgttgagttcccggttctaaagatacttccttagtgacacaaattaacaggtaatacagttcacccttgaacagcaagggtttgaactgcaggagttcatttatatgcagattttcttctgcctctgcaacccagagacagcaagaccaacctctcttccttctcagcctgaacaacctgaagatgataaagatgaagacctttgtgaggatccatttacgctttatgaaaagtcaatatatttttcctgcagattttctttctaacagcttcacttgtctagcttactttattgtaagaacacagtatataataatgcagcacaaataaaataggtattaatcgaccgtttatgttatcaggaaggcttccagtcaatagtgggctattagtagctaaattgggaaaatcaaaagttatacttagattttcagctgcactggaatcagagcccctaacccccacattattcatgggtcaagtgtaattatgtatttactaaatataaacaatttattataaaaataaacaacttattacaaaaatgaactagaagatccatatgtataacaagtccaatttgttacaatgtgactatagagaaaacataaatattatataggattttcaggatcataattaagtaaatgattttttttttcagataatactgtttgagattataaatcagctacaactaccttcttaaataactcttaattccaaactaaagaagttaaatataagaaactaatttacatgtatgtatatatgtatatatacatgcaatttacacatctttttaaacttttcttttccttcaaaactaccttaatcttacatcttaatttttttaaaccaagagtaggaccaccatgagaaatgagaaattcactatcagaagtcttacctggattgtaagttttaagaatcttctttttaagttccaaaatttggtgtcgaattctgtatataaaaaagtaataaataaaattgctattttaatactgaaataaaagttaccatattaaattcttaatgtttggtaaatgtataatcaaactgattcttttttcctcgctggctaaaacaaaatacatcttcgcacatcaacgtacttctatatctattgtcacctttgatggtcacatattattgcatcctatggatgcaactgaaatttacttataagatccattctatgggttctttttaaaataagtgctgtgaaaaacaaagtgcatgtatctctatttcccaagggtattttagtataatggaattgaagggtaacgggcatacgcatttttaaaatatagtacttaccaccaaattatctatttaaaaagtaatcagcaacttaaacttcaggcagcagtataaaaaacatcctcacacattgtggatagaaaacagtttcattcctcttttaatttaaattcttataccagaaaagcaaaggctttttttcctatttacataagaaacttgtagatctgcaaaaaagtactttgcccccttttacagtttttgattatttgatttgaaagaattccctgtaaaatgaagatgcacttttcaggccgggcgcggtggctcacacctgtaatcccagcacttctggatggcggctcactgcaagctccccctcccgggttcacagcattctcctgcctcagcctccggagtagctgggactatgggcgcccaccaccacgcccggctattttttttttttttttttgtatttttagtacagacagggtttcaccgtgtttgccaggatggtctcaatctcaatctcctgacctcgtgatccgcccacctcggcctcccaaagtgcggggattacaggcgtgagccaccgcgcccagccctaaaatttttacaaatgtcattacaatagtaaaagacagtaggtgtcatgcaaaaatgttaaaaccttgattttttcattcggcttatgtaaaattgataatcacagaaagagctcacattttgagaaaaatgtgtcttcccattcaggaacacagaacccacctcccacttccaagtttccttctaagaaccttcagtaaagaaccgatctacacaggtggatacggatgtaaaacggacagttttaggtgagagcttttcgctactgaaaatgactcacggttttttgtttgtttgtttgtttttctttttggagatggagtctcactctgttgccaaggctggagtgcagtggcaccatctcggctcactgcaagctgcgcctcccgggttcacgccattctcctgcctcagcctcccgagtagctgggactacaggcgcccgccaccacgcccggctaatcttttttttttttttttgtatttttagtagagacggggtttcaccgtgttagccaggatggtctcgatctcttgacctggtgatccgcccgcctcggcctcccaaagtgctaggattacaggcctgagccaccgcgcccggccgactcacggtattttttgatagaggaatgagttctctcattaggcacctcctataatgtgtataacaccatgttttaaacgtgtaggttaaaaataacactgtgtatgcttagcttggtgagttaaatcactcacattctccaccaagcgctccagctggggaattatgggggatgcagagcagctgaggctccgtttggcaccacccctctgagggtgccctccgaggccccatcccaggggctgcggggaagccgggcctggggaccccctcccaccctgggctgagcccccaccccactgcctgtgctgcctgtccccggcttccaggtctctgctcctgcgctccaggcagcgctccacttccgcggcttcgcccttgacagcgccctgtggatcttccgattcggtaccccgaacccctgtagacgtggcctagggagccccggaccgccggcccctgcggctcccaaagccgaaga

SEQ ID NO: 317926 - DNA, 4001 bp, Homo sapiens
tcactttggaactattcaaggatctgagaatctcaggcacattttccagttgagtttgactgaggaattgccagtccctgttggaggtgcttctgccattagtaacgcctccaatgacccagagatagattactctgttattttccaaaaggccagataataaaccagtgcaatatagatttcttccccatgtaatctactaaggataagctatcattattttctgacattttgcccctgtccagcaaaatacaattttgtcagttaaacttactggaaggtaggcactccttttgagactttttgatgcttgcaatatagaaaaatatgttaatattttattgcttcaagaagtaacatttagtcatttgctatagacttggcatgtgtgttaaattctgggtcatgtaggagactgggagacataatcacaatactttacctcttactagcagactccatctcctccaaccccataaactaatgaatatgtacaaaacaatttaaggtgggagctcgttccttgattgttgaaccccattcattcttcaagcaaaatgaaaaatcaagtttaaagtttgcagcccttcagagtggaagtgggaaaagcaattcataatgaaaatgtctacatcaatactagttggaataagtaaaataaaattgccactatgggaaaaagaaacaagaaagacctcaccttagaaagtctcttcacattccagcaatagccacatggctcgggtttcaagaaagggggtgtcctgttctacagagtgtgtgtataatcatagcaaccaaaagctgtacctttcttggtgtcgcttcaattctctccagggtaggggtcagatcctccaaaaagtgcaagtcgtaaagcccagttgcttgcacaggccctcaggaacacacacacacacacacacacacacacttttaaaaatatacatgtattttaaagaacacagccaattccttcacacccctcaaagagtcttaaaatactctggtccttgttaatgcagtaagaagagccccataggagcctcctttctcttcaaatacaccagataaaccaaaaagaggattttaaaccttccccttgggttatcttcctgtcctcgcgctccaccagtagggctatcagcctgggactggtcccggcgaggggagagcagtcggctcccgggaggcgggcggggaactcagcggggccagccaggcgggccccaagtgcgccctgggcgcaaagcccgcgctcctccagcgtgcgcctcgcctcctgtcctggctcccgggggagctccgagccggggcgagatttctctccctgccctcacccgccctcagaggctccgcgtccttccgtagggacctaacctagggcggatagcggggacgcgggggaacctccctggccctggcgtggctccgcttgtcgcctccctagccccgggctcggccagccgccgcacgcgcgggctctcagcccacctgaggctccacatgtagctgtgcttgtaggggaagtagctgcccggctcgctgcagcagtacttgaggtcggcgaagccgcagcaatactggagcgctgccccctcgccgcgccgggggcactggaagggctccacgaagctctggttgaggctgtagtagccggagcacagtcggctggcctcgctcatcgcgggcaggggccgggagaggctcgcgagggccccggtctgctctcggatcgcacccgtccagcacctccagagcccgcggacccctctgcccggactcggctcttccgatctgggctctggctgcctgggcgctcagccttcgcgcgccacctctgatttctctcctccccttgtccacatggtgtctgggcgccttactctcgcctctccctctcgctgctgagcggtcgctccttttatccgcccatctcggcgccgactctcctccactttccctcacttcatcagcagcctggagaccttagctgtccccactcgatgccagaaagagctttctccagagggaaaaaagaagaggtgggacatgttttcagtgcaggcagatgctgcctaagttgcagttttcctgtctagggacagggcaggtggattctgggcaaacagactgggtctggtggagacttaactgcccggccattgactcaaggagtggaggagaggaccagataaaaggcagctgaacaccagagaggcggagttggtgttctctttctttgagaagtaaatgtgaaacattaagatctgcccatttaaaaataaaaaacaagaaacaaagtctcctgtaacaactggccatggtgcagttgcattcggtgttcagctgaaaaatccagaaagtttaagaaacgcaagacatgaaggtaaagaaagtgagaactttctagagagggaggcagccagaggaaaaaaaaaaggcaaaggaaatagggagaaagagaccttcagtcagttttgatgtgctgtaggaacttcttttgtctcctttttgtttgatattcccattttcttgattggtttgttcacaaagcctttttaaaataacgatgataatgcatgcttattgtgataagccaaacaatgcttgggtgtataaacaaaaaggtaataatagtcttacgatgggagaggaggcgattataacattcataaaatgtacaagatagagcattgtttctccctcttcatttctgcttccttcccttggccaggggcttgattggatcccagacgtcgaattttaccttgttgggtactggatgtttttgcattcctataaatactcttgagctttgtactgggatgcaggaaacagtttgagtctttcgggtttgtttttaatatttgttaggctggactagattagcctttaggactgaatttttccccactactgaggcaatacccttcgaattattctacccaaaacttgtgaattatagggcttaccattgtgactggtgggaacacataaaacacagaaaaatccagagacaggcatgaccacagaggccaaatttcaccaagcttggagtatcttgaggcctctgaagttcaaaccaacaaaggagccttttaccatatgaagcttaagggcagtgttaagactgcggctttaaccagttaggaaattgcttgaccttgcctgctgtgtagtcccctgtgacttagtccccagttatcttcctccaggcaggaggagttctgatagggagtagggtggggctgatcccgcaccaaaagatagccatcgattacatcttttattttctcttcttcttgtgtcacaaaggtgatactcccctttagagaatattctggaaataaggagacatttttggttgtcatgatgacactgtcctggcattgagggatgtgggtcagggatgctagacatcctgaccccctgcaacatgtacaggaaaatgaagaactgtatgtgactttcaaatgttctacaggacattcatgtagatgaaaaacctacttacaattgtctgtacttagaacctatccttgtgttccaaataaatacagtgtttttgttgaattttccaggaatacagctaccacgtaaaatgagggaagattgttatttgttttgtttggaactctaccaagactttttcacaaaaaattatgtgccaatggttatgttgcttaagggtttgtatttgtgttgccaacaccgcacactgtggcagcctgcatttgtaccgtcacaccacagtgatttatagctattgcatgcagagtattgatgtaagcattatgtcttttggtacagttgtgcttgagcatttacatatggaaatactgtatatattttatggtaaattacactccttttatgtattctttatattataataaaagcattatatataattagtgtatttgtttgcaaggtccaccataataaagtaccgcagaccaggtggcttaacaacagaaatgtattatctcacagttctg

SEQ ID NO: 317927 - DNA, 4001 bp, Homo sapiens
atctcattccttgcctttcctccaaaacaagcaaaactaaaacactaaaaattttagtctggtccatactagtcaataaaaatctttcctcttgtaaacactttatagcacgataagggacgtagtttgcaaagatcatctgtacatcctgtgtaaaaaataaaaacgcatggcacaccaaacccagatccacttcggtgaattccctccagggcccaaatgtgtgcattatgcaacagccagcactcccgattgtaatccctgtctgtgatgcaatgacaaaatataaatggcttgggtataatctgctcagttcgtaagtagtaattcgcaagaagccaacgaattaaaagaattcccaaattctcaggaaccttgaaaatgacaaattgtgtcacagttctgtgagaatcacaatgaaaactttcccttctggaaattttttagaaatatgtccctccggtcccaatcccccaaaaacccgtacacacgttttaatttacgttaggaacggctctcccagcgggggaaggtgacctgcatcaggtggttatcttcgaatccacccgatacgatacccacgccgcttcccagacgctgaaaagccagtgagatgcttcatcctttctccccaaggacagtcatgggagtcagtgtaatccagacccccgagccataaaccacccagggttcaaggcttcacctcctgaggcacaggcctcttgaaaaatggcataatggagagctgagaacacaattaggacaaaactgcaacgaccagcattccagaggagggagaatcatacaatatctgttccaaaagtagttacaggtaaaggaaggcggtcagagcatctctggaggccacctggtcgggtgaaccgagtctaaacgctgaagttccacacctccccgagtccgcgtctccccaagccaaagcaatcagctcgcacgccaagcatccaggtggggagagggcgaggggagggggcggcaagccgcagctgcgaaccggcccgcggcggaggcgagcgaagacgggcattccctcacacaaaatggtggcgccgaggcggaggccggcgcacctgggggcgccacacgccctacgggatccccgcagaccgccgccagctggacgcgagccccgggtccaggcggcccgcactggtctgcgccaggcccagcccgcaggggccgcccacagccggtggcccgcgtcgccgctcggtgtccgcgggtctggtgctggcgggggcgcggggcccggcgcggccgtctcggcctcacccagcggtccgcgccggggagagggagcgcactcacctcagacgcgccccgggagccgctggaagagcccgggaaaggaggcggagccgcgcgaatgaatggagccggcggctgctcgctggcgacctccggccggtcccaggccgcacagctcgcggctgccagggcgagtgcggctgcctcccgctcgccccggacgcccggctcctcgtcgcgggtcggccgcggcccaccgtgccctccgacgacgtgacgcactagcgccgcagcgcctccagccttcgcttccgctccgcgcccgcgcccaccgcgaatccccccgcccgccagcgcggagcggcccctcctcggagcctgggacgccgccctgcctccctccagccccggctttcaggcgccggcccggcaggtgcgggcttggccagcccgggggcgtcacgcggcccccgcctcgccacccgcgccccctctctccgccccggccgccgtcacccggcagcgcgacgcccagctcagggcaatggcctggtattaaagagtgaccttggcttagatataaaaatagatgcggttaagccgcgggggctgcaacgctgattttgcgtattcctttaatgccgaccttcgcaggattctgttcgcatagcccggtggagttctccagccccgcgtaggccctcctgaaatttacccagagtgggcgcggccatcccggcctcgggacaggggtgcagagggcacgggcgaggaccgccggcctccgccccaccactttcatcctaaacctactgccacttaggtgcatgcaagttagaatcgtgggctgctttcacagtctacagaagtcctagagcccggactttcatctggagatgtcagggaaataccacattcctgcgctgaccttttctctttcaccgtttaaccggtacagaataaccctgacccagaaagacaacagggttccatccggctttcctcccgtgcctctcccagctctattctaccgtcttatggcctctggcgcctttgctaattacacactcctactgaaaattagccctccagcatttaaaacatgataaattgtctttaaggtaatgcgtattgtagtctaaatatatttaataactgtattgagaaacaatattgtatctaagtattaatgtcaagactttcttttactcatcatccaagaaccgtagtattatgttcagctcatccagaaaagttgaaaattgcttctttcattcctgggaaatatttagcaatcacaataccaactttcacgaatttactaatgattagcaaaattagcaagatcaaaaaatacttcaaagaatgcttgttgatatagatatatttgaccctgatttttaaaaaaagcttttctgccatataagaatctattgtttcatttgtataatatttaattagccaaaatctttactattacacatcatttaccattttaatgaaacttaatgaattagatttaatagagcaggaattttgggtagttgggttctacccatagccagtgatgaatgaaattatatgacttgtatttacatttctagagctatgtgtaagtaggagtccccagggtaatcccaaacaattgccatttggggaagctttggctaccagactatgccctacagatgttgaagcctcaggccttagtgtaaagctaaccaatacaacttgttgataatatttgaaatgcctgggtgtgattgactcttagctattgttttagaagtatgcgggtatttgtgcctgggtcagggaggcctggctcccagatgtctggctattctggtaggagacagaactacattcacccagacctataaaagaaaaggtccaatttttttttttttttttttttttttttttgagacagggtttcactcccacagcctaggcaggctggaatgcaatggcgcgatctcgactcactgcaacctctgcctcccaagctcaagcgattctccggcgtcagcctccggaagagctgggacagaggtgcacaccaacgcacctcgctaatttttgtagagacggagtttcgccatgctgcccaggctggtcctgaacttctgagctcaagcgatccgcccgcctcggcctcccaaagtgctgggattacaggcgtgagccactgcgccaggcctgattctcttttccctacttgcaaatgacactatttttgagagtttttggttttttctttttaaatcaccattgacttccctctttggctgagataaattttgcttatcttagtgggcaaagaacaacaactaaaaacatgagcctttgtcagattagtatatgctgaaaattgttaccacaatattttgaaatatgctttgaggcttttttctgaaccgtttttagagtaaaaggattattgctttggtttttgtttttgcaatgcttgctttaattattactttgttattagcaaaggaaacatgttaagagttcgttctgattgtatttttcctctatgtttaaagaggagtggaaccatcttaagtaaaagaagcttgccacaaccctggattttggaggttactaatacacatgacccagaaaagagctctttagttgcactggggaagaggaattcttaatagctaaaatcataactgatgtttttgacagctaacaaattgccaggcactctacagacttcttta

SEQ ID NO: 317928 - DNA, 4001 bp, Homo sapiens
aatacccttaacaaaaattcggtatacactgttatgtgtattgagtgttgcccaggcccaggcatggtgataggaagttcaccccgcagaccccaccactgtgctcccattatctccagtcctccccctcccaacacacacacacatgtgcacacacagacacacacacaggcagacaaaacattctgaaatgtaagggtagatgaaggagaggaaaaccattgccttccccttcctgtcccagccccctgctctccatgcctactctccacgcctccattcccagggctcaacctacaggtctttatgcctcataggcgctgctgagctctaatcggggcagaagcctccagggccatctctggggcaggctcctttctgccctgtctcctgcatgtgagcatccccctttcaggataagtggcttgtttacatttaatacatgccattatcatgcagcctgggaagtaaattgacagcgatctgaggcccttaccctgtgcttcatttcctctgggaagtcccacactgtggattcacaaactctattggattaattggttaattcttcccgctgaagcaatcaaacctccgtggtttcactatgacgccatccctaaacaagtgtttaatctactttctaacaagcatttcacttctcaagatatttttcaacaaggcctttaactcattgggctactctcgtttctgctaaaaggtgtagtgcaaatcatagacttctaccagcacccttcacaccttccacctcagtcaccccagagaaagagcaaataaagagaatacgagagaaagatgagactcaggctgcatcactgggtctttgtaagtgggtcccccgcctgcctgagactggcatagttccaggtaccagcagccccagagcaaaagttctcagcccagcagggttggctttctgtgtgccagtggcatctgaacttcctgtccgtctcacatctgggtaccctcaagatggatgtgcgggcatcagccaacagccaggtcttcccctccctactgcataggtggtacattctcctcagtttctcctccctaaagaaggctcaggctggccgggagcgatggctcacgcctataatcccagcactttgggaggccgaggcaggtggatcatgaggtcaggagatcgaaaccatcctggctaacacggtgaaaccctgtctctactacaaatacaaaaaaaaaaaaaaaaaaaaaaattagccaggcgtggtggcgggcgcctatagtcccagctactcgggaggctgaggcaggtgaatggcgtgaacctgggaggcggagcttgcagtgagccgagctcacaccactgcactccagcctgggcgacagagcaagactctgtctcagaaacgaaaaaaaaaaaaaaaaggaggccgaggcaggcggatcaggaggtcaggagatcgagaccatcctggctaacacggtgaaaccccgtctctactaaaaatacaaaaaattagccgggcgtggtggtgggcacctgtagtcccagctactcgggaggctgaggcaggagaatggcgtgaacccgagaggcagagctttcagtgagccaagatcgcgccactgcactccagcctgggcgatagagcgagactccgtctcaaaaaagaaaaagaaggcggctcaggctggccagtgacgcttgtgccccagaaagtttgccccgcacatacctcctcccttctcagcggtttcctgggactcttcattttccaaatgtttcctcttttgtcgtcgtttcatgatatcagctagaagagtttctagaagatgcttaatgtccacctcccactttttcctgtagattggcccttcttggctctcaggaaattcattaaaaagattcagtacgagtaaacgtagttgaatctccgagatagctaaagaactcagaccgcttagtgaaggagcagcactgcccagtgcccactacactgcagggctgttaaggttcaaaggtcaccaggcccatcgcagattctctgacatcaatgatgacatcacggcgttctacggacctaggtccaacacagtctgtgcaactgcagagacatcattttcaaaaacaattccttttttccaatagaagtcctctaatgaattcaactctcccgtatttcaaatgtggcagaatattttgagatgttaacatgttctgtttaatttttttcttttcttctttttttttcaccctttcccttctggactcaagcaggtagcaggctttgtgttcattgctcagaggaggggtatggcagggctgaaagcagcaatagcatgttaatcatcttgacttttctttcttttttttttttttgttgtttttattttgttttgtttgttcagagacagggtctctctctgttgcccaggctggattgcagtggtgtgatcatagggtcacttcagcccctaggctcaagtgatcatcacacttcagcctcccgagtagctgggacaacaggcaccagacacgaggcaccacacccggctaatttttttttttttttttttttttgagaaacagggtctcagtatgttgcccaggttggtcttgaactcctagcctcaagctatcctcctgcctcaggctcccaaagtgctaggattgtaggcatgagccaccacaccccacctgacttttatttctaaaatctcaaactctgtaggaaagaggaaagttagcagaaacataacggaagcaggattttttttaactaggcatgcccccttcttgctctactatagtgttgagaggtactgattaggtcagagagagagagggatcttcaaactatggaggagaggagccctctaaaatgtggctgaagaggtacatgtggcaaaaacttcaagaagggctgcctgtattatgcgtacaggcagaatcatggcgacctatctcacacatggcataggagccacaccacctaaagactccctggcagctgagctgatgggcatctaaacttcagctgtatgctccaataaccagagactatgctctcaccccaccctcaaaacctcagccctgtatgatttccaaatagggaggggtggaaatccaaagaggacatcaacagaaccaaggcttaaattacaaattaaatggagttacataagaaaattgcatactatttcctgcacatctctgctcatgggctgaaatgtataccagttataagtggcaacccatctggatcttcctgattccaatctaaaattagagacaccttatttggggcagtggccccagtccagtgggactattagttgacaagtatgagggggactcccagaaatcactgcattaaaaaagcagtagaaatacccagaggaccaagatgggcccaaatttgaaagggcactgcagactgtccccaggcagaaggagaatgaagatagggcaaatgtagccttgtaaaaatttgctgatgagattaaatctccagtttcttaaagaatccctaaaaaagaggggccaaagagcatttttttgggtggtagaaattttcagactaaagtagagagaattgtataataggaatgcagtttcatgtacacataatccagtttcaacagttatcagtattctgccattcttgttccaaccaccacacacacagacttttagtcttttgttcatttctttttatttaggtgtttgagatagaggagtgggggacttgctgtattttaaagcaaattccagacattatgtcatttctccttgaatgcagcagtatgtacctacaaagatatgaacttttaaaaagcataacagaaatatcattatctcaccaaatgaatttaatcataattcttttatataatttcataaccaagccatactcaatttcctccaaatatgctaaaatatctttgtataactgtattgttgagatcaagatccaaacaaagtccacacattgtgattggttgatacatctttt

SEQ ID NO: 317929 - DNA, 4001 bp, Homo sapiens
tgtctcagtgcctttgtactaggccaactcattcctccatacttgcggagctcactccctcatttcattcagatctccactcaagtgttcccttatcagagagggtgagcttaccaccctatctaaaatagcatcctctatcattctctctccccttaatttatttttctctatacctctttttttttttttttttttttctggagacggagtctcgatctgtcacccaggctggagtgcagtggcatgatgtcggctcactgcaacctccgccttcccggttcaagcaattctcctgcctcagcctccagagtagctgggaatacaggcgcacgccaccacacccagctaatttttttgtattttagtagagacggggttcaccgtgttgcccaggctggtctcaaactccagggatcaggcaatccgtccgcctcggcctcccaaaatgctaggattacaggcgtgagccaccgcgccctgcctttctctatacctcttaatcactacttgttatatatttacttgttaattatacgtctccatccactagaatgtaagttccaggagcaaaaggactttctattttgtttactgctgtcttcccatcacctgaacactatccggcacactgaaggttgccagtaaatacttgctaaatggataaacaagtggatgctcatggtttcatagataatatttccctcttggccttggtactatttattctaccatatggagcagccatagcctgaaagcatccagagcatccttaacttttcagcgtaggattcactggttaagtggaagtaaggcctagttgaaaattctgaaagaagcctggtaccagcactgtcactgaggccttaacgaagcagatccaaaaatactctcttactcagtttctacattcgctaaatgtatacagtgtaaccgtccctcgcattgtaggataaagaatacaccttatcaatgagatatttgttatgcagtatatggcatgcgttaatgcaaacgatgtcatgtactacattaaaaaatcgcactgatattttgataaatatacaatgcacttgtagataaaaaccagagaatttttccctctacagcttttttgaggatttgggagaaatggacaaatgcaacaacattgcatgtcattaaatacagtatatccaaacacaacgagtttcttggcccaacagatatagaccctggagcactataagaatatgttaaacacctggatgagggaaagagaagactgcttccaaaacatacttactttatttcaaagtcaaaagtattcaacacttaattcatactgcatcccagagaaacgtcccacccgcgcccatgcatgttacaagttttgagagcattttataactgcactttaatccctctgcagtgaatgacttctggtaaagcgctggcagttaataatactttttgtagaaaaaaaaattaatacaacaaccacaatacctccactcgcaagaaagcggaggagggcccattactctgtctccagggactcccagaatcccgtacgccccgacataaggaaagtcatccagggaacacacacgtcgctcccgcctagagagtggaaatggaacatgggacctgcccatcagcggaggcccagacacaagtcagaggtgtccgcagggaatgcagcgtggttccagacagcctcggtccccagggccagcgaccaccgcctgagaccgacccaggccagccccctcctgatttcgacccgggcctgcccccggagctcacatccccgcaaacggcagtcctacctgagctctgcccccagccacagggctgagggggcaggcgggaggaggcgtggccttccagttcgccagtcgaactccctcgtgcggttgttatgactttccctctcgggatccgcgccccgaccaagttcgagttgcacttccggggtcttcaggagattgatacgtcattacgcacttgacggcagcggcggcgacaacccggaaacgggcggggcgcgggccctgggtaggttcctgtggtattaggtggactggagaaagaggcccgcgtgaattaagtgtagttctcttatgcactggcggactctggtcgcccttccttgtgaaggctgcctgggtagccgtagaggacgaggccactctaaagcctcgttttcccagcggaattttaactattctaaggatgtccttacagccagttccccactccgctactcagagtgtgtcagactttaccctgtccattcaactccagaaaaaccgggaggtctagattcggaagattaaatttacctttgaattaggacatgtaaaataggaagttaatattagcatcctaatgacaaaagttttctcgttatcatacttgactcaaatgggaatcttacggatattaatgttttttccagaaacaggtttgaaaggtatttcaaggataaatctggggaaagggatggaagcaactgatttttaatttttagatagtactctcagagcatttatttagtccaaaactgttaatttaatgaattaggctaaactagacgctggggtaacaaagctgagttagataccctctcctctgaggcagctaaagagaaggaaagtctggtggctgacaagtaaaccaacagttatgttcttcagagaggagatctcagactctctaaggtatacttcacttccacactgtttgtactttgcaaatgtaccctgccccctaaaatgtaaactcactgatggtagtgacataatcttgtctttttaatgtatcctcaaccatacaacagtgcctgtccacaaagtagacaataaatacttattgaatgactgaatgatcacagtggtaaataatagattggggaaatctagaaaagtgtataggacaagaagaaagtggtgtaagtaagtggcgggagataaggagcagtaaaaggtgagagaatccactggagttagccagaactgagtacctgaatgaatctcgggcattgcaagactgttagggcttcatttccggaaagaactcaaatggtttgtagagtgacactttatactgaagaggaaggcaacagccagattctgaaaagctttctatgtcatgctgagtaatttgattttctgctgcagacaattggggaagctgaaggattgttgaacagaggagggaaacatttttattttggtggacttttgcaacagtgacagattatattaaaaagataaggctcccaaaaatgtataatcccagtttaaccatgagaaaaacatcagacaaaatacctgaccagtactactccaaacagttaaagtcatgaaaaacaaggaaagtctgagaaactgtctgagccaagaggagcctaaagagaccaactttaatgttggatcctgaaatagaaatagaacgtaagtgagaaaactagtgaaaattgaataaaaaagtaacattccattaagagaatataccaatgtttacataaaatatggagattggtcaaaagatgagtgacatgacctttcaatatttccaggatagaggcccactcaagggttaggggaatgtactttgttcagtagtaaactattgaacaaacatatgggtgcttcagcctgcaattccagctggacttacatgggaatgaatgagccttcagattgttcctgtcattgagtcagctggggtccaaaatttcataaagcagagacgagccatccccactgtgcccagttctgaattcctgacccacagaaacaattagagataatgaaaatgattcttgttactttaagccagtaaattttggagtgatttgtttttcagcaaaagaaactaatagctgtatgacaacagccaaagagtaaatatcctttcaagtccaatcctgcctaagatgtcaaaatcaagaatgaagaggttatgtgctgaaacagagtgagtccttttctctccttactctaccctaaatg

SEQ ID NO: 317930 - DNA, 4001 bp, Homo sapiens
tgacttctaatattggttgaaaacttcaatttttagtggcagatttggatcagctgaagctagaggcagtgacagatgtacaataaggtacccaaggttcttatccaagttcaagccaaaagaaaaaggccaagaagagagaaggagcctgttaggaatagtaactagccacgtgtttaaagcgggcttatatcagaatgtcacaactcataaggactgttcattgtgcacttgtatgtgcatacctgtttaataactacagcatatgttatgtccctttagcatatattcttatgtccttaagaagcctttcttatactagtctaatgtcatttgtgtccttttgacatacatgagctattgatattaggaaaaatcctctctcactccccagtgttttgacagggaatcaactacacagaggatgccataggacattctatttttcacaacaatcgaaggagccaaatgaattgcagaagtcaccatttttaatgaggaaacactgaattggcaaagctaacgtgaaataagacctgactccaaaatctaaaatgtccttgaagaacacttcaaggtctagcgcgtaagtatgccaagcatgaagagttaacagatcaccaaccatcccatgacagtcagtcctccctgtttttagagacagaatctcgctctgtcgcccaggatggagtgcagtggcgcgattatagcgcactgtaaactgaactcctgggctccacccatcctcctgcctcagccccagagtagatgggaacacagtcgccaagtctgttcttgagtttcaggacagggtcaaatgttatagtgcatgtattcatttcagcacttattgagtgcctaataaagtctgggaataatacaactttattagttaagtccctgcccatggcagtaggggagaagcaaggatggaaaccctcaacaaataaatctaaacctatcaaatattaagtcatgatcttggagggcggggaggaaggcagcataagagatttagaggacagctgcggttgccaagatctttctgaggcagcataatacagggcttaagagtgagacctgccgggcaccgcggtggctcaggcccaacacttggggagacctagacgggtacatcacttgaggtcagccgttcgagaccagcctggccactacggcgttaacaccgtctctactaaaaatacaaaaattagcgagcgtggtggttctgtgcctgtagtcccagctgcctgggaggctgaggcacgagaatcactggaacccgggaggcggaggctgcagtgagccgagaccgcgccactgcactccagcccgggctacagtcttgtctcaaaaaaaaaaaaaaaaaaaaagagtgtgggacccattgcatcaggctgtgtaactgtttcttactagctgtataccagtggcaagttactgaaccatttgtgcaaaatgttaatttatttaccaacactgtgttcagcttgccaggcaccgttctccttgaatctcacagcagccctgtgagtaggcactactgttaccaccgtcactttgcagacagggaacccgagggacaaagaagttaagggatttcctcaaagccacagctaggaagagcggcagaactgcgattccaatccatcagtgtgcctccactatccctattccttaagatcgtgccaaaggctgagtcacttgcactaagtagcctagaacagtctctggggaaacgcgcccgccgacaaggatcgccagaaccggcgcgggcaccgcgcggcgaccaggagctctggtcaccgaaggccaggctggaggccagagcagccgcccgcacccggtcaccgcctcgacagtggagacctcagctgaccgcgagcccccggcccgcccgcaccccttctcatgcccccaggaacccgccaagccgctccagcctcacctcctcctccctccatcgcgagatttccaacagcgtttttaaaaaaaaaaaaaaaaaaaaaaaaaaaaaaaaaaaaaccggaaatgggtcctaccatcttctcggagccggagtgcgaagaaataaagaaatagtgctttaagtcaatgaattcctccttgggacccactatcgagaaactatcagtggtaacgttttaaaaaatgacaaattcaatctgctcttgacttgtgtgtcctaagatttccactaagtgtcttcaaacctccccctccccggcttcctggataatagaagttcccgaaggccgccgattccagaagatactgtctggcgtgaaattagtctcagtagaaacataagtcccgcgcgtcttgtgctgcgcgtgcgcaagcttttgggccctcccgagaaagggaagtgcattctcgcttccgtagcggtctccgccggttggggggaagtaattccggttgttgcaccatggcgtccatggggaccctcgccttcgatgaatatgggcgccctttcctcatcatcaaggatcaggaccgcaagtcccgtcttatgggacttgaggccctcaaggtaatggcacagggacctgctcgcggtgggctaaggggaggtggccgaggccgtggctctgcgcctgcgcgagttgaggagcggctctgccatgtgctccccggaaaggtcgagaatctccgtctccctgcggtctccggccgctcagcccgcttactgagctcgggagacgccggcgcctaatcctgggctcggaatgtgggggccagccaggctgggccgccagcgcccttcggagctgggtggggccgctcagtccggtcgcccgcgggagcaaagcgggaccgcctccccgcccggctcctccagcctgacggccgcgtgggactgcgctccagtgggagggcgccggggagatgctctgtcacctgtcggttaaggcgctgctgcttaacctttcgctggtccacccgcaacggcccttccgttttctttgtcactcgtaaaggtgtggtcacttaacagggtatttcatttctgagtgcttttttgcccacccttgaggaaaaatagcgaagagtgaaaaacggacgcacataaccgtaatacaaggtggtgtgcagtgagaaggacagctacggagagggtgcacataagcgtggtgctggaggacagctttagatcggggtgagaggtagcattctagggagaggaaacggtagaagtaaaggcttgggcaagaatgcgcatggcacgttgtagaatggaagagccatccggttttaatggagcactgacttctttaacttacaatagttcccgaaggtggaagctattgaatgcccaacatggaaaatacgacgttatctttggggaagaaggggagccattgagggggttttgagcagaatttcagtagagctgcacttcaggcagcaaagcttgagatagaccgaagggaataaggaagaccagaggggttaaagaaaccagggcaggggtgcaggtaagaaacatctgagcaccagacgttgacagaaaatgcagaggaagggacactccgagagggccttcagggtttgttataaagtgaattcataatagaccattccactaggtctctcaggtgtccctgttcacttagtgtcttggaggtttacttacgcaaagttagaaacaatacagttcccctatggactctttgtttgacttagtgctagttacacaacctcgcggaacctccttttccagggggaggtgataggcctccgtcaagctgaagacttgacagtgatattaaatggagtgacttagaggggctgcacagtggttgatccacggtaggcactcagtatttgtttcctttctagaaagaaaaagtttcaagctaattgtattatgtattccattttattttccacttaacagggacctgcagagaaaataacatccaatacacacacctggtgtaacaacataactaaaactaggttgttttgcatcagccattttgttcaaactgcat

SEQ ID NO: 317931 - DNA, 4001 bp, Homo sapiens
taaacacattacaagttaacataacttttatgaaaaacaactatattttcaaaaaagaaaaaaacgtaaaaagaatgacatttagattcttatttccaattccctttaatatctggcttaaggtgataggagtagataaaaaatagaaacaaaaaataggaaatggatagatttttatatttacttctgcattaaatcctttgcaatgtgttgtttggttgaagcatacaaagtaattccatcttcgcacagatataaacttggaatggaaagaaacattttaatagcctttttatatatgagtggttattcctttatgatactactacaccaaaacttgacaagcagtttcttaaagattagttgcaatgtggaatctgaaacaatatcaatgaactacttgtaccctataagcctgtaacagaatgtattattttgaaaatagttttaatactgtagatgccctgaagaggtctaagtgaaactcccacctgtgtggttccctggcccacatgtcaagaaccactggcttacactattttttaactagccaagtgatgttggttttccattcatgataataacgacttgtttaaaaggaaacttttgctttaaataatcagtttaaagaaatatgttaaattacaatacagagggtatttatgggaaaaacgtgaattttgaaaacaataaacaaacataagctgcaaacctaccctctacacttattttataatgaaataaactgctagacagctttccctcaccttatctctttgctggcttctcctaatggtgaggtcttggctctgtatgtcaactcttcaggaaggtgattctctgccacttaggtggcagattaaagggcaatactaggaaacactgatagtaaggaagaacttttcttctcctgaattttataaaaataaaatatccataaggcacctctatattactattaatccactcaaatatatattgatttcctattaagtggcagcattgtacaaataatttgtaagactcacaaacctactaaatagatatcctgtctttaaagagtttgcattctgattggcaaaattttgaccagttaggtatacaaaaatttagactagaaaggtagaagtattacaagacagagtagtcaaaattctagggaataaagattatcctcacttcagagaaagggtgccctttgaggctgacgtgggttgtaggtcagatgaagagatttggaggtagggcactcatttataaacaaaaggcagcaattagttataggtttaaattgctccaaaggtaacaggcctttaagaaagtcaatatcatattcttaagcaggagtccctgatgctggggaagggggaaagggtcacagaagtcagccttgctggagatcaccggcctgcgtatctcaggcccacgggggtgccccaccgaggctttgcctcacctgaccgtcctgaccacgaagtacaccagcaccgcgccgctcaccaccatcaacacggtcagggcccgctgggtcatgggcttgtcgccagggttggggctcacagcaaggccgccacccaccgagccttccccggccttccctccgtgatcgtccgtctcaagcccggccacagggttgctgccattgcctccctcggagccccgcggccccgcagcttcagccagaccacggcccggctgctgggcaggggtagggcccggtggcagcggcggtaatgtccgtggtctagggtcaggaggcccaagacctggcgcggcctcggctgcctgcagcaggactgccaggggcccgcttagttcaggcagcaacagcaggaggaggacggaagccaagaggtggctgagacagcagcagcactgcgaggccttcatcgttcccggaccgctctctcaccacccgggagccgccaggcccgccacgctggctccaagagggaccataggcgcggtggagaatgaagcagaggtgaccaaacgccagggagaggcccggtcgtggcaggtggcagaagctacagcagtggcagctgcccggagaaccggaagttcgtacatctcagcggccactgctgctaaggacgccttcggttgctaacttgtaggggcggatgcacttggtgacgtcagaggcctagcgcccagtgcgcacgcgcacttgtgtaaaaagcgaggacgtgaccgttttggaagcattgttcttttcactgttagtgaggagcggtcaaggatgcgtattaagaaagtaagtagacaaaaagagattgtgtaaaatgtacagcaactctctcatgcaggaaccctgagagattggaaactcataatctgaattcattggtgtcaaactgcaataacacatttaatctgtaagccagaagggcttagttttccttagcttcattacaagctttaagcaggctttttttcctgcctatgggtccctgacctccctttctaaagagcatttgcttgtaatgagttcatgtcctttgtaggcacatggatgaagctggaaaccatcattctgagcaaactattagaaggacagaaaaccaaacactgcatgttctcactcataggtgggaattgaacaatgagaacacttggacacgggatggggaacatcacacaccggggcctgtcgtggggtaggggggagggatagcattaggggatatacctaatgtaaatgacgagttaatgggtgcagcacagcaacatggcacatgtatacatatgtaacaaacctgcacgttgtgcacatataccctagaacttaaagtatattaaaaaaaattactttagaaaactttaccattgtaagttatttctcttcccttttcagatgtaaatattttttaaagcttctggccagttatataattgaaaactatctcaagggtatggaaagccatcatgcctttgaaatataatcagcaaggaaggtagtgggccatctcttattttgtgtgagaggaaaggaacctaactgttgtaggcttctcgcttcaagttgtaaaaccacctcctgtcatggaggagaaaatttacttttcctttgggtaaagtcaatcagcaaactcaggtggccggtgatcttcccaaaatagctcttaataactctccactcctttttttcttttagaggagttgagattagaagagttttatcccctttcccaacagcagtagtcttcaataatgtcttccttgcctgtttgacttcagtaatatggaacttcaatttgtgcagataactagaagtggccgcatgatgtacctctcaccaatgagatgcctgtcaagggtatacgtgggtcttttgagtaagttattgttttcattgctaaaagagagacagatacaggtagatatatacagagagagagccagaaacacacacacatgcatacacacacctacctctctcattattcctttccccctttcacttgcctgccctctctgcacagaaagttctggccctaaccttgaaaagaatatgacccagctagtcctctgatcctagtagactgtgggatatctggcgtaaactatgactaaacctatagcctggcaccaaatgcagccaaggttagcttaagttagtcaaccccagcttgaccaaagaagtgaaaaataaatgcttatttgctgtatgccactgatatttctatggttattgattatgccacattattctagcaatagttgattaagaagctagaatcaaatcatggtattaattaggagaatataataatgtggcagtaacctgatacaaatttctcattctgagattttttccccttatttatgtattttttttttatatcctgtgcttggtacaacttgtttgcaagccaattgataacaagtaaatgaacaagtatattaaaattaagagaaaaattcataaacaactaattttacttagtttgaaagattgtatttcacatagatatttgtgctcaaaattgtaactt

SEQ ID NO: 317932 - DNA, 4001 bp, Homo sapiens
tctgctgaatgggaagaagagaagacaacagctttccagctctcccttctcccactctccctttttggataacagcactcccacgggggtcccagagtaggctggtgggggaagcagctttggggttggaagctagacccagtaggggttgggggtccaacctggggagtctcctacggaagtgtcagcctaggataggagatggggatgcggatgaaggtggagcttctgacactcagtaagtgctgacattttcattaattaaaaaccttattgtgatctgagacacaaaggaaatcagcatgaaaactgggttacaataagcacgggttctggaccgattcattttctctctcattcacctagttatttttattctgtgttagcaaggccctgggcgaggcgtggaagatcagagaaagatggcatagcctgtgtccctgtggagttcacagtccagggcaggcaacagacatatcaacacaatgtttcatcacagaaaggggagtgctaccagagggaggcacagagggctgtgggcacagagagggcacctgacgcaactggggaggtcaggggaggctttgtgggaaggtaccccaaacggcaaccccactcacatgcacaattccagagattctactagaaggctgtcaagagccatgccttctggctgcaccagcctcccagagtcccctgctgcccgatgcagtgtctgcagagccaaacgcatcttccgccacgcctcatcctcatccggcgccgcatccgaccctccaagactcctgcaggagcctgccttcctgggcaggctcagccaaaagaccaactcaaaactcttttgtcagagcaagcttagggagagccacccagccccgagtgccacaaccctcccagagcaaccgtggcccatgtcacccccgcctctcagtgaactttggcagggtacctcccgttatctcctttgctcaaaagaaagtgaccttcttccaggtggcaagctggaagctttggggaatcctcctactgttcgctctcagcaggattctccaaacctgggatctcaaggtcggggtgggctgccttgcggagcaggggagggaagaagggcaggttctgctgggtttccacctcagtgcagaaaccccaccaaaaactcctccgggcagcctggctgtctgctccaactgctctgctgggtatggcgaggaggcgccaggagacacagctgctgagggggccgcggctgcaggcgctgcaggggacggagtggagccgttcccgggggcagagggaagaggctgcagtcgtccagtcccagagccccgagatggcctgtggctgagggagcaggtgggcccgggggaggtggcgggccgagagcggagctgcggcctcgggatcacagcccagtcccagtcccagtcccagtgtgggtgtacggccggaacgcccggaggcggcggggagaggggagcagcttcagcctagtcgcaggagcgcggaccgagcctcggctttggggagaggggtccagcctccattcccgccccgggggagaaagcttcggcgccggacccgggggaaggctgctaccccagccgcggcaggatggcccatccccaaccccgccccactcccgctcccgctcggggaaggtgaaagcgcccgagccgccgaagtctccccgctcgctcctacctgcgggccgggcaccaggttgggttcgtcatcctccctggggccgtcgtggtcgggctccgccggcgcctccggagggcctgcacccgctcccgcctccaggcttggcggcggcgggggctcgggcgcctggggcttctgcggccccgcggcccgagcccgctcgcgcctgcccgcaccgccgctcggcctgctccgcctccgcgtcatgccgccgctcgcgccgctccctcgctccacacgccgccgccgccgccgccgccgccgccgccgccgccgccgctaccgctcccctcacaggacaacagccaatatggcggcgcccggttccccccctccgcctgctgccaacaggtcagagggcacgcggagtccgcgccgccgcactagcccccgaggccgcctgcgccattttgaataaggtcaccacccggagttcgctgggagaaaaacttggtggggagacgcccttccccccctacgcgggacgggaaggatgcaacctgctggaggaacgcgtgtaatgcggtggtaatcgcgctgcaccaccctagcacttaataattgcctgttaaatggatgagtgaattaatttctatagtgttacaatactttcacacccatcgtctgactccttccgacagcacagcgaggcaggtacggatcattcccattttgcaggtgagaaatattgaggcaacataaaggcctggaaaaggttgctgtacatcattttgttggaactcctgggctcgtggacggcctgagttgaaagggacgaaggtctttatttgcaacatatggtctactgggagtccagcgttctgtgcttgggacagtgggactcaaacccgactccttgttcccgagtctgatggggaaggtagacacgtaggtacatagttacaaccggtgtgataacgatgagacgactaggtgtttccaaaaaaatagtatgtgcaggagaggattttggagtggtacacaaaggagaatttttaaaacttaataattatgtatttaattgttaaaaatggaatttcccccctctttttgtgaatatactgtataatacatgtacatggcacagattaaaaaaaaaaagttttgagtgaagtctgtctcatgcctgggctatgtactctgaaattgtggttatatgcagagttgctattggtatcaacaggggcggaatcctgacactggcttcctaacccatggggcaagggctattttgaaaggaagagctacatggaaggccctggagctctccttaactaccaagaaaataaatcaaaaatagtaccttatctcacccagggattaatgccactatcaaagatttgaaagacgcagggtgagtcccatcacatcaccattacctcttcagtttgcccagaacagaagagagacggccttgaagaacaacagagcattatgataaacttacttattctggtaagaaccccaactgcaggcattcttccagatgcggtccttcttgggacagatcagcacagttgttggtctctaataggcaacaagaggtctggtcaatggttattcttctgtaccaaacaccaggaatcccttgcattgatctggcaggggcagcggtaaaccctcactgtcttgcttcagggtatgtcacactctggacccagccacttagtttacagggattttttttttttttttttttaatgacagagtctcactctatctcccaggctggagtgcagtggcgcaatttcagctcactgcaacctccgcctcctgggttcaagggattctcgtgcctcagcctccagattagctgggattagaggcacatgctaccacgccccctaatttttttgtatttttagtagagacggggtttccccgtattgcccaggctggtctcgaattcttgacctcaggtgatgcacctgcctcggcctcccaaagtgctaggattacaggcggagccactgcaccctgccagtttacagggattttttttactaaatctccattctaatggatatcaggctaatctgctgaggcactgatgacatcatcttgatggaccttaagaaaagggaatagcagatatcctggatgatttggtaaggcatgatgtgtgtgccagaggatggataataaatctcacaaatatataggggcctcgcagtaagccatctaggagtctgggatatgttgagatatttcgtacaaagtgaagggaaagctgctgtagatcacactccctactagggaagaggtgcaatacttgggctggggcttctttagacttg

SEQ ID NO: 317933 - DNA, 4001 bp, Homo sapiens
cactgaagagggttctgtacagcaaataagccctgccactcaaggtgttaagtagtccctcatcagccaagtgcctgcgatgattgcacttatttttacacgtttgacctagtttcaaaccgtgtctcttcatgctgtgattcattagccacattttaaaccatcccaatcggagcgaggtgacactgtctggtttgtgccagagtctcagatacaatttctcactggaatttaatatgcaagtctccctggaattctgttttaagaagcaatttcccatcctggcatgctgcttggatatggatgagtggctgcctcattcctaggtagtaaatatgtcgattacagaatttctgcccgggatgaaaagagggggattcttgctagcctggagactgcaaggggtccctccacccctctgttccccatgcagtattcaggcttttccaggtttctgacagggctgggagttcgagctcctacactgtaaagtttgaacaacgtcagtgttagggctgtctaagttgctagggcaaatgcagtctgctcaacattcccccacccctattcctatgtcccctaaaaatttaagacatggtggatatggaagtaaggtctcaaacttgtacagaggggcaggacacaaatgccatttttgaggaaactactgaaaaagagacacacatcagagaagcaaaatgttattccatgattctatcgctgtatgacaaaagaggtggtttttaaaatccaaatgacagaaaggagacttttctgaatatgaagctgctgcttgtttctcactccatttcaggttatcaatcattcacatcggtgtgatttcccacagatctgataccaaagggggctagacaccatagcagaaaaaaaagatgcttctagtcagaagtaaaacactgtcatttttcattaacagccaaatgcaggtaacttgtccaaacttcagtcacattgcactacaaatcgtaccaaaaggcacgcaaccgggtttttctacgtggtagtgagaactaagaaattaacaagctggtaaaagtaattttgattgatcagtgaactacaacacaccgaccaactcctaatgaaaagataatggtttttttcataaaacagccactctctctagatggggactagaatccccctccctttttatcttttaaaatgaagaatggaagtttctctaaacaaggcttaagacaattcatccttttcaaggcaattccaggcaacttgagatccaaggtttgtttttctttgctttttttcccccttcaaattcaaatcaagccatttgaaataacaagcattccatatccatgcatttggggcagcctgcagttctgacaatggtggattttccactacataccaccacacacacacatacaagctcccagtctcactgttgatttaagccaaagctttaaaagtaaactattgtccaagagacgatcgcattttctctcagaggatcatcgatcataaaaaataaaacctacccacatctcttaccttgaagcagtggaattacctgcagaggatggtcccccttccttgcacaatgagccaggctttgaccagcagcaaaattactccaaaagaaggaataataagtccttcatattgtaattttcactgtttatatgcaagaagtgtagtgggtctgctcacgtaggaataaataaaaagccgaacaaactgctcggcagctaccatgtgaaaagaaaagacctctagtggccacaggctgaattctttaaggaagggagaggagagatggagcagaggaaacacacgctcctgtgtgtgtatagacacacacacacacacatatgcaggcacacacacatgcatatacacacactcctacaccccacaaatgctaaggtttctcctttcttgcatttggcctggctggaggtagaaacgagaataatggttatttcttgatttaagtgggagctggttaaattagcagtgacggcggtgttctgtctagtttgaaagggataatttcacacactcactaccaccccctgggggcctgagcaggaaaaagaatttgactctggctcttcaaggagttgcctgccacccagtgtagaggctacaagttcccatcaacaaagcatcatcagccattgtccctgagagtcccagctttgtgatctccgccggatttgcatgttttctagtcatttacggtgtgtgggtgtggtggtcacttggcagggagagccagcttcctgggtttgtaagcttcgtagtcatgacagaccccttgcttagaagggctccatggctgtttcaaaattctgaatagttttaaacaagggctttgcatttttactttgttctgggactcactaattacatagctgttcctgctgacaaggaaagcatgctatccctaacttcccaattgaaaagaacctagaaacaaatgaaaatccatatcatgggagctactttcgggagtataaacttaagaaacagttttccaaaaggcttcctgtttctctaccactagaacgaaattgtaaacctgggaggaaatatatacacgtgtatatatacatacaggcatacctcgttttattatgcttcacagatacctgttttttacaaattgaaggtttgtggcaaccctgcattgagcaagtctcttggcaccatttttccaacagcctgtgctcacttcgtatctctgcatcacaattcggaaatccaagcaatatttcagatttttttcattattattatacctgttatggtgatctgtgatcggtgacctttgatgttactattataattgttttagcacactataaacaaacttcactatggcaaagttcactgttgtctttttttaagaaattgccacagccactctagtcttcagcaaccaccaccctgatcagtcagcagccatcagcatcaagcccagaccctcccccagcaaaatgattcctatttactgaaggctcagatgatcattagagttttttagcaatatttttaaattaaggtttatgttctcaaattaaaatttatatttttttaaacataatgctattgcatacttaatagactacaatagagtgttaacataacttttatatgcactgagaagccaaaacattcatgcgactggcttgattgtgatattcactttattgcggtggtctggaaccaaacccataatatcttcaaggtatgcctgtatatatttcatatttgttattttattaacaaaagaggaacttttttatataaaaaaggcagcagtttatggtaaaaatgcttttttttttttttttggttcaaacataatacttccagccaggccatcttccacaagcccgtgcttggctggaccacagtagaacttcatttggccaagatggcagccccagtggaaacttgcaagagacagtcaaaaatgacttctcacccctggtggattcgtggctagtgctttgtttaccaggttccagaatagatctccctgaatgctgcttgcagacacagaaaactcaccctgatatggactgataaatctgggaaagaggaagcagaaaaggctatgctgatgtcttctggtgcatgaaagggtgtggttcctcctctgctcagagggtctcctctctgtgtccctgccttgatttccctcttctttgaatctttctggtacttagttggctttgccaattgagggtcttactctttttctctcatgattaatctcgctttcccaactagatcatgaactcacaaagagcaagagccatctcttctcatttctttcatccctctcagctcttaccaagtggcaggccccaggaggtgctgggttgccactggctgattcctggtgatccaactacagattccactgcagagaactttagtgcatttcaaggtgctaaaggagccacctgattcttttgatactgctctagaggtagattcagatg

SEQ ID NO: 317934 - DNA, 4001 bp, Homo sapiens
ccagcttttcatgaggcatttggacaaacagcaaactcccagccacctctaggatcaagtcaagacagtgaatttgtgtttttctgcattttaattgttgggatgtggccacacacagtggtaattggaacaatgcaactaccaccacgcaactgatactctcagcctgagtttcctaaaacaggccaggctgcgagggggaacagaacggaagccataaggaatcaaaccaggacacaaaagaaggcaaaccagctccgcgaggggcctcctctttctcaagcaggcattgaaaaaagtgtaagaagccctctcttgccgccttccttccccttccattttgtgtatctgaagggtagagacagccctgaatattcactaaacaagttaaaacttctcagtttaacaactggcacggggctcagcccttcacagagcagcaggccgctaggccctctcagcaaccccaccagacctaactctcagtccaggctttccctccaccagcagcccccaaaaataaagatcagacccccaccccatctcctattggatggcagtaacccctgacactcctgtttcagggatgctgaggttgtgctgtaccaagacaaggtaggatcaggtcaggccaacagggaggagagtcacaaaccctttggggaccttcccctcaggtcccagccccacacctcctggggagactgaagaaaaacatgaggaaggcagggagctgcatgaacaggtaggtggagatctgcctgctcttcttccatatggttctggtggggaaaggggtgacaagtggggaacacccctccccccacccccatgaagaagcaaaaggctaggcccctccaatcttcaacctctccctctgttgccctgcctgtccccgcggggtggggcatggggcgtccgctggtccccggggcgggggggggggtgcgccagggctcgctcaggggggctgtcgttcgcctcttcccactaggttccatcatctggccgcgggaagcgaactcaggacgcaggggatggggagggtctgggacttagcactccgccaccccctcccccaccgggtcccgtgctctccccgcagaggcggccagcgaggcccggccgcgcgggcggtcgggctgggggaggggaaagagggaaggagggagggacggttgaggtgcccgccccgaggccccagcgccacctgccctccaccacctaccgcggttcctccagctcccagggccgcggccggagcagctctgagcgctcggttcgccccacggtgcccttaaaaggcgctggcgcgaaccaacgagtccctgaggagagtagggggacagctccggctcgcagaatccccccaagccacccatggagggcgcagctccgtgtcgtgtctctctcaaagtgtctctcggacagcgctgttgggaacgagcctggcgctttgatttagggatgggggtggtttcctcactaacgagtcaccccctccaaaatatcgcagaaagtggacggccccagttggaggcacatcttgaaacccgcgggggaggccatgtcggaagaaggtaaacaaaggcatcgcccctgccctccctccctccaacggcccaactgcagcctcccactcggttcgggccgcgtcacgcaattagccacagtgcccctcacctgctctgctgccccgccctccacgaccacctcttcgaaggaatcccccttcccccagcaaaggacccgtccgcggcgtgaaggctgctgggaagtgtggtccaagcgcggattagggcctgctcggagtcccaggagcccctcttgcagctgccggatcggcctgaaccttaaaaacccaggacttataatggttgcggggacgtttccacttggttctgtaatttgccctcacccagaacactttgtaaagctcaggatagcccagggctgttcactccctctcttctctctccgccccctcccccccagcaggatgaggtaatgggattgtgattatgacatcataggcggttcagttgcttgcgtttgcctggggggaggtgcggggaggtggggagaagtgcggtggttagactttccttaaacagaaagggaaggaggaaacaggcagatggggaaaagatgttgacggcgctatatttccacttcaggaagacaaaaccaccttttattaagtctccaccactaccaccacctcccacatgagccaaaatttaagtcttttttaaagagattgaatgtagacgttagtgtgtgaagaggttgggttgatggtttctggctcttatgtaaattcgagtctcagctagcatcacagatggtttagggagacaagcaaaaaagtggataaaggagaggctttaaacaatgcgttcgtgttgtgatctctttgtaatacaaagttttctatttcttttttttaattgattggaaagtagcagtaatgcaagtaatcttcactattacacttagcagcaagtcctctgaaagacatctgttttctgtaaatattttgtgccttactcaagactgggacaggtaaatagctgtgatcagctggaaagtagagccagtggcgggggtcgtcctcactgagccagggaggggaggaggcaggagccaccaagtctacaaactgaaaaagagtagaggaaaaatgaggtacagtactaactgagaaaataggggtggaaagatttaccttgcactgcttatttccccttggcaaaaggagcagagttaggggccatgaagtaggggacacatggtttccaataattgctcttatgtaccagacaccatgctacatttttttttttttgtaaaaacagggtcttgctgttgctcaggctggagtgcactgaggcgatcacagctcactgcagccttgaacttctgggctcaagcaatcctttccatctcagcctcctgaatagctagaactacaggggtgtgccaccatgcccagcatatttatttctatttttgtagagagaggcgtcttgctatgttgcccagggtagtctcaaactcctggcctcaaacaatcttcccatcttggcctcacaaagtgctgggattggcgtggtgtctcacacctgtaatcctagcactttgggaggctgaggcagacggatcacctgaggtcaggagttcgagaccagcctggcaacaaagtgaaaccccgtctctactaaaaaatacaaaaattagctgggcattgtggcgcccatctgtaatcccagctactcgggaggctgaggcaggagaatcgcttgaaccggggaggcagagattgcagtgagccgagattgtgccactgcactccagcctgggcaacagaatgagactctgtctcaaaaaaaaaaaaaaacaaatgaacaaaaaacgaagtgctgggattccaggtgtgaaccaccacacttgacctacatactttgatatatattctcattttttcttacaatcatcaaatgaaacaaaaccttctctttgacaaatgaaacagcccaagaagttaagtgactgcccacatggtaggcaaaggtactctcaaaaagcagtctaaaagcccttgcttttcaccactaagctgttcacctttttattattaattaaattaataatttaattattatgaattaaatggttgagttaaaagtaggcattggctcatttgcaaaacattgaaagaaactgagacccaaaacaaaacaaaaaaaacaaaacaaaaaaaaaaaccctgcaagtcaagtttcaggcctcatttcaaaggaaggttacatcccctttcgtcatctataaaatggcctcccagtgcagcccaacactcctacccataattaaatctccttattccacttttagttcccaaggattttttactcatgtcctgctctttccctgctgccccctttttagtcttttgttcttgagccactgctttgaactgcatcttaattatgccctcatgg

SEQ ID NO: 317935 - DNA, 4001 bp, Homo sapiens
gggtccatctctctggctgaataccatcctccctcacctgcacactaagaaaagcccaagagggctcttccttctgtgaccttgggggcagatcactctacaaaaaagaggaattatctctaccccactcacaccttagaaggagggcacaaggaagagcaaagagataaacctggatgtacctggagttctctggaagaaaggtgcaagagaagtcaatcatcattacagttaactatcattttcatgcataattattaccaccctgaacaaaattctagcttccggggagctctcttcagctgcttcccctatattcttacgggagaagctaaagcttatatcacttctgctcttggtttcttaactctgctgccctcaaagatcaaccagagagggaacctaagtgcaggattttaccctagagaccccaggcctcaggctaaccagctatgaggagcagggaatgaagcaaactctccagcttttcatgaggcatttggacaaacagcaaactcccagccacctctaggatcaagtcaagacagtgaatttgtgtttttctgcattttaattgttgggatgtggccacacacagtggtaattggaacaatgcaactaccaccacgcaactgatactctcagcctgagtttcctaaaacaggccaggctgcgagggggaacagaacggaagccataaggaatcaaaccaggacacaaaagaaggcaaaccagctccgcgaggggcctcctctttctcaagcaggcattgaaaaaagtgtaagaagccctctcttgccgccttccttccccttccattttgtgtatctgaagggtagagacagccctgaatattcactaaacaagttaaaacttctcagtttaacaactggcacggggctcagcccttcacagagcagcaggccgctaggccctctcagcaaccccaccagacctaactctcagtccaggctttccctccaccagcagcccccaaaaataaagatcagacccccaccccatctcctattggatggcagtaacccctgacactcctgtttcagggatgctgaggttgtgctgtaccaagacaaggtaggatcaggtcaggccaacagggaggagagtcacaaaccctttggggaccttcccctcaggtcccagccccacacctcctggggagactgaagaaaaacatgaggaaggcagggagctgcatgaacaggtaggtggagatctgcctgctcttcttccatatggttctggtggggaaaggggtgacaagtggggaacacccctccccccacccccatgaagaagcaaaaggctaggcccctccaatcttcaacctctccctctgttgccctgcctgtccccgcggggtggggcatggggcgtccgctggtccccggggcgggggggggggtgcgccagggctcgctcaggggggctgtcgttcgcctcttcccactaggttccatcatctggccgcgggaagcgaactcaggacgcaggggatggggagggtctgggacttagcactccgccaccccctcccccaccgggtcccgtgctctccccgcagaggcggccagcgaggcccggccgcgcgggcggtcgggctgggggaggggaaagagggaaggagggagggacggttgaggtgcccgccccgaggccccagcgccacctgccctccaccacctaccgcggttcctccagctcccagggccgcggccggagcagctctgagcgctcggttcgccccacggtgcccttaaaaggcgctggcgcgaaccaacgagtccctgaggagagtagggggacagctccggctcgcagaatccccccaagccacccatggagggcgcagctccgtgtcgtgtctctctcaaagtgtctctcggacagcgctgttgggaacgagcctggcgctttgatttagggatgggggtggtttcctcactaacgagtcaccccctccaaaatatcgcagaaagtggacggccccagttggaggcacatcttgaaacccgcgggggaggccatgtcggaagaaggtaaacaaaggcatcgcccctgccctccctccctccaacggcccaactgcagcctcccactcggttcgggccgcgtcacgcaattagccacagtgcccctcacctgctctgctgccccgccctccacgaccacctcttcgaaggaatcccccttcccccagcaaaggacccgtccgcggcgtgaaggctgctgggaagtgtggtccaagcgcggattagggcctgctcggagtcccaggagcccctcttgcagctgccggatcggcctgaaccttaaaaacccaggacttataatggttgcggggacgtttccacttggttctgtaatttgccctcacccagaacactttgtaaagctcaggatagcccagggctgttcactccctctcttctctctccgccccctcccccccagcaggatgaggtaatgggattgtgattatgacatcataggcggttcagttgcttgcgtttgcctggggggaggtgcggggaggtggggagaagtgcggtggttagactttccttaaacagaaagggaaggaggaaacaggcagatggggaaaagatgttgacggcgctatatttccacttcaggaagacaaaaccaccttttattaagtctccaccactaccaccacctcccacatgagccaaaatttaagtcttttttaaagagattgaatgtagacgttagtgtgtgaagaggttgggttgatggtttctggctcttatgtaaattcgagtctcagctagcatcacagatggtttagggagacaagcaaaaaagtggataaaggagaggctttaaacaatgcgttcgtgttgtgatctctttgtaatacaaagttttctatttcttttttttaattgattggaaagtagcagtaatgcaagtaatcttcactattacacttagcagcaagtcctctgaaagacatctgttttctgtaaatattttgtgccttactcaagactgggacaggtaaatagctgtgatcagctggaaagtagagccagtggcgggggtcgtcctcactgagccagggaggggaggaggcaggagccaccaagtctacaaactgaaaaagagtagaggaaaaatgaggtacagtactaactgagaaaataggggtggaaagatttaccttgcactgcttatttccccttggcaaaaggagcagagttaggggccatgaagtaggggacacatggtttccaataattgctcttatgtaccagacaccatgctacatttttttttttttgtaaaaacagggtcttgctgttgctcaggctggagtgcactgaggcgatcacagctcactgcagccttgaacttctgggctcaagcaatcctttccatctcagcctcctgaatagctagaactacaggggtgtgccaccatgcccagcatatttatttctatttttgtagagagaggcgtcttgctatgttgcccagggtagtctcaaactcctggcctcaaacaatcttcccatcttggcctcacaaagtgctgggattggcgtggtgtctcacacctgtaatcctagcactttgggaggctgaggcagacggatcacctgaggtcaggagttcgagaccagcctggcaacaaagtgaaaccccgtctctactaaaaaatacaaaaattagctgggcattgtggcgcccatctgtaatcccagctactcgggaggctgaggcaggagaatcgcttgaaccggggaggcagagattgcagtgagccgagattgtgccactgcactccagcctgggcaacagaatgagactctgtctcaaaaaaaaaaaaaaacaaatgaacaaaaaacgaagtgctgggattccaggtgtgaaccaccacacttgacctacatactttgatatatattctcattttttcttacaatcatcaaatgaaacaaaaccttctcttt

SEQ ID NO: 317936 - DNA, 4001 bp, Homo sapiens
cctcttgaatagctgggactacaggcgcccaccaccatacctggctaatttttttgtatatttagtagagatgaggtttcaccatgttggccaggctggtgtcgatctcctgacctctggtgagccgccttccttggcctctcaaagtgctgggttaacaagcatgagccaccgcacccggcctaagcctaagtcttgctctcatttcttgccaagttccatctacagcaccccttcaatggtcactcagttttggttgagcaattccagtaccagagaaagtactgatacaattcctcatccttggacattgtattttacacacttatttttacgtgctctgcaggacagatttccagaagtgggattgcacagtcaagggatacactcactttacattttggtgactactacgattgtgcacgtgcatacacacacacagggtgtgctgattgacacagaaatcagtgcctggtagtcacagggagacagactgtgactcaaatcgaagaaagacttcttcattgttaaaaatatggcacagcactttagtggatgatagtgaaacctcatctccactaaaaaaaaaaaaattataaaaattagttggacgtggtggcaggtgcctgtaatcccagctactcagaggctgaggcaggagaatctcttgaacccaggaggcagaggttgcattgagccgagatcgtgccattgcactccagcctgggagataagagcgaaactctgtctcaaaaaaaaattgcacaaaaatctgtacagtctccagttgcacattggagactcagaagggttggagggggtgagggatgggaaattacttagtgggtacaatgtatattattcagatgatggttacactaaaagcccagacttcaccagtatgcaatatagtcacacacacaaagctacacctacaccccttaaatttatacaaataaaagttccacaacaaatcagaccacctgggttggggtattaagtgttcaagaaaagactgacgatcaggatggtgtagaaaggatttcaaccctgggtgtgagaccagagtagctgatacctaaggtctctgaaattcagccttatgggacacacaagccctcccacctcccagtgtggtaagtcccctagtagtggctcatttggtcctgagcccttgcacatgcaatactttttccaggtgggcctcagaaggcaccaaaggctttgtaggactggctttgaactgctcccccaaagaacctgccccatgttctcgagcctttgagaggcttaccactaggcttttgttgtcttcgggtggtgcgtccccagatagaagtgttggggtactgcagtaactctctactggtggcctcaggagatagacaagtttttcccaatagcaaaagagatcttcccgtgtgtcagaagagggacacaactgcagataaaaagtacggccagtggcgagtttcaggcgcagctgctgtttctcatgatcgtggatggagatcttcacaaatttcaagggaagcagtctcgtgagctctagagtcttgacgggcctgcgacctctccccttggcaaaccggccccatctgacatgctgttcacagattttagttggttgggccagaaccatgacgtcaggcagtgggaggatggggctggtgcagacgatgcccactgtcaccattcggacacggttgtgtacatcaatcacctctccctttttgtttatctgaataaaattactctcgaacattggtgcatacttgaaaatgttgtactctcctctgttgtacaattgtcgttgcaggtcccccatggaggttttgaacgcactcattgaagagtagctgtgggctgtgtaataaggtaaacaagattcattgctcatggttctcttcgtttaagacagctccaccagccacaaatagagtccccgagagagagacggagagaaggtaactgcccatctccctacaggacttctgcctaaatctcctggcaccaccacatttatcccctgcagtcctttgtgacctgtgcgcatctcacacccctttgtcctagcctccatgtagctatcccctctggtcagtgtcaccagcctcccccacaaaacaaatcaatgcctccacaggggagaggctgaccctgcctggggtgtaggtgtgggtaggctgggtgttcttttcaatcaaaatgctgggacacataatttatgaaccattctgcttttataaatatctgggttgtttccagttttgctgttgttacagttaccccttcaaggatcatcttcttgcaaaaatttttttgcttgggctgaattacttcctgggggtaaaatcctgggtgtgtatggtgtgcttgctaagggcaggggtgctgtctagatgctgatctctgtgtctccagtgtgtaggtagcacagtgccagcaggcactcagggataggtgttgaatgaatggtctgaagggactcctgctccccatcagaactacagaaccagggttccatctgtgtgctgattttcaggatatggaggattttctcacctagtctctcatttgaagcagttaattttttttttttaatggagtttcactcttgtcacccaggctggagtgcagtggtgcaatctctgctcactgcaacctctgccatccaggtttaagtgatcctcctgcctcaccctcccaagtagctgggattacaggtgcccaccaccacacccagccaatttttgtatttttagtagagtcaagggtttttcaccatgttagccaggctagtctcgaactcccgacctcaggtgatccaccctcctcagcctctcaaagtgctgggattacaggtgtgagctaccccacccggccggaagcaggtttattttttaaaacatcattttaaagtgagaaaaccaaggctcaggattgtcttacttgaggtcagagtccaaagctggattctaggtcagagctttttctcttcctcaagctgcatggctcactgataatctcattctgcatcagagctagtgtcattggtagttagtgatgtgtgtggggatttactgggaaccacaggaattcttggaggtcttgaatcaccgtaggatttcccacactgatatgtctgctgcttcagtcttgatgcctgcttgataaaccactgacgttccgtttctttttaaagctcttctgagaaatggtggcaaagacatctttctggagtttttgttttgttttgttttactttgctcaaggtgaagaatccaaattccccctcccccagctagagaaatacttctgaaataaacatacattccgccaaactcaatcattaccatgtggaggtcttgaaataaacttcaaccacaaaatgttatttttgtatcccccagtgccaactgcagtgcctggcacattgcagcttcgcagtaaatataaacttgcttgtgcccattgagattcattcttccatttatttattcaaaaaagtttaatgagcaagtattttgtttgggaccagctagaaagtggaaatgcaaagataaagtttcctatctctgaaaagctgaaatattttttctaaagatattgaatgactttttggggaaaaaaaagaaaaaacaaagtggcatatattctgttataagggaatcataactaaaagtcaacacaattatgttaaaaagtaagaagttggagctatatatagatgtagccatatattcttctcatatgttcatttctgatgaataattaataatgacagaactataattgtatgattgagaacctgctataagccaggcatgctgttgccaccatacattcttctaaacattttaattctggctgggtgcgttggctcacatctgtaatctcagcactttcagaggccaaggcaggaggatcacttgagaccacgagggagagatcaatctgggtaaaacatcacaagaccttcagctctacaaaaaataaaa

SEQ ID NO: 317937 - DNA, 4001 bp, Homo sapiens
tgtaaattacaaggtgttaagagaagtgcaaaaaaagtctaaaaacactgctttaaaaaatgttctttttaacggagaagatacgacaagttctaataaaggaaacattctatttagctataccggttttcatgttagagataaagataaagtctgcaccttgagtttatcatggttccttttgaatcatcataaaacatacataatgatcaacttaaaagaattttagccccatatattaaaaatcagtctaattaatgaaattgtaaattgaggtcatttttcttttcagcttgtgttttcagcagccattttgccaagacagaacaaacaggaaatgtgggagaactattcttccagaacttcttaaactctctaagcactctaaactttaaagaagctgagcaaagtattctacttttaatgtgaatattgaaaagtacttgctttcttttcttggttattgtctgagccaggaagggggccatcaggttcaactggctgttcctctgcagtcgcagttggagaggcacttttgtttacatttgtatctaggtaaccagaatgctgaatcaggtcaggaactatgacaagtgaatttttgcagtgctgctaatttttttttaattgagggcagtttctgtacatatagcttggcttaaagggaggctttcaatttgctttacatttcccctctcctcacttatcccaattctcccccatccccccataacatctatagttagctagaagagcatttctttacagatacttctataagacctttagaaacttttttaggatcagacagctctaaaataatcaggaatgtattttttttaaattatactttaagtcctgggatacacgtgcagaacatgcaggtttgttacgtaggtatacacgtgccatggtggtttgctgcacccatcagcccatcatctacattaggtatttctcctaatactattcctcctctagcccccaacccccaacaggccccagtgtgtgatgttcccctccctgtgtccatgtgttctcattgttcaactcccacttgtgagtgagaacatgtggtgtttggttttccgttcctgtgttagtttgctgagaatgatggtttccagcttcatccatgtccctgcaaagggacatgaactcatccttttttatggctgcatagtattccatggtgtatatgtgcggcattttctttatccagtctatcattgatgggcatttgggttggttccaagtctttgctattgtgaacagtgctgcaataaacatacgtgtgcatgtgtctttatagtagaatgatttatagtcctttgggtatatacccattaatgggattgctggatcaaatggtatttctagttctagatccttgaggaatcacctcactgtcttccacatggttgaactaatttacactcccaccaacagtataaaagcgttcctatttctccacatcctccccagcatctgttgtttcctgactttttaatggttactattctaactggcatgagatggtatctcattgtagttttgatttgcatttctgtaatgacaagtgatgatgagctttttctcgtatgttttggctgcataaatgtcttcttttgagaagtgtctgttcacatcctttgcccactttttgatggggtttttttttcttgtacatttgtttaagttattactctgttgtgcccaagccttctgagggtcttcattgggattcattattttgtttatatgtaataagaaacagaagaaagatagtgaagtaggagaaatttagagacctcgaatagtccataagtacctgaactcatgatgcttgcttttccagctttattttttgtagatttgatatttttgaaaaacaatctctgtgatttttttcttttttctgaggaagccaatgtaccaaggaattgtaattgcatcctaactaaggtcttcctgtttctggggcctcttcccaagggtgacttagtagcattgtgactgcaggaaggatctatgatgtcagtgtggctggccctcacaactgaagtcaggaaatccctgggatttagaagctttgaatgttttctgtagtgctcatcatcatacaaatcactaagcctttcacttctttgtctcatggggtgggaagtggccattgttatactgatatttcacactcttctcctgatttcatcttcacagtttgaaaagtgacgagttatcatcaagctagacaaagaggaaatgaaatgctgcggtatgcccaaatctttctccaagtatgttagggaggaagctaactcttctaggttagaaggggacttcacagatagtgcagcactgatgaaaagtgacatgggtcagagttttacagaaatgaaaatattgaactttgcctttgtaggggaaattttgttcagttatttagccaaaagggggtggattgttttagctgtaaaatgtttgtctgagttttaaaattagaatttgcatgtttgttagtactacttggcctccatatacagaaatgatgctttggctaagttgttgtccaaattatggtatcagatttgccttgtttaaaggcacacaatgttcaggatgctgagtgacaaactttgatcccacagataaaggacacctatgatttgggcttccatgcatatcccctagtcctaagctaagcccttaaaactcaaagatgcagtagttcatggtttgcaagcagtccaaaaggctcattatgctaccctaatcaccattgtatctagtgccaagggagactgacacacagcagtgactaagagcaggtggctacagattctgagagagtggattggaaccctgactcctcaacctaccagctgtttagtttggacaaaattacatcacctctttaagcctcaactttctcctctgtgaaatgagctaataatatcgatcccataagatggttgagaggattaaatgtaataatatacttacagcgctcagctgagggcggtgccaggaatccactaaaagataactattattagcgattatttcacaaggtgccaattatccaagaaacagtcacaagcagagtctgtgtgagaaagaaaaactagatttaaccttgcttaacaactttttaagattctttctcttcttaaattcagcttttaatccatggtatttggttagaaaaatgggccctactaaaatggacaattttggtaggtttgttctctaaacataaatggctattcaattttaacataacaatgcacataatatatatgtatattattaatgtctgctctggtttgaatctctccaccaaaactcatgttgaaatgtaattgccattcttttttttttttttttgagttgtagtcttgcactgtcacccaggctggagtgcaatagtgcgatcttggctcactgtaagcttggcctcccagattcatgccattctcctgcctcagcctcccaaatagctgggactacaggtgcccaccaccacactcggctaattttttgtatttttagtagagacagggtttcatcgtgttagccaggatggtctcgatttcctgacctcgtgatctgcccacctcggcctcccaaagtgctgggattacaggcgtgagccaccgtgcctggcctattgccattctaatagtattaggaagtggaggctttaagaagtgattaggtcatgagggctctctcctaatgaatgaattaaagcccttattgtgggaatgagttagttatcataggagtgggctcctgatagaaaggatgagtttggcttagtttatctctttctgtcttgcattcttatttcccttcttgctatgttatgatgtaatataaagatgtatcctctcaatcttggacttcccagcctctggaaccatgagccaaataaatgcccagactatggtattctttttttagacagagtcttgctctgttgcccagcctggagtgca

SEQ ID NO: 317938 - DNA, 4001 bp, Homo sapiens
gtgtcatggtgcccaaaatatatgaacgcctccaagactctcctaagctcctcgttagtgaaatgtgggacatgcctcacgacatatttgcccaattttataatcagaggaaatgcttgactttgatcaagaaccaccagggcagtgagcatttggctaatcaatttaggactcaggttggaaactattgatagggaaaagttgtttatcttatttaaaaatgtttggtgttcatccactttttcagtacatgcctgcaagattctataaagggccacaatatcctccggggtaaatgtttccaatttttcaccttgaagttgatttataatgagttctagtgtcacacaacctgaactgtgcagtgtaatcagactttccccaagaatacaaagattgcgaacttccatgccaccttttctgagacgattttggcattctgccaccaggttcagcaacaggctactttgaggatccacatgcaacagaatcagagcttgcaaagcagtcactaaactagtgtttgacagctgtgagggctccttttcaaactgaaagcataaagcttgaaagatgctattctccagtatttcttttggcagcccttgatcaccatcctttttttccacttcacaaattcgttgtaaagctcctgctgccatagtgtcaggcagggtttccatcgtgcttataaaacttagcacttcttctgatgaagtcaagttgctcagtctcctgtaaaacatctgactctcctcatttttaacattttgttcaagcctgtcgcagtcagatacttgagagaacactggtccaccgagtggatgaaggtcatttccatttttcgaatgaaactttttacaatgggcatgatggaatttgaccccgaaaggctcaggttgtcgtgaacacaaccaagggcacagacgctccttgactaccttgtgaacatgatttagaggtttattttttaaagcagccagagctctatgcatctgaaaatcagataaacgataaaggttcttcctcaaggtgattaatgccataccatcagattctcaatttgataactaaattaaaaaatttaaaaacacatggttaaatacattgagaacatgattgacccaacatcaatgtttatgaaactacaaacgagtatctggaaaaaaaaaaaaaaaaaaaaaaaggatggttaacatataaacaccagaggggcaaagtctctgcatcctagagttagaagagtggctgacattgaacaataacaatcgctattacttgctaaacactgttgtaggtattctattaacttacacagattcagtacttttactatcattttacacgaggaagaagttgaagcacaaagttactttgcccagtttatgcaggtggttaagtggcagagctagggttcaaactcaggcaatgtagctcttaagggtggcccttaaatgttggttgaaggaagaaattgcatttggatagaaatcaaagaacaggtaaagtgggcaaaattaggcgaggttagagcaaggcaagggtaaaaacgcgctggaaaggccctaagctgttggtttcccctcggtgtcgggagaaggttagtgttgaaggaaagggtctactttgtcaatggaaacaaggtaggaaaagaaaaagcaaaacatagatcaatgaagggagaaggtggggcggccagtccagatctaaagacggtgcggggggatttggcaacacgtgtgtgcaagacagacagacgggaggccccgcggcgcgttttcctaggaatgaaagggacccgcggggcgagcacccccaaactcggcgccccggggacctgcgctgagacacgggccgggcggcgcagcctgaggagaaagccggccaggtctttgacacccagccggaccaactgcgcggagaccccgcgttgacacctaccgcgctctgccgggcaatcactccgggtggtcgcggaagcgcctgggcgtcgtgggcctccgtagcaaacgcggggcgggagcacgactcagggcggcgcaatgtgattggcccaggtccccttcggagctttctattggtcctgggtaccgagcatgggcgctgcgtcagtgcgcgctggcgcaaggttggtggaagtcgcgttgtgcaggttcgtgcccggctggcgcggcgtgggtaagctgcctgtcggctacggttcccggattccggccgctcgccctgcactaatctcctgggagaggcggcccggggcgggggtgggcagccggcttgcgcccgtggttcccacgcccttcggcctccgggggtcgccgcgggcgcgggctggggctcggacttggcctttggcctttggctttggtgtccccgggagcgtgtccttgggctcggcgtcggcctctgccgcgggaggcccctgggcggcgtggggtctctcctcatgttctgcctttggttctaggcgctttccaggcctagggaaaccgcactcggggacgcggggaactggggaacatgccgggttggggcggcgcgctccggggaacccgggacgttccgagcgcccacccggcgggacgcggccgtgagttctgcccgcggccgtgagctctgcccaccgcctccgcgccgcttccggggctgctggggcccgggcctccgctgagagtcgtgggaaggtggtgccggattgtggggcagtagcagggatgaggggttgattgatcctgggaagccctcaggatgtgtgtttcatgggaagtgatagaaattttagctgtagtaaggttttcattatcgtttccaccgttttctgtgagctgtcaatgtgtagtgttttcatattgtttattcactcattcagataacttatcgagtaccagtttcatgccaggtgccgttctgggcggttcattcaccgaaagccaagcttttggtttgggtttcagtttaaatctgtctctgcaaattgacagcccaccaattttagccgttagatgagtatggaaaaaaatctgtgagtgtcgtttgttttactactgcttatctcttgcggaaaaacgtgttagtaaaatgtttaagtggattggaaatattttttcgttatatgcacccgtttgtatatatgcccatacactcacatatttttgatttgcattaaataatgaaggagagtatgtgcttcagttacctttagtactatgattagtttgtttagcgttaggatcaaataagaaccaagaatcctatcattttaatatagtttttacttttatctttttttaaaaagaggaaaccaaaagctatttaagactgttgtgaatgatactgtggctcaagttttgttcaggttcttggcttgtgccacatcgtttttcaggtaggtggtaatactctcatttttaggataaaggagctgtggtacggatcatttggggagcttgtctacagggttgcacttaggaaacacagattcaagcccaagtagtttcgagccgatcatctgatttctgagccatggaattagagtttcattcgtacactctccttaatttgatgaattcttatttaggctcatttgagattagtgctgaaaacaaatttagaaaaggccatttcatattatgtgtgggtattgttgcattgtttcttaaagattgagggagaattaatatctttaggttgttactgcttcattaaaaagaggatcttttttcccccatttttcagtttcactgttacatgccttgaagtgatgaggaggtttctgttactatatgctacacagcagggacaggcaaaggccatcgcagaagaaatatgtgagcaagctgtggtacatggattttctgcagatcttcactgtattagtgaatccgataaggttagagccgttacagtggattttaccgttttgtgctttgaagaattttggttgggaagtgatatttatgaaacaaaaggacactaataccaccacatagtctttgttttttaac

SEQ ID NO: 317939 - DNA, 4001 bp, Homo sapiens
gagggtccttcaccacagtaatattcaaagttgtgggtgaggcatagtttttgccatctgaggctgtaatcttcagggaataactggtgggttgaccagcagtaagattgataaaagggcgtttgagggatatcactccggagaaatgatttagatcaaaatactctagttcattgcctgatacaatctcgtattttaggttctgaagctcatccacatctatggctgacatagtcattatcgatttccctactggccagtcttggcggatagaccctgtacagttgacttcttcaaacataggctggttgtcattcaagttcctgagctgaagaaaaatggacacttccttctcccggcgaaaaggggatccccagtctgatgctcttacccggaaggtataaattcttttcatgagttcatagtccatgggtttggaggtggagatgatccccaggtaggggtcaatagaaaatggcaaagcttttggtccagcaatggaataggtgacatatccattttccccatgatcccggtcagtggcagtcacagccaaaacactggtgcctggagggatgttctcatccaaggtaccatcataggaagacctgttgaagaggggggcatggttgttgcagtccacaatgtcaatgaccaccacggtggaggcctggcccggtgaggttctgatgtgtagctgatagtgggctctgtcgtggaagtccatgagctttgtggtggtgatcaacccagttcgagcattaagtttaaatcctacattctctgaagatggctttagaacatactgcaggttggggaaggctggggtgactctcaccatcaccacgcggctgccaggaggggaaaactcactaagctgcactctgtaaacagccttctcgaatttgagggaagacagtttggaaggtggtaggtgaaagcccctgatctgggaataaaaataagggccgctcccactcctggcctggaggctgaggttgaacccatgaaggtactccatccagttgatgtctttgacagacaccaaactgaactcattgctccgggcataagacttgatggctttgaagtgctttccagggtcaccaccaacaacttccactgactccacttcagctcctgagctatttgcatcgaccagtacagtggcataggtggtaccatcattgctgtctggtggagtcaccaccaccgaagcaatggctgggggcttcctgagggcaggctccacatgaaccacaagtgcagccaggctgccaaacccattgccctcagagattttccgcatgcggtccacagctagcacctggagctcatgctttcctcgccaggtgacgttaagcttcccagccacagtgaccacaccgctggtgggatggatggcaaacatctctgaccttgtgttaaaggcataatagaactcagcattctggcctagatcagcatctgtggcagtcaccttgcagatggggctcttcaggggcatgtcctcagagatggtgactctgtacgaaggtggagagaagagaggcttcaggtcattctggtccaggatgtggaccaccacacgggtcaaagcttccaactccaaggtcttctctgtggcttggatgatgagggtgtagctgtctcgcacctctctgttcagaagagctgtgttgctgctctttgtccttattcttaggaagcagaagttgcccaccacatactcctcagttttaaatacattggccacatccccagagatgatccggtacctcactgcccactgtggctccgcgaggtagatgcccattttctcgaagctctccacataggtcttgggagaagaattttcatagatggtggcattgtaatgggagtgtgtgaagtgccaagcagaggaggagagaatcccttctagaggcttctcacaggtcgcacaatggagcaagaatatggcaaaacccagcagggcaatagtcatggtggaaaactcccgaaaccctgggcagaaaataaaagacagggtgcaagttagggggaaaaaatggtttctactgctgtgattcttaactggaggtgattttgaccctcaagggacacttggcaatgtctgaagatacttttggctgacccagcttgggagtggtggtgctaatggcatctggcaggtagaggctggggatactgctaaacaacctacaatgcataggacagtgcctttgtgtgagtcagttctcacactgagaataaagacatacctgagactgggtaatttataaaggaatgaggtttaatggactcaccgttccacatgactggggaggccccataatcatggcagaaggcaaaggaaaagcaaagtcatatcttacttggcagcaggcaagagcgcgtaggcaggggaactcccctttgtaaaaccatcagatctcatgagacttattcactatcacgagaacagcatgagaaaaacacacccccatgattcaattacctcccactggatccctcccatgatacagggggattatgggagccacaattcaagatgagatttgggtgggaacacagccaaaccatatcagccctgcaacagaattatccagccccaatgtcaatagtgccatggttgagaaaccccgtggctgaagaatagcagactagttcaaaatgctctctcaaagacactcagcagctagaacacagtcctgaactcttactcttttttcccaaaaactttctgtgactccttgggcgatggtgagatagtcccaactcttagccaggaaccaagtttagctatctggttctaaactactattctctctccttcctacaaggcctttccactggggctgagctctagccaaactgagctgtttccgcacatgcagaggctgcaggaaagcaaagtgaccaagatcccaggcgtggcatcaggctgcctggctgtcagccctgcctctgtcatttgctaggtaggtgacttttagagcaagttatttaacctcatgagccttcatttcaccttctgtagaataaggataagaaaatcatcaatctcttaggattgttgtgaaaattcagtgaaataataaaggtaaatgacttatcagagtgcctagtttattgtcagttctaatttaatgtcagccattattgataataggaaactaaggttcataaaaggaagggagctgcccagggccttatagctagtgggagctccttgcacagaccagggttgcctccttgccccagtcctatttatacctgtttcaccacatgtcccttatagacagggcatgactctgactcatcatgtaacctggaacatgaaaactcccaggctcctggaatgtctgagttgaaatggacattagagatgatgggcttctgtccctgcttttcatcatagatgagtatagatggggaaatagagccccagagtcgagatcagtcaagctccaagtcacacagtgtgtggccgggtaagaactagtccctgggagttagttcttgttgaactgatcatgaataaatgcttcgcctctcttagacccttgctgtttcccacagagcccatccccgaactccagcctgggtgaaaatgtgagactcaccagggccaaggatggggcaaggggcaggaggagcggggcagggtttggcagggccatgtgtaggtctggtgcaccaggctgatgcctggcttgcccctgggagccttgattcctaggagcttcatggctgccagccagatgcgctggagcattcttggatgaaactggccagacctgattttccagttgccttgctcttcaaagccaaggaagagttaaacttccaaggcaaagggggaaggagaggcttggagccccgtcttgccagagtcctgtgtgaactgggcacagggttccccaagatcatgctgacagcattccgagataagaggcaggaatagaaaagtctgcctaaatcggggtctgaaggcc

SEQ ID NO: 317940 - DNA, 4001 bp, Homo sapiens
tggccgatattcatttaagaagatgaaatgcggccaggagcggtggctcgcatctgtaatcccagcactttgggaggccgaggtgggcagatcacctgaggtcaggagtttgagaccagcctggccaacatggcgaaactccgtctctactaaaaatataaaaattagccgggtgtggtggtgcacgcctgtaatcccagctgctctggaggctgagacaggagaatcgcttgaacctgggaggcggaggttgcagtgagccaagatcatgccactgcactccagcctgggcgccagagcaagagtctgtctcaaaaaaacaaaaaaaaacaaagatgaaatgcggctgggcacgttggcttatgcctgtaatctcataactttgggaggccgaggtgggtagatcacctgaggtcaggagttggagaccagcctggccaacatggtgaaaccccatctctactaaaaatacgaaaattagctgggtgtggtggcgggcacctgtaatcccagctacttggggggctgaggcaggagaatctcttgaacccaggaggtggaggttgcagtgagctgaaatcgcgccactgtactccagcctgggtgacagaacgagattccatctcaaaaaacaaaaaaaacaaaaacagaagatgaaatgcatgaaaggaaaggttaaaaatgattcccatgggccagttttagtaatactctcttcactccttttgctgcatggtacttgcaccctttgagcttactgttctgcttgattgcatgtccatgaggccgagaatctgcctgtcttgtttaccacgagatccacagaatcaagcccaagcctggcatgtagaagatactcaagaaagatttgccgaataaataagagatacacgaatcaaaagcattgctttttgccctcaaaaagtgttcaacatttgctatggaacattttagcaccattcccttgtgctaattactttcgtaactaaagttagaagctgatgctcagtgcatctgtgttttagcaaattgaattgaatctgtatatcccactcaaagaaatttaattggaattgcacatgaaactgaagcaacccacaaatcagcatcttgtcttgcttgccttaagccccagaaggtcctgaaagccactgttctattgttcatctccacctacacactttactgtatgccctttactcaataaccttcgtggagtgtttccataggtactatcaagccactaacgatttcacaactggagccactgttggtaaatccaagtatgttgcatcaaaacagtttcaacctacttgtctagctcatagcccacacatctatccagagactttaaaactgttgtattttgccccataccttcctggtgatggcagagtagagatgagaagcaattaggcagcagttgcttcccaacagtctcttccagtttgttctgcctctcatttgagttctgaattaggagttgctcctttacaaatggttttaaagtcaaacaattacttgtccattacaatcacctgtcaattgctagaaaaattagactactgaggaggtagatggtacaaacacaggcagaggatacagacattagtaagagacaaggaggcgactgcactacagcaatgtcctaggacaaattctaaccctgccatctaaccctgtttagaggcaaatctaaccctgccataagtagagaggacagggtggtggcagaggtgggaagagtgttgttttgcccttactttaagtgaacctggacatgtcctgacctttgcaaacaccacccctcccccgtagttcccacttacctctgcagtgggctgtgtccaagctgctgaggtccttgcacaggtcaaatctaagttctcttccctttcagcccccgctttggtggctgttgctgctgcggctctgctgcaggctaaccttgtttttgctcgggtgggaggctggccatggtgatctcattacagagctgcgtactggctcggaccaggcacgtgatgaaaaaagtttgggtctgtgtgggctggaaacaaaacacccttctttccagagggcatgtccttaaagcggaaagggaatctaagctcaagcaggaacttgaaaaacgtgcatttggccaaactctgggcttccctccccctgccccctttttttcttttaaaaaattttctccatcatctgcaacttaagaaaatgtcgctgtcccataggaggaggcagattcaagaaaagatgtgggtgtcagataatggcaggtagtacaagttgataaaaaggtgacagagaccagaggatctcattttcttttttttcattgcttcttttcctgtggagggcaggcaagggaggagagatgcatcagctatttctagtgagtctagatgcaggaaaggcatgcctgtggagggtaaatttgcactgtgattgaaataggggaacttaggatacaggacccatgacatgaagtgaggagcactttggaaaaagagctgcttttaaatttctgaaaactttttaaataagcaaatgtgcaaatgatataaaatacaatagggtcaaaagaatgtacaatgaaaagtctttttttaatttctcctcagtcccctttttttcctcccaagagacaacctctgtgaccagatttttgtatatccttccagagcttacctctgtaaatagaaacatgtgtaggccttgtgcttctcctttagcaacagcaccatagtatgtttgttgtgcaccttgctttttccacttaacaatcaaacatggagattggctaggcatggtggtgctcacctgtagtcccaactatttgggaggctgaggttggaggatcacttgagcccaggtatttgagaccagcctgggcagcacaggaagactcctttctaaaataaacaaaactcagaaacttggctgggcacggcggctcacatgtataatctcagcactttggaagaccaagacgggaggatcacttgaggccaggagttcaagaccagcctgggcaatgtagcaaaaccccatttctactacatatacaaaaaattagtagagcttactggcacatgtctgttatcccagctactggggaggctgaggtgggaggatggcttgagcccaggagttggaggctgcagtgagctatgattgtgccctgcactccaacctgagtgacagagtgggaccctgtctctaaaaaacaaaacaaaataaaaaatgccgggtgcagtggctcatgcctgtaatctcagcaatctttggaaggctgaggcaggaggatttcttttttttattttttgagatggagtcttgctctgtcacccaggctggagtgcaatggcatgatcacagctaactgcaacctccgcctcctgggttcaagcgattcttctgcctcagcctcccgagtagctgggactacaggtgtgcgctgccaggcccggctaatttttgtattttttttttttagtagagatgaggtttcaccatattggccaggctggtcttaaactcctgacctcataatctgcccacctcagcctcccaaagtgctgggattacaggcatgagccaccaccgtgcctggcctggcaggagaatttcttaagcccaggagttagagaccagcctgggcaacataatgaggccctgtctctaaaataaataaaactgtcaacaacaaaacatggagactgctccatatagtacccttaagagctgccatgttctgtttaatggctgcctcccgtcccattgtatagatgtgtcatactttatttggccaataaaggaccatgtcttcctcattttccttgcctaattcgttgcacaaagcaagggctcagtaaacattcaatgcttgctcacaaattaattacattttgtacaacttgttcatgtttttcctcatctctcctttcagagatactaatttttttcaatattccagatattgcagaatgtctata

SEQ ID NO: 317941 - DNA, 4001 bp, Homo sapiens
ataacatgtggtctcatctggattttttacagaaaaagtggttttgagttatctagataattgctctactcctcccctcttccaatttgtattaatagacatagaaagataaaactttcaattatctttgaaatctttatcattattgcccttcaacagagtctagaagtgaagtctgaactgactcaaaccggttgagtcttccccactattcaaatggggccgcgtcccgattatcagtgcaatgtgatcacttgattttaaacgcaactatgcgtccaaatggctgagtgcaagaggtcggccggagatagggccgagtgcgctgccccaagctgcgatccctgccaagcactcacggacaatgcactggtttcctccagggagcgtcttccatccagggcagcagtaggagtggaatctggagccgcacacgttgggcctgtgatggacaagcgcggtcacgtaacagataggtagagggatgcagcaacatataaacggtcttcgtaagcaatgccccgagcgagtagatttcaggacaacaaacaaatcaaaattacacttcaaattattggagatcgggaggcagacgtggaagcaaaagagctagatgctggaatgcaggagggtcagaaatgtctaaacactgcctttcatctgtcgtcccttgcctgcctttttaaagggcgaaaagaggcatggaaacatataatttgctactattctagcttccagatgcagagaacaaagggaccattccgttccaaagaatccttgccctccttcccaaatccattcctccttggtcaactgttactttggccccgacgtgtcaaggaaagcgcgtcgcaaggtggagcgctcgggttgacgatgagaaggtgagctgtgaaccctgcacacgtcctcaaacaaaaggctcacgagcggcggccccgacgtggggagcaagcaggcttctctggcccctgcagcaggcggacccaggcccgcctgccgccggacattcagaacctgttcccgcagcgcgagctctgcacacgctctgcgatcggcacccctggaccccctaaccacccgccgcccaacccccggagagagggctttccgcccgctgagctgcggggttgggaaggaaaagggggacgcgctcctgggggtctttggatattctggcaaagggggctgcagctctaggctccagctaaagggtctgggacggagtgggccagaaagccgccaaactgaggattcccccctcccccaagccggagccctaggtgcggagccgcttgcccacttaccctcggagcacgtcctgctgtcctcgccggcggacgcggctggccactgcggcaccctcctcgcgatactcgggcgctagaaacccgccttcagagcctgctgtagcggaccgaacctgttgcggcggcggctggggccggggcggcttgggcggaggaggctgaggctggccggccgtgccctgcgcccagagcaccacacagcccagccacaggaagtagagctggagacacagcctccgtcttctccccatcgccggcgccgaaagcgcgcggccgtagacccgcggagagggagtgatcaaagacaaaatctgcgcgcctcagaaaagagtcagggtctaataagcccttcgtcggctccggggactccctcgggctcgggctccctgctctagctggagacctcgacagagcgccggccccctgactgcccgcgaagcgagacgcggggcgccgggtctagcgcagtgagcggcgaggcgcggcggaggtgcagccggcagccccgagcggtacacgttgcataaccggcctaaagccccgagcgactccaggaccgtcagcgggcgggggaggaaattacaaaagccctggcgtaaaatttcaaaaaatgtgaacctcaaaagaaaaaagggcctgcacgcagagctcggcggattcccgtgcgctccgaagacggatattggaaagctgcaaaagtcaccagaaagaaacaggcaagcaaacaaaagtcgcccccagaagaagaggagggttccctccgggctcgctcggagtcccacagggcaacgaagcgcgggtagcggctgcggagccgggcggaggtgcgcggggccggggcgtgcggccagcaagagagagggcgggaggctgggcgctggagaagatgcggcggtggagggcgcggcgcgggggttttagaggcccggcggggcgcggggcgggccggcgggcggcggctgtcagtgggggcgcggccgtccacacgtggggctcaacccggactgagaggccggcgcagagtgggcggggacagagtaagggagagatcgggactgaggaacgaggggaaccagggttgggtgaggggaagaggaaggaagggggggagggcgaagggagggaagaggacggagattggggagaaggggggcgaacccgagaggaaggccgggctggaagagggacttggaaagagggattggcgagcccgggtgcgagaggaaatgagcgggggatgggggcgaagttagggcaaagagagaagtgggaaaggagagggagggccaaggtccgggcgccgagaggaggggcccggggggccggctggagggggcgaggcgctaggcggctttgcttcccgtccccgtcaattggccgctagctctgttttgactgcctgtacaaagcgagtagacggcgggggatggggcgattagggaccggatttgggaaaggaggcagcagccccttcccctccccctccgtcctcgcccggccgcggaccagggactagggtgcctaagcgcgccaggcttggccggacccgcagctgaactgacccgcagctgaacttccccgccggacagaggccgcaaggttgaggatgagaacgggtctttctgtagggtcccggcccctgacctgggatggggggattcgcagtcagccaggaatagaggctcacggggctgttggttgcagcctcaatccaagaaggaggagacctcccctttgccctcctacccccaccgccccaccgggagcggcgtcagtctgcgggaccaaattaggggctgggagtttccagattgaaatgcgccctccaccaccaagagggagctcacgcggccgcggggggccgaggcagccagccggcgccgcggtcctggggagtccgtgcaggggtgtgctctggtgtgaaacctggcaggactctgcctgggcttgcatgcagggaggggttagagactctgaaatgtactagcgggcagggtggtgacaaggcgggtaaatgaggctcggggcatgcccttgcttcctggcttggaccccttctgattgattaaatcctagcaattggtgcaaccctctgtacctcttagagtgcctctcaccggcctgctctgggttcttcctttgtggccctcctttcatgaaatctctgtgaagtcctggtcatttctcatttagtggaatatcacaatttaaaaatcaaacactcctgaaaacaaggagagaccatccaagcacagtttgcgaaacagtacaaaagagcagtgtctggtttattcaagcctagaaaaccttagtttaaaggggaaaatgttgaatatgtataggagggtgtgtgtgtgtgtgtgtgtgtatatatatacacgtacatatatacatatatacacataacatatatatgatatatatcatatatcatatatatcatatatcatatatatgatatcatatatatgatagatcatatatgatatatcatatatatgatagatcatatatatcatatatatgatatatgatatatgatatatatgatagatcatatatgatctatcatatatatcatatatcatatatatcatatatatcatatatatcatatatatcatatatatcatatatcatatatatcatatatatcgtatatatcatatatcgtatatatcatatatatca

SEQ ID NO: 317942 - DNA, 4001 bp, Homo sapiens
accacttctgcctgactcactactataaaccgtggcccacagcacggagaaatcagtttcttcctgtataaaataaagatattaacagtatttatctcgaagcgttaactagataaatgggatattatatatataaagtctggcgcagtgcctgattatggtaaatgctcagtaagttaaccgtttgacattaactaccagccatcaaacatgaaagtaatgtttaaagactttcaaacaccaacatgcaaagcctttacccactaagtataaattcctcgattaaaaaatttttttttccacagaatacctgcgaagtttctaaaccactgggttgggattctaataatagctgaaccctgaatggtgggttatagagtcaagctattaaaagacattcagtagactccaagtgctcctacttcaaaaaataggccataggcagaggccccactggcttcccagtctccccttgggacgtccctaggctgccagggaacccccctcctccgcgcttagggggaggagagagaaagcctcggaggcgggggccgggggtgggggaaagcgagcatccctgcgcctctcgcccagacccaccttgagcaggatggacggcggcagctggttgatgtctggggtttcggggggcggctccctgtgacagtcgcaggggttttcgggggactcccgacagtccgcgtcgccacattcatgctgctgctgggcggacaagggggcggtgcccccggctcggacagcgtccccgccagcttcggtgggggcaccttcggaggtgggagaagagggcggagggcagagcggctgcgggggctgctccggggcctggcagcagccggcgtcggggggccggggcggcgaagcgcctccccccgcaggccctcccccgccaccgccgccgccgccgccgccgcagcccccgccgccgcagcggggctgcttgcagggggtgcaggcggggaccccggcccccttccgcttgcacaccatttcggggggcgtagggagctcggccggtgacggtgtcggcccccggaagagctgcacggcggcgggcggccccaggaagcgcaccggccccaagctggccaggaagagacttcggccctgctgctcccaggcggcggccgcagccagccccaactctttgcagcaggaggcgggcgacgaagccgaggcggcagcggcggcggcggcggcggccgaggatagcaggaagcggcgggcagcagcggcgcagtcctcggcggccagggccgcgtagcgccgcgccaggtgctgagaggaggaggcggcagcgtaggccccgtcccgcggcggcggcgagagcggcggctcctcctctgggccggcgggggcgggcgcgccgggactgtgcacgatgaagcagagcatgcagggcccgcggaagaagcagtcccggctccggggcgccgccggctgagggggcaccttggctggggtccggcggggcagcctgaggagagggcgccggcggcggcaccaactgcaacagcgaggcctcttctggctcgggcggttacgcggctccttcgagagaaggtggcccatatagaaggccccgaggagggggaccgggacgggagggagggagacccagagaggcgggctcccggcagcggggcaggccgctcgctggctcggcccccggaggggtcgcccttcctgcgcacacacacgcacacacgggcacacacgcgacggtggggggtgggcgtcagctgcgggccgccggagtgcccgacgggggctacatgctttgcccagggaagccgggagaacgatgggcgcgagctttggggacgcgagggagggagcgagcgagcctgccggctaggcgaccagtccgggcccggccagccggctcagtcagtcagcggagcggccggggaaaggccgggtcccgctcggaccattttaactgcggatccgccgccggcgcgcgcacccgcgactctgctcggagccgcaggagcgcgcggcccgttccggcagggggcggagccagttgcggtggcgcgctcgtggcggggacgccggcacccggctgctcacccgggacggccgtcacaccggcactacgggaagaagccggccggctagggcacggagctctgggcttgcggggtgcggcgcacgcccctccctcccaccgcctaaggtttttccgaagctgctgggcgtgcgccgcgtttctgaggcgggaggagacacttccgagccagctgtgtgacatccgtttacacagccgcgctgacgtctcgaggtgtaagttcaagagctgccattggccgggagccgctgggctcttcccctcaccttccacccctgtcaccacccctgactcggaaaccgaggccacttcgaagccgcgaggcgggttccgccggaagggccagtgtgggcgctgaccgcgcttcgggcagagtggcagatgcggcccctgggtgatgcgcaccgaagtcatgtgaggggttgattggttgtgcggcaccactgtttacccacttgtgttttcttaattgttgcgtactactgcctttccacaactttatttcagaatgaaagcatatatcaaattacctgtgcacagcagaaagataacagcttccccacccagtgagccattcaacacccaggctacaaactgtagatcactttattgtctacaccctcggaatcctgtctagccgtctgttgtatattttaaacatgacggtgcagtgcctgctatatgacaaacgttggtgatccagatgagaaagaggaaacagctatgcaggcagtcctttagaaggtttgactatatcgaggctaaagagctagggcagctgctagagcggtacctggtgcggagaggttagctttcacaagcgaaaaattagaggaggcaaataccatgggaatgagccactctagtgagagaaataagaggagaaggtggaatggagagtgctttaggaaggatactttcttcattgtgattacagagaatgaggaaaggtagataaaggacggatacagagaggtggatgtttctagcaggaaggtgaaagagttcctttctgttggtttctgttttgcttcagatagagcttggttacctgctgaagggtggaagagaagtggcaggtgtttaaaaaaaaatctgctaaggataacttgagagagctgactgaggaagaagtattgcaatattcaaggcccagtggcttggagaagaccactgttggaacctacattgctattcccactatagtggccagccccacccagcctgctctcaaacatgctgtcaaacaattgttaattctggcctttttgtcagaaatgaccaatcttaagtctgtcacattcagggatcctttcagagcctaatgacagttatgtggaattctagaagcaaatatttgtcaaaagatttcacagacatacacgctattcactatcaaatgcattgcctgaacgacatttacgtacacatataatccacataactttcatccatttgcctgtaggagaatcttccagggccccagagcagtgcttgaggacttattacagatcctttgacatctctactaggctgcactttcacaaaaggcaagagtattataaagtgttttgtaactttatgtcaaaaatatgaacctgtcagagccagatgtggtggtacctatcattcaaactacaacagggctggtgaggcgtgaggatcgcttaagcccagcttgttatgattatgcatgtgaatagccaccgtagtccatcttgagcagcgtagcgaaacacagtctcttaaaaaaaattgcgacctatacatttcatataagttaaatacacatcttccctatgagccagcaatcccacatctaggtatttatccagagaaataaaagcatatatcgataaaaagacatgtacaaaaatgtccgtaacaactttattcatggtcacca

SEQ ID NO: 317943 - DNA, 4001 bp, Homo sapiens
cttaactcaaatgccttttttgatgtgttttctaatttggtagatcaggtgactacgtgaatgggatcctctagaagtatctaagagattgccacagtattcttgagggcaagattatcaaagaagatgagatgaagactgtctgaacatccacagccaactcactaaaggccatggaagcagctctcttctgcaccatcactaggttcttccagattggtgaaatgaatacccagaagtgactttcaacagtttcaagttttcagtgatcacaacaatagaaataataggtgaataccacagataacagaacatagatgcaaaattatctgaaaagggtggacaaatttgttgggagcagcaaaagtaaagggaaataattattaaatgtcctttatttaatctccttcctaaagtttcatgataagcaatcagattgttgccccaggcagacggtccgtgttaaggagcctggaatcctactcaccagtgcaagggcaggggaagcatggcctggacaggagggctgaagcctcgcgctccaaaacacgtaaaaacacacagttttccaacaaaagaatggagcaacacctctttctactaaatataatccaagcaaaggacaaaacataatttgttggagacgttgtcaaacagatttatgtactttgcagcccataagactctaagttcccttctaagtctaaaagttacaattctttttaaaatatcaaatcaaataaaaatatcaccgagatattaaggagacaaaacatgaaaaatatttatgtcaaatatttcctaaagcagtggttgccatctttgcagtgttctggcattttgtcactggtttagcaattttctacactcaagtctctctgtggtactaggacatatctacttaaaaagaaaatttttacttcctaataaacataatatgtatgcttatttttaaataaatcatatgaaaactgaagttttccaaatatatgtagattgaaaacacctttggagacgcaagggacaaagctgaactgggcagtttgtgaaaatccctgaatggggggcgcctagggcatctgtttctctctccacatcgaccccaaagtcgcgtctctccgactctggaagcgaaaagcgagcggacagcaagccaggccctccgcggggaggccttccgagccagggagagcccgcctccggatgggcattctaagggggctaacaacgaacacaggtgtttccagaaatcatttctgcaagatttttctgggagaaaacaatcatcatttcttattcaatttatcttggaagcgtcttaaaaggcacactcgccaaagacaaagacggtacaccttaaagcgcacaggtgagcgctttcagctcgccagaaggctactttttgacatttgtggcaactataaactccggtgaacttaactgcaagcagtcatgcaaaaagcaacctcgggtagcactgatcactggacgaacgccgccctttctaggctcactccaccgaagagccagacgcgcggctcatggggtggccgggtgggcgcccggcactgcagaaacccagcccagcgagaaagcggacgcccgggggctgcgagtcctcactggcggcccgagccaggccccgctcaccccggcttcgggggcggccgggcccgggccgcgggaggggtcgctccagggggcgctcagccgcccgagaccgccccgacgtggcccagggcgcgagcgcacgcctcccgggcccaaagagcgagcccattccgccccacgtcgccaccgccggcggtgcccccgcgacacccgaaaaatgtgctacctttaaagggtttccgcgcgtgctcagcgttcgcgggccgggccaaggtgctggagtccggccgtccggtcggcgcaggaacacgcccgagcgaggccggctccgcgcactggaggcacaggagcgcctaggcacgggggtccgcgcagaccgcagccgcccaaggccccgccccgcctggccccgcctcgcgcccgctcctcaaaggccgcctcccccagcaggccgcggcgatggcgcccacctggcgcagcaccaagtcacgcacggcgatctgagaccccagccgctcctcccgcaggggcggcggttccgggagcgccccttaggtggcatgtgggaggcttcctgcctgctggtcttcagctaattccccgtggccacctgcctgtgactccacacaggcatgagccaacgcttgtggtttctgggacttactcccgatgaagggcgcccctttatcaatgcacaaatgcaatggggtttcgttcttgttgcccaggctggagtgcaatggcgcaatattggctcactgcaacctctgcctcctgggctcaagcgattctcctgcctcagcctcccaaatagctgggattacaggcatgcaccaccatgtctggctaattttgtatttctagtagagactgggtttctctatgttggtcaggctggtctcaaactcctgacctcaggtgatccgcctgccttggcctcccaaagtgctgggattacaggcatgagccaccgtgtccggcctcattttcttttctttctttctttctttctttcttttttttttttttttttttttttttttttgaggtggagtctcgctctgtcgccagctggagtgcagtggcttgatcttggctcactgcaagctccgcctcctggattcaacagattctcccgcctcagcctcccgaatagttaggattacaggcgtgctccaccatgcccggctaagtttttgtattttcagtagagacggggtttcaccatgttggccaggctcgtcttgaactcctgatctcaaagtgatccacctgcctcagcttcccaaagtgctgggattacaggcatgagccacggctcccggccccagcctcattttcttaatggtgtcttttgaaaagcagaagttttgattttgatgaaatccagtttatcaatttgtttttttatggatcatttgtttgatgttaaacttaagaaatgtttgtctaagtcaaggtcacagtttcttttatattttcttctacatggtttatagatttagattttacatttaggtctatgttctatttgagttaatgtttgtgtatgctgcaagatagaagtcaaggtttatttttttcatgtgcaagttgtatccaatttacctagcaccagttgttgaaaaggctactctttttctccattaaattgcctttgcacttatgtgggaaatcagttgtccatgtatgtgtaggtatattttcagaccctctgttctatttcgttaatatattttcccatctttacaccaatatcgcaccgtcttgatttctgtagctttataacaagtacttgtattgaaatcacatagttttagccctctaacttgttcttcaaaattgttttgtctattttgtctattctagattctttacattcctgtatgatttttttagaacaagcttgtcaatatctacaaaaatattgctgggattttactgaagattgccttgaatctagaaatcaacttagggagtattggcatctttacaatgttgtgtcttcgataaacatgattgatatagcgctctatttacttaggtcttctttaatttctctcaacaacatttgcagttttcagggtataagtcttacacacattttgtcaggactattcttagatatttcatagtttttaaatgttatggtaaatagtattgttttttaaattttaatttctatttgtttgttgccagtatgaagacatgcaattgattttttatattggtcttgtatcctacaaccttgctaaaatcacttgtcagttttattaatagaaatttttattagaatttagtatattccattggattttctacatagacagtcatgttgtgtgcgaacaaagacagtttttctttcaatataaaatgcatttttatttttt

SEQ ID NO: 317944 - DNA, 4001 bp, Homo sapiens
tcttttgttttgttttttgacacggagtcttgtcctgttgcccaggctagagtgcagttgcgtgatctcagcttactgcaacctccgcctcccaggttcaagcgattctcctgcctcagctttctgggtaggtaggattacaggcatgcgccaccacgcctggatactttttgtatttttagtagagacagggtttcaccatgttggccagcctggtcttgaactcctgacctcaagtaatctgcccgcctcggcctctcaaattggtgggattacaggtgtgggccaccgcgcccgacctcagctattgttacaggtacataagcctaaggttttcaatcttgcctagctattaagttaggttgcagttcacagggactcaaatatagaagtacagagtacttctcaagccatatttattttactttaataaatctctcactgtattttattgttatgcactcatggataatttcctccttatgtttgagatataccatacagaaaatccactaactctataaaactgtcttaattttcagtcagctttgataataaagatactatgtctaggggttgcttttactttctttgaaatgtaacattttagataagaaagatggcactgccacacctgagcccagcaggttatttgcaatctaccatggaataacaaagttgaccataacccattacatatattacatccctatttgggaggagccacagtataggtggggtttagagaagaaaaaagaaggtcattctatttctgttttcctcacctgtaacagaggaatctcgatgcatttgaagaaagttgatgaaaactaaacacagtgtgtacctctagccaaaactcacagttaccttgtaaagcttcctattggtcctcttgaatcagctgagcacaagaggtttttcctataaaaagtccacagtgcatctaaatctgatcccagtgaaatttcacttcggctgaagtgaaaatgcagaggtagcatttaaggataacagctggagaacattagttccctgtctctccttttctctcccaagggttgaaaattctgctgttcagacaggaagtcgtcatataccacacactgcacaatacgagaatgctgggatagaagaacaagttgcagaggattagaagggctggggcgggaggcgggtggggtgggggcaggggattgttcaagaaagaactcatagcagtgattctatgtaccccttgggctgtctttctccccccgacagtgttcaactagcatacacccagaactgacaagcacatgctacaattatatcctgaaagctttttaataactcggagtaagaaggcttaatcacttacttttcctcacatttttataatattaactctaagacgttttggggagtggcccagattctccaataatcttttttggcatactttcacatttgctatctaaaaaggcagcctttaactttaaaaaaaaaattgtcaaaaaaaaaaaaactcaaatcactgcccaagacaaggaaatatacatagatacacacacacacacacacacacacacatacacatgcacatatggaagtcaaaacatgatgatctggaaaaagaatgacttaaagaaaaggttcttgtggatatggtttttgtagggtcggtttctgctgtaatttcacaaaactgctgagaaacgaggagagacacccacattctgtggccacagctcaaagtttcgaacaggatgataagagtttcctccaggccacaggctgaatagctagcctgcattcctaccagtctgcaagcgctggcccctcctttgtaaccaactgtcctctgggggcgggctgtaaaactgacccggtctcttccactcctcttcagccaagaccactagacacaaaccttcttaacttttgaactgcagaaaaatgcctttgccttatgcgtatcaggggctagctgctaattgggatacaacgctacggttttatgcagagtgggaggaggtaggagagagaagggagaagccaacccagacatccatcatccttttaggagtaggtggagtttaaagtttccctaacttccaagttcccacttgacaggcaatatttctgtgcaatttccagccccacgtaacagatggtcctttgcccgtctccagccccgagagagaccagacaaagcccccagccattccacgcctcgcaggactgataggtgcttagtttcatgaagctgtcagagcaggagcagcgagcaaagaatggaaacttaacttctccttccagaagttttttctgctacagtagagtccagggggctggagcacaaaggcccgggaaagttttcactgagttatttttcaaaaacgtcttccgccatctgccaaaccatcatctcctaaaccccagatgcccagggaaggaaggttaaggcatatgtgctcagaaacacagcagagatgcaacttgagccttcccaaagacaaactgggaagttgcttaaagagacccccacagtggaaaagcatcctcggggcgcctgacctactcactggtcactcactgccaaaggagaaggtggtgacccagacagggtgccaaatggggtgcgtcacggccgcgggcgagaacctcccttcccagtcgggagggcgagggaaaggggaggagggacgcgatccgggagtctgaggacgggcggcccactcaccctcactgccgtactgtttgccattgttcgcgcccatcctgtagccgtcatgcccgccgtctcccgggacactccatagctgcggcgcacgtcctgcgcgctcggcccgaggaaagcccgcccgacgggaccgttagctgcacatcccccccaagctccggggccgacctccggcctggagaggtccccgcactccagtgggagggggtgctgcgtcccctcctggcacccccggtggctccaggcggggccgggcacagctgcagcacttacaatccgcgctgggggccggcgggcgcagcgccgcgcacagcccgcgccccggggccgcccagaggctcaccgcgccgccgccgccgggtccccatccgcccgccccgatcccctccggtgggcgctgagccgggcaggcccctgggctccgcggctcgaccgcctccttcggctgcccctgcgcgcccgcggcttccccggggagggcgcggcggccacttgttgcgggtccccggagcgagtgaagactagcgacccggcgcagctcgcccgcgggccggacttttgttagcgccaggcgcctcctctcgccgcccagcgtcaatcacagctggagccccggggaggaaggccggcccggagatgcgcggccttttaaaggggcagcgcgccttttcggggctgcggctccaggccccagcctgggcaccggctcagcgcgctacgcgcgaacccttcggagcgaagcaacgtcctgttggctctgttttactgttgttcttttacaggcttggcccccaatctataagatgaacttccaggcgtcgtttggaatcccttgagtttgtctgcaagtacagcctattttaagtgcgtgggcatttaaaataaacacgcatccgtgtctaattctgacacctttcaggtgtatgcgttggcattctcctgtgacttccctgtttggagactggggcggaaaatggaagacagagggagggaaaacttggggcgacttagcagggagtcggtcccaggagagccagactttccctgccccgccccggtgaaggaggtttcctggctcagaatgtttaacagcttcagagccaggaaatgtattttctcctcgtttctgtgatttttttttttcttgtggttggtgttatcctttgtttaaaacattatagcctcttttggaaatttatgtgacacttctacagctttaaaatggccctttggtgttcgctgcattaaacagaaaaaggaaattctccttaatgtt

SEQ ID NO: 317945 - DNA, 4001 bp, Homo sapiens
ctgtctttctccccccgacagtgttcaactagcatacacccagaactgacaagcacatgctacaattatatcctgaaagctttttaataactcggagtaagaaggcttaatcacttacttttcctcacatttttataatattaactctaagacgttttggggagtggcccagattctccaataatcttttttggcatactttcacatttgctatctaaaaaggcagcctttaactttaaaaaaaaaattgtcaaaaaaaaaaaaactcaaatcactgcccaagacaaggaaatatacatagatacacacacacacacacacacacacacatacacatgcacatatggaagtcaaaacatgatgatctggaaaaagaatgacttaaagaaaaggttcttgtggatatggtttttgtagggtcggtttctgctgtaatttcacaaaactgctgagaaacgaggagagacacccacattctgtggccacagctcaaagtttcgaacaggatgataagagtttcctccaggccacaggctgaatagctagcctgcattcctaccagtctgcaagcgctggcccctcctttgtaaccaactgtcctctgggggcgggctgtaaaactgacccggtctcttccactcctcttcagccaagaccactagacacaaaccttcttaacttttgaactgcagaaaaatgcctttgccttatgcgtatcaggggctagctgctaattgggatacaacgctacggttttatgcagagtgggaggaggtaggagagagaagggagaagccaacccagacatccatcatccttttaggagtaggtggagtttaaagtttccctaacttccaagttcccacttgacaggcaatatttctgtgcaatttccagccccacgtaacagatggtcctttgcccgtctccagccccgagagagaccagacaaagcccccagccattccacgcctcgcaggactgataggtgcttagtttcatgaagctgtcagagcaggagcagcgagcaaagaatggaaacttaacttctccttccagaagttttttctgctacagtagagtccagggggctggagcacaaaggcccgggaaagttttcactgagttatttttcaaaaacgtcttccgccatctgccaaaccatcatctcctaaaccccagatgcccagggaaggaaggttaaggcatatgtgctcagaaacacagcagagatgcaacttgagccttcccaaagacaaactgggaagttgcttaaagagacccccacagtggaaaagcatcctcggggcgcctgacctactcactggtcactcactgccaaaggagaaggtggtgacccagacagggtgccaaatggggtgcgtcacggccgcgggcgagaacctcccttcccagtcgggagggcgagggaaaggggaggagggacgcgatccgggagtctgaggacgggcggcccactcaccctcactgccgtactgtttgccattgttcgcgcccatcctgtagccgtcatgcccgccgtctcccgggacactccatagctgcggcgcacgtcctgcgcgctcggcccgaggaaagcccgcccgacgggaccgttagctgcacatcccccccaagctccggggccgacctccggcctggagaggtccccgcactccagtgggagggggtgctgcgtcccctcctggcacccccggtggctccaggcggggccgggcacagctgcagcacttacaatccgcgctgggggccggcgggcgcagcgccgcgcacagcccgcgccccggggccgcccagaggctcaccgcgccgccgccgccgggtccccatccgcccgccccgatcccctccggtgggcgctgagccgggcaggcccctgggctccgcggctcgaccgcctccttcggctgcccctgcgcgcccgcggcttccccggggagggcgcggcggccacttgttgcgggtccccggagcgagtgaagactagcgacccggcgcagctcgcccgcgggccggacttttgttagcgccaggcgcctcctctcgccgcccagcgtcaatcacagctggagccccggggaggaaggccggcccggagatgcgcggccttttaaaggggcagcgcgccttttcggggctgcggctccaggccccagcctgggcaccggctcagcgcgctacgcgcgaacccttcggagcgaagcaacgtcctgttggctctgttttactgttgttcttttacaggcttggcccccaatctataagatgaacttccaggcgtcgtttggaatcccttgagtttgtctgcaagtacagcctattttaagtgcgtgggcatttaaaataaacacgcatccgtgtctaattctgacacctttcaggtgtatgcgttggcattctcctgtgacttccctgtttggagactggggcggaaaatggaagacagagggagggaaaacttggggcgacttagcagggagtcggtcccaggagagccagactttccctgccccgccccggtgaaggaggtttcctggctcagaatgtttaacagcttcagagccaggaaatgtattttctcctcgtttctgtgatttttttttttcttgtggttggtgttatcctttgtttaaaacattatagcctcttttggaaatttatgtgacacttctacagctttaaaatggccctttggtgttcgctgcattaaacagaaaaaggaaattctccttaatgttttattcccttttcatgtaaatacctagaattttataacattacatcctaataaagaccagggcactcaccgtgcaaatttctttgtagtgaggcaagcacagagcagtttttccttgtagatgttagatgttgcaaattaaattaaaagtgtatattgatgcatacatacataaatatgcgtatatagagatatacatacatagatatatgcatatgatgcgtgaatacagaaccaggcgttttgtaattacgtatttcttaaaaggcttgtgaccacatgcagaaattcttagtgatttaacttcttatagattctatttgggtaatttcctttatttactacaattttcctttgtaacaacgggataaaacatccatatttcaagatttttaaatctagatatcatgtactgaaagaaaaaaataataatctattttcaagaatgggatcaaatgttttgtattgtgctgatttttccactgtccaggtccaaagagatgaaagactattttaattcatcttttaatatctagaatccagcacactggccaataatatgtgcttcctaaatgtctgtcaaattatatctaaaacctgtgtcataggccctaaagaaggtagagatatcaaaaatttggaagagtgagttatttcagattctacctgaaagcataaatccaatctagaaaggagctgacgtctactttatcttcatgcaaaagcgaatttctgctcacctggtctgtattagttttctgtagcttataacagaattcctgaaactgggtaatttacaaagaaaagaaattatttttttggaggctgaaagatccaagctcaaggggcacatctgacgggagccttcctgctggtggaggcagcacacggggcaccacacagtgaggtagctgagcgtgctagttcaggtctctcttcctcttcttctaaagccaccagccccactcctgtgataacccgtaaatccattaacccattaatccattaatccatgaatggattcatccattcgggaggcagagccctcatgacccaatcacctcttaaaggtcccacctctcaaaattgccacattggggattaaatctcaacatgagttttggggtggacaaatattcaaagtatagcatggtctttgtgattcttctgtcaccatgcagggaacttaccctggatctgatcattttggaggcatatttgaaaataaactgggtgtaaagta

SEQ ID NO: 317946 - DNA, 4001 bp, Homo sapiens
attacttttctttaccctcgtgaaaaataccccctctcacttgaaacttccctatattctcaatgatcctatctggtcaagggcttccctgcccttcaagtttctcatgcctttctttagtttctattggtttcagcttgctcatatcaaagtaatcttgcatatcacttaatttgacctcacagaccttaattgacatcatagactatcttgtgtatctactgaccaggacagcctctcttgtctaaagaaataccacaccacataaaccaaactgctcagataaaaaccacacacaaacaaaacaaaacaaaaaccccccaacaggatgatggtgctgaaaaaggcctaggaatcatccagctcaacccttcgttttacagataaggaaagtgaggcctagagatgttagatggcttgtccaaagtcacagaggcaggatgtaccagtgtgaagcagggatacaggtcttcaactcctttttaattttatttcactataccaccttatttcattttagtataccaccaattttacttcactatatcaccctatcttactggaatctagttgtccctttttctcctctgctatgcattagtatctgtttgactaaatataaagtgtgtacctctgggcacacagccatttaaacaaagaggcacacaaaactctacattctttacccaaggaggacatcagaattacagcatcacatattttaaagaggggaaagaaggcttacagataatctaaaatgttaattctcaaaatgaaagttaaaaattacaagcggatttttttcagtctatgcctatgtaatacataccctccagactggacctcctccttccctgggaaaatcatggctttatagaactattattttatccttcacttgtgctgggggaatgggaaaggggattaaaaaccagtgacctaatccaacgtcttcctttagcagataaaaaaatctcaagttcagagagaggaagggatttggccaaagtaaaccatcaagttaatagcaactttggaacaaaaatcaaggtctcctgtttttcactttgtagtgatttacactgctggtttaggtgtataaaacaaagttttctggacagagcttctcattgcacaggaaccttcctaagtgaccagttgcccttggccagcttggtgtctgcaaagaaacacggtagacatctcttagtcaaattctgggtgtgcagagtgcagggagaatatgcttttcaggtctgtaaagactccatgaaaagggagttaagaatctgatttccacagctagggcacggacatcaaaggcatccaacacagataagcaaactgcagcacagaaaagctaatggacctagacaaggtcacacggtgtgtaggtggaaggggtgaaactagaattcagggctcctgatactcaggcgtggcagccaaagatgtgttcactgcttcctgctcagggacatctcctcactacgctgaacacagacctccttcactttactggccgaaacaccgacttaacattaaaatcatgaaattcgtgacgcccggggtgggagacagtcacagaagctgtccagtccaacaccctcacccatttcattgaggaaactggggcccagagagagttctttatgctggattttggggccaggttcagacaagcaggcaacccccgcaagcacggcctagaaggccaggaactacaaattcaacccctgatctctcaaggagctctaggccccaagggggccagaggccgagcttaagcggtcggaagttccagaatccccacccagctacctcagccctgccgcacgcactccgggctttgccaccccgctcccggtccccaggcccactcagccgccgcctcacctacgccgaccctccgcctgttattgtggttgagagggagggacgctacagacacttccccggcccctaccgctgaggcacttccgcttccgccgccgctcgcatatttccggagtgttgtcatccggggctggagcctcaaacccgtgtccatattgtgtgtgtgaagaagcatcgaagcgcggcagccatgttcagcgtggcatttcggaaggcttgtcaggggtggagaagcggggcgggttgctgttctttcacctgacactaaagcgccatgccggaagcactgagtctgatacgtcggaaccagtctccaccgtgtggtttggtcttgatttccactggtactctggggtcttggataagtctctggacctcgcctttgtcatttgcgaagtcgataggttccaatagagattttcccagaatcattcaactaaaaatagagaactttttttttttgagaggaaggacgggggcgcagttaaagatgttaatgttaagtcatcccttctgtgatttcgggacattatctttgcacgtaagtaatagtattttacagtccaaaggaatttcacatgagtgtcattaaaaactctacacgactctgacatgtaggcaaggatcaacttaatcaccttttctgttgtttaatggataaggaattgtcttcagagagtgtaattgattttcacaatgtctcgcagatggactgaaattcagatttttaccttttacatcctgtgttcttgccctaatatacatgtaattaatatgggctaaaatccctagatttaaatagatacaaatacttcttaggaaagttagtgtgcattaaagccatgtgagacacaatttgacaagacgtagcattgactaggctattctgctggagaagaaaaagctgaagaaggcttgggaatcccatttcttcttattcttttcttgattgatagcagacctactggtttttcccctctttccccaatatggttcggcaccttaggtttcagcttgtcttaggcagtcacagttttagctatcccattccgtatgtcaaaccatatatctgtgtttttatttggagctctggtaggacaaacaaaacaaaacctcatcatattcatgtactattcattgtaatctcagctttcatgttacattcttcctgtaattgaagacaaaaatgaatttttatgctatttgcttctgtcggtttcttcatattcaaactttaataaaggaaacagactttagctttttctgtttcccaggttattctgaagaataaataggaattacgaaagtttctagtgcagggcatggcatatttagaaggcattcagtaagatttatttcagcacaattggcctgaatttttaattcaatggaatatgattttcattttattagcattcctccttttgtaaaaagcactgtagtgggacctgaaatgaatactcatgagtaagaaaggtttcctacctcaagtttagaaaatttcctaccacaaatcattgtaataaatgttaaagatattttctcactgctatgagtgttatatataataagatatcaaaactagttttaacattttcaggtagagcatgttatatgtatcccttcatctctaggatttatttgtaccttgatgttacaggttttcattaaaaaggtcctgagttagtatttctcctgtacagtggcaccatcatggggtccctgagcgctgcaggaaagtttgccctacagtaaatgaccttaaaccgctgtgttgttttaattttcaatccccactttttaattaaattctaaagtatctcttttcattcttccatgagttctagtatcagcccgtgttcttccttgaaattccttaggtacctaaacaacagataatccctttgttaaaatgatgactaatactcaagagaagttttggtcagggatagtggttggagtttgctcaggacaggttcatatggctatggagcctgttcagtgcacaactgcagaaggtgctatgcatatcaaggctattcttaactacccttagacttggcgtatatggcagaactccactatgaattcaaatacaggatttt

SEQ ID NO: 317947 - DNA, 4001 bp, Homo sapiens
ttacactgccatgtagtcaaaaaatgcaccatcagtgacctcagatataggcttttttaagatttctagatctggaagagacttccagtcaacagaagaccaagaaggaagatccctcaacaaaaagtatctccacagaattggatctcttacagtttcattccaataatgatttgtacttcccaactgacacagatcatgaggtgaaagaaaggacaaaatatatagctgtacatcaatctgaaacagaagaaagcagcaggtaggaaaaaggaatgaagaaaatagtttttgggtgataaaccacataatcaacaaataaataacaaaaggtcaactgactagtatttttaataactaaatctaccattaataattaaatctattattttcctgctatcagcaaaggatcataactgaacattttagtttcgtagttgttaaacatttaatttctgaaacacctgaaacattcctgaaaaagcaaccactgtcttgctatttttccagcaaaatcaccagttcctttaatttttcctcagagatatttggatataccagttagttacataaattagttaaggaaataatttgtccttcaaaataaaacccatatcaacctttatctgattttatcatcagaccaaatcaaagagtgtacatttgtctttttcttttttgagacacagtctcgctctgtcgcccaggctggagtgcagtggcaagatctcggctcactgcaagctccgtctcccaggttcacgccatgctcctgcctcagcctcccaagtagctgggactacaggcgcctgccaccaagcccggctaattttttatatttttagtagagacggggtttcaccgtgttagccaggatggtcttgatctcctgacctcgtgatccgcccacctgggtctcccaaagtgctgggattacaggcgtgagccaccgcgcccggccgtaaatttgtcatcttagttcctctacagaatctattaaaatgttatgaaaaacctctgcaaggagaaacttggaggcattctaaacctgcagctttcacgttgatatacacattggagagaggtgtcaatagtccaaatgagacaaagaattgtaataattttcaataatttttgttctcttcatttacctatctaccccaaagtttaacaataagttatgtgtgtcattctcgtggccttgatgtaacttgaggcacttgtaacttaagtcatttattttcaactgaggggccgttttgtttcttcaaatacacaataacagccacaggcacaatgtcctcttgagagggtaaaaaccttggccctccaagtgttttggtacagtgatccggaatcaaagacgctgggaacagggacgctggaatgctttcccaagctaatcagcaagttgggaactgtctcatttccgtaaccggacattcagggtgtcctagtcacatgtgcctgttttggcgggtggaaaacctgagggcgatcgggagggtccccaggggccccatgaaggtgcttccctgagatgttcgggccccctgcggagcaccagggtccacgccaagacgcttctgatcaactgtagcttctcggtgactacactgccaggaatggctgcatggacggagccagacccaggccggggcgcgagagttccccaggccccggggggctccaggggaggtccctccggcccgggccggccccactgtcctccgcggcctgcggccgacgctcaccggcagccgcgtcagggtgctggccgcctcatccacctcctcccgtgaggtcgtacgcgccaccctctccttgctcactgactgccagaaggtcttccagccgctgaggatggccgcctccaggcggccccagtcgctgaagggcggcggcggcgagtttgttccgctgcgcggctcgcttcccgccatggcttgcccgcagcgtgggtgacgcgtcttagagccacgctagcgcgtcagcctcctgcgcagctccgcgccagccgagggcgccctcgggcgttccgcctcccgcttctcccgcgagtccgcctccagggcagggttaggcccaggggcaagggcgggtactgggaggaagcccactgtgcgtggctgtgagccgagtacgaagctcctgtcaacaattaacttccccagtaacttgtggcctcaacctcagccacgccaaccgcagagcccctgtacaacctctggcccgctgacttcctggcttcattcaagatgttctctccgggatcatttccactatgcctggtcctaggcgactccgcttgttcgatagacctctgccactgtcttgggcttaataaccacttgcttccttttcagcactaccatactacgtatggggtgttttttgtgtgtgttatttcctcaatcaccaagttaccatttattttcttgagtatcagcaaaaacagactagagaggcagtcagcgggccaattacaaagaaccttttgccaaaatgagaagtctggacccactatgcaaaaatataagcacatttaaaatttgcaagggcggcaaaaaacggctagaagaacccagatgtggtggtgttgaaatcccactagtgagttttttaattctcaaaccagatgcccattctacttactttgggcttactttaaaagtgctttaagagaacgtattacaagttaatctgttacatagaactgggtatgtatacattcaaaaagtaaatctctgaggatctaaatgtcaacagaatccaagaaagcctgataactaaggttctgcaaggctctgtaacatacaagtttaagtttcattacattttattatttgcatgttgttggtaggggccaataaccaataaaattgcagcctcgtttttgggaggcaatctggacaaggaccacggattaaccatatggcatttctcatcactttctaggacacgatttactttgagagcaaaaaacgaactagagcaagaaaaaaaatcagttcaagtataaagtattaaaatgatatctgttaaatgaatgagaaaaactttattacggaaaattttgaacatttataaaaggagagtgaataatatgctcctgtgtgcccagtatccaagattccattaccaacacctggttaatcttgtgctgttgctatactcacctaatactacacccccaattctggatccttttgaaacaaatcccagacctatcatctgtaaatatctcagtatccgtccctaaaaaaaacagattttaagaaacagaccactgtacctaagcaattttaattcattaaaatcaccaaataccgagtcagtgtttaacttccccatctgctttgaaaataatttttcacatttgatttgtttgaatcatagcccaacaagggtcacacattacggatactcttaaagcttaagtttcattgtatagctccccctcctttattttcccttgatatttgttaaagaaagcaggttggtctttctggaccactctggactttcttttttctatattcttcttcttcttttttttttttttttgttagtagagatggagtttcaccatgttttccaggctggtctcgacctcccaggctcaagtgatcctcctgctgtggccttccaaagtgctaggattacaagtgtgacccactgaacacggcctgcacactattaatggcatctcaatagtgtctttaacacattcgtaaatggtattatatactgagactgaaagctacaagtcattctcattttctaatgttcggagtgatcagtggtttcactgggctgatccattcaaatttcctgtaagtttttcacctcaaagatagagcatttatcaatgaatattatttgcttacaagttataaaatgttagtattctagttctataattccttttattagctgaattaaagaaaaattttccgtcagtcatttgattgtcctgctcaagccagaattagctatat

SEQ ID NO: 317948 - DNA, 4001 bp, Homo sapiens
acttacactgccatgtagtcaaaaaatgcaccatcagtgacctcagatataggcttttttaagatttctagatctggaagagacttccagtcaacagaagaccaagaaggaagatccctcaacaaaaagtatctccacagaattggatctcttacagtttcattccaataatgatttgtacttcccaactgacacagatcatgaggtgaaagaaaggacaaaatatatagctgtacatcaatctgaaacagaagaaagcagcaggtaggaaaaaggaatgaagaaaatagtttttgggtgataaaccacataatcaacaaataaataacaaaaggtcaactgactagtatttttaataactaaatctaccattaataattaaatctattattttcctgctatcagcaaaggatcataactgaacattttagtttcgtagttgttaaacatttaatttctgaaacacctgaaacattcctgaaaaagcaaccactgtcttgctatttttccagcaaaatcaccagttcctttaatttttcctcagagatatttggatataccagttagttacataaattagttaaggaaataatttgtccttcaaaataaaacccatatcaacctttatctgattttatcatcagaccaaatcaaagagtgtacatttgtctttttcttttttgagacacagtctcgctctgtcgcccaggctggagtgcagtggcaagatctcggctcactgcaagctccgtctcccaggttcacgccatgctcctgcctcagcctcccaagtagctgggactacaggcgcctgccaccaagcccggctaattttttatatttttagtagagacggggtttcaccgtgttagccaggatggtcttgatctcctgacctcgtgatccgcccacctgggtctcccaaagtgctgggattacaggcgtgagccaccgcgcccggccgtaaatttgtcatcttagttcctctacagaatctattaaaatgttatgaaaaacctctgcaaggagaaacttggaggcattctaaacctgcagctttcacgttgatatacacattggagagaggtgtcaatagtccaaatgagacaaagaattgtaataattttcaataatttttgttctcttcatttacctatctaccccaaagtttaacaataagttatgtgtgtcattctcgtggccttgatgtaacttgaggcacttgtaacttaagtcatttattttcaactgaggggccgttttgtttcttcaaatacacaataacagccacaggcacaatgtcctcttgagagggtaaaaaccttggccctccaagtgttttggtacagtgatccggaatcaaagacgctgggaacagggacgctggaatgctttcccaagctaatcagcaagttgggaactgtctcatttccgtaaccggacattcagggtgtcctagtcacatgtgcctgttttggcgggtggaaaacctgagggcgatcgggagggtccccaggggccccatgaaggtgcttccctgagatgttcgggccccctgcggagcaccagggtccacgccaagacgcttctgatcaactgtagcttctcggtgactacactgccaggaatggctgcatggacggagccagacccaggccggggcgcgagagttccccaggccccggggggctccaggggaggtccctccggcccgggccggccccactgtcctccgcggcctgcggccgacgctcaccggcagccgcgtcagggtgctggccgcctcatccacctcctcccgtgaggtcgtacgcgccaccctctccttgctcactgactgccagaaggtcttccagccgctgaggatggccgcctccaggcggccccagtcgctgaagggcggcggcggcgagtttgttccgctgcgcggctcgcttcccgccatggcttgcccgcagcgtgggtgacgcgtcttagagccacgctagcgcgtcagcctcctgcgcagctccgcgccagccgagggcgccctcgggcgttccgcctcccgcttctcccgcgagtccgcctccagggcagggttaggcccaggggcaagggcgggtactgggaggaagcccactgtgcgtggctgtgagccgagtacgaagctcctgtcaacaattaacttccccagtaacttgtggcctcaacctcagccacgccaaccgcagagcccctgtacaacctctggcccgctgacttcctggcttcattcaagatgttctctccgggatcatttccactatgcctggtcctaggcgactccgcttgttcgatagacctctgccactgtcttgggcttaataaccacttgcttccttttcagcactaccatactacgtatggggtgttttttgtgtgtgttatttcctcaatcaccaagttaccatttattttcttgagtatcagcaaaaacagactagagaggcagtcagcgggccaattacaaagaaccttttgccaaaatgagaagtctggacccactatgcaaaaatataagcacatttaaaatttgcaagggcggcaaaaaacggctagaagaacccagatgtggtggtgttgaaatcccactagtgagttttttaattctcaaaccagatgcccattctacttactttgggcttactttaaaagtgctttaagagaacgtattacaagttaatctgttacatagaactgggtatgtatacattcaaaaagtaaatctctgaggatctaaatgtcaacagaatccaagaaagcctgataactaaggttctgcaaggctctgtaacatacaagtttaagtttcattacattttattatttgcatgttgttggtaggggccaataaccaataaaattgcagcctcgtttttgggaggcaatctggacaaggaccacggattaaccatatggcatttctcatcactttctaggacacgatttactttgagagcaaaaaacgaactagagcaagaaaaaaaatcagttcaagtataaagtattaaaatgatatctgttaaatgaatgagaaaaactttattacggaaaattttgaacatttataaaaggagagtgaataatatgctcctgtgtgcccagtatccaagattccattaccaacacctggttaatcttgtgctgttgctatactcacctaatactacacccccaattctggatccttttgaaacaaatcccagacctatcatctgtaaatatctcagtatccgtccctaaaaaaaacagattttaagaaacagaccactgtacctaagcaattttaattcattaaaatcaccaaataccgagtcagtgtttaacttccccatctgctttgaaaataatttttcacatttgatttgtttgaatcatagcccaacaagggtcacacattacggatactcttaaagcttaagtttcattgtatagctccccctcctttattttcccttgatatttgttaaagaaagcaggttggtctttctggaccactctggactttcttttttctatattcttcttcttcttttttttttttttttgttagtagagatggagtttcaccatgttttccaggctggtctcgacctcccaggctcaagtgatcctcctgctgtggccttccaaagtgctaggattacaagtgtgacccactgaacacggcctgcacactattaatggcatctcaatagtgtctttaacacattcgtaaatggtattatatactgagactgaaagctacaagtcattctcattttctaatgttcggagtgatcagtggtttcactgggctgatccattcaaatttcctgtaagtttttcacctcaaagatagagcatttatcaatgaatattatttgcttacaagttataaaatgttagtattctagttctataattccttttattagctgaattaaagaaaaattttccgtcagtcatttgattgtcctgctcaagccagaattagctat

SEQ ID NO: 317949 - DNA, 4001 bp, Homo sapiens
cacacacacacacacacacgcatgcaaaaatcaaaaactatcagtttctttttttccctcctagttttcaagaatgctagagaagtccagttctgtgaattatgcaaaggacagcaaacattaagctgcctccatatttatgctactgtacttccatttttaaaacaagcatctcaactccccagacaccatcatccacagaaaccatgcagctatccaacagactttcagtgtcaccatttattatttatagcgttaaatgggggaagtggctctgatgtcaccaaccctacccagtggaatcactgactcaataaacattttcacactgaagaaaatctggctaggaaaacattttgctgggttaagtagattcttccacctctcctctcaaccctggggaagaagttgttaccgtgttaggaaagatacaaagaaactgtcaaggcttccataggaagaaatcctggacatgtccatttgctgatgcagacttcctcttcccagctctccagagcccaatttgatttccctcatgttcacgttggcaggtaatatctgccatattttatttcttccaccaaatcatccatcaattagcaaattcttcacttctagccactctctcactgtcctgttcctaaaaaccccttctggtttcaaatcctaaagcttcggaggagggtggagggtgtccacggaccgggagtctggcctggctgccagtggtttctaacagaagagtggtcgcttcccccgggggccaaggattcccctcttttttttttctttctgagaagaaagacctcgcggcagtgatgaggatggctccctccccagtcatctccaatttcccaaagcagctctggaaaacgtgaagttgcgccttctctttcctggaggatggaatccagagtacctgggcccttgctatgcaaacatccctctccgccgggtaggaaaccctttgtccgagaagccggacaccacaagggcccgggaaagaggcctccttatccgccacagcctcaaacccgaaagctccctgcccccccagctctgtagggcctatcctggcatccacacagacctaggctggggagtgggtgctgagacctctcctaggacgcggaggcccaggcggccccaacccatctccgtactccttcccaccatctcactcggcctgagtggggcttgcaagcgcggtgcgggcctgggccgaaacagaggaaagaaaaaaaaatccctttctaaaagaaggagaatggggtgctagagcgagtgcgacctaagtctacagcataaacgagcgagggtcgtccgagagctgggaccggagacgggaccagggggagggggagaagcgaggggcatggagggggccgggccaggaccggccggagatgtcgagggatcagaggagcccgcgccaggtccgaggccagggaaggctgggggcccgggtctgggtcgaggcgtctgggaagggccagagccggcctcgcaccggacgttgaggtgggcaggcccgcccggggccggacggacggaagcacagacggtccagcgggccgcactcaccatgagctcgatggtcttgtcctcaatcaccgagtcgggctccatggcggccccggcggccccgcctcgctctccccgcgcagcagcgaacggcccgggcggaggaggcgacggcggaggcggcagaggcggaggcggctatcgcacccactctagctgccagcccgcccgggccgccggcagctccgccctccccctcggcgaacgcagtacgcagatcggggactacacctcccagcaggcgccgcggcccgcagagcgttgtgggaccgagcctctgacaccaggttgctggctcttggcagcccgaagctgaactccgagctgagagtagcactggacggtgggcgtaggacgtgcagacctgaagagttaagagcttgctcatggcagggcctcgagagcgccacgactacgtgtcccagaaagccgtgcgcccgggttgtccttccggctagcttctcttgacttcctggcagcccaaggctgcccagaccgggacggaaactccgaggcaactcctcacttgtcggaggtcctgcgtatgcgacccatttccgcacatgcgcggtccatgccgcagtgctccctagacgcctaggtagctgcgcggcccgtccggcagtgtctgatggtaggggcagatggtggagacaggtgggttctaggtgcgttaggaaggtgtatagacctggggctcaggtgtgggaaggggccagcgagtgagagaagctcggcctggggaagaggctctgagaggatgggcatcccaggagtgagagtttcgagatttcttcgggaaagacggggttttgggaaatgtgctgtggtgctgtctgtatgtcacacgatctgcgaggagctgcgagattaaaggggacgtgcgtatatcgagcccctcattcattcgttcagaaaatggttattttttaagcatccagcttccgctgcgtaccgttctaggcgctgagaatcagctctgaacatgacagacaaggctcctgttctcatggagcttaattctggtggagggacgacagacactaaccaaaagagtggctaagaaggaacacacaagcggagactccttctagtgaactcagcctccaactctgtgtaacttaggtctgtccgtgccctctaaccaaatcccaccaggaagacacggatcgttgaacaagctgggtttattactagttgcagtgactgagaacacacattgaggaacgatagggcctctcggtaagagttgttagtgatttgggagagggtttaaggaagtgagagcttcactggattagatactgtcaggaagagagggtcgttccatgattgagcatctcagttcatcttatctagaggaagggaattctagattgaggctaaagctgtgcagataaagaaacagcagcctggccgggcgcagtggctcacgcctgtaatcccagcactttggtaaaccgaggcaggcgaattgcttgagcgcaggagttccagaccagcctgggcaacatggcgaaactcttctctacaaaaaatacaaaaatgaaccgggcctggtggtgcgcgcctgtcatctcagttacttgggaggcagaggtgggacgatcgcttgagcccaggaagtggaggtttcagtgaatggagatcgcaccactccactgtaccctgagtgatagagccagaccttgtctcaaaaacgaaaaaaaaaaaaaaaagtgcagcagcagctccctcatattagccaagtggggatgttgagtcattttttgtggtttggacaatcatcaggttttatctttttatcgtgtttagacctgattatagagtggtcttgtatttgtctggatctatcatggtcacagaatgacctcgtctgatgttgatgttctttggaattgtttttgttctacaggaaaacacaaagcctagctataagggccaggctgtggtctagtaacatcatggcatggctgattgtaccaggccagcttccagatatcagaggctgcttttcactttctcaaagtgtttttgcattctctgcacctataaagtcaaagaggctggatgacctagaaatctttccattaccaaggaccaagttacagtaatttgcatgcattcaggacacagtataagttccctgcaggtagactttgaagtttcatagtccttacctggtgcttttcaccaagggaattgaaagaaaagcaataggaagagcacagaattggaaagttcttaccactgtcatgctatctgaatttcaccaggtccgttccactatggcccttaggacattcattagtaaaacaaagggattagatatgacctctatttcagttacctgttgcaacacaacaaacctccgaagacttagtagcttagaataacaatggtttattatgatttta

SEQ ID NO: 317950 - DNA, 4001 bp, Homo sapiens
gacatttctccaaagaaaatataaaaataggcaataagcacattaactgtgatgttaagcatcaaagaaacgcaaatcgaaccacaataaaatattaatactacttcacgttcactcactatattataataaaaaggacaaataagtgttcgtgagcatgtggagaggaaccctcagatattgctggtgggattgtaaaatgctacaaccacttcagaatagtatggcagttcctcaaaatgttaaacatagagctacgatttgacccaggaatcccattcccaaaagaaatgaaaacatatgttcacacaaaaacttgtacaaaaatgttcatgcagcattattcataacccaaaagtgggaacaaccagatgtccatcactgattggataaatattaataaaatgtggaatggaatattatttgaccataaaaaggaattagtagtgatacatgctacatcatggataaactttgagaacattatgctaagtgaaagaaactggtcaccatggccccatttataggatatgtccagactagacaaatgcagagaggcagaaaatacattagttgcctaggcctggggcagggggaaaatggggagtgactgctaatgggtctagggattctttctgggataacgaaattgttgtaaaactgatatggtgatgtttacacaactctatgaacatatgaaaaaacctctgaattgtactacactttaaatgagtgtattggtacggaaatgtgaactcaataaagctgtttaaaaaacaaaacacctaaggtctagtatatacgttctttgtggaaaacaaggtacattcaagacaaataaataactatgaactgatctgattactaaccaagaccatgcttgaggcacttagaattaagaatttaacatacattccttactagctaaaagattacccctttaaatatgtctaaatctcaacgaaaatggacctgcagtacttgcaactgtcagggcataaaatgggattcacgaaagatacctgagtaaacacgttcctttcctgtacatggctgaactgtacttcccattacaaaaaaaaaaacaataactgcagaaaaatactccaccgggagccggagaaattctcaaagaagaatctaatactgagctaagacaaggggtggaaagaatgaggaaggggaaggagcacagagtagggggaggtctccatgcatttaagcccaaggagtccagttacattaaatccaacttttaaacgctttgtgaacaggcccagaggcaaagtcctgggcgcaaacccacgagccgagctgcgaggctgagaggaagtgctagtccagcccaaccccgcactggatttggtgtggaaaccgtcagaggtaaaagggatcgctcagatggggggcccgcggtgagggcaggaggcaaaaccccaccgcccggcgctcccagccagcgcgcagcgggaggcggctgtgccgcgggcccgtccttcgcgtccgagctgccgcgcacgccccgcgcggagcgcggcaccgggagcctccggtggggctgggtcccgtctcccgccccatccggcgctttgtcccagccccggtggccggcggccccgctgcgggcccccgggccgcggtgacagcccccgtccccatagggctgcgagcccgggagtccctataggctggcgaccggtcgcccgccggacctcacccaggcgggacgcggcaggaggacgctcgccctgccggaggggccgccgccgccgcccgaagcgcacgcaggccaagctcaggcgccaaaagccttggacttcgaaacacacgacttccaacatcctaagcttacccaaaaattctcgacgaaatacgccatgaccatcgtgccgccgccgcgccgggttccgcgtccgcgcccgcccgccgctgtgtaaacacggcccggcccccacagcacccccgcctttcgccgccgccgccttcttcccagagaccggcccgcaccttccagggcgcatgcgccacctagcggctgccgcagctgggcgagcacttagacgccacggccacggtgtgcgcatgcgccctgtccccattctcgggtgttggtagatctctctgcatcccgggcgcggctgggttgagtgttctcttaggaatggtggagaactgggtccttgaggagtcaccggggagactgctcgcactgtttgtggtgcgacgggcactggcccagggacagagggaagagaagggccagccagcggcagtggagtcggcaggctggctgcccactcgctttctctcctcacaagactcgcttccccggccttcgaggatctcgaacggactatagtctggactcgctgggctggaggaaacttggccgctggccacccggaggagactgagaagcctttggtcaacagggcgcctttccttgaaccaaaacaaaactttccgaagccggaaaggaaacgcccagtgtcgcctgagagccctggagctgcgcgagacccaggcactgagtgcggcctcggcctctgacctctaacacgccgggaacaaaccagctggggcggcccgcaggcctgcgggagcggaatgtgacccgaaaccgacggacttcctgacccatagtccatagttctcttcagcaacttgaacattttggaaaaagaaacaagtcttaacatgccacgacctaatggaaaaactaaatccccttcctacaccttgctttccaaaagttaaaaaaaaatagttaaacgctattagaggtctcaagttcactgtcaccagatcagctaggtccagaatcttcagttcttgaagccaagccctacaaatagatttattgtagcatatcacacctcttcaggtgacttaaaacaatgagaattcatgagaaattatcttcatcctcaagtaaaaatcatgaggtgcctttcacatggatgaaattgtaagtgcttgttgaacaaggaataattggataatggtattgtggtcatactttttaagaatatctgttagaaagatataggatgcagaacatctaggatttgctgaaagtcatttattatggataggggtatgagtaaggtcatagatgaaaagggatgaaacaagattggccatagttgctctatttttgtgtatcttgtttctttattttgtttctttaaaaagtcctcatatcactgacatttacacttagttttagggaaagtcaaatttagaaataagctacagctctctaagctatcggtctaactggatttttctcgatgctgaagaactttttaaaaaattcagccatctaggtcacacagcaaatacatttggcattaaattcctagtatcactaaagtactccctcccaccgccgcgcccccccccttccccccgcacccttagacctgggcaagagagacttctatcctggactccatgctttaaaggaacttacatatcacacacacacattaatttaaaaaaaaataggtgcccctgccgcttgtgatctgatactgaacactggctcataaccataaattccctctcccagtgaagaacactattcaggccccaggaaaactcttcttcctatcttttgtcttctgtcctcaaaacaaacggtgaactccaaaagcagtgaaaatttgtacatagcatggctgcccatttcagagactgctttggagtcagaatttgagcagcagaaatgcttaggtaagagagaagacaaattaacttgtcaaatccttcatctcagcttgaatgctatagattcctgcatgacaaagtattgtttctcagtagtatcaagcatacattttccttttgttagtgttccaatgtgtggctattacctacagacaatttagtatagtattcacaatagttactggccttcattcgcattcttctgctccccttaaatttaggagtagatctggaatgaaaataagtattctgagtatttcaggtatttg

SEQ ID NO: 317951 - DNA, 4001 bp, Homo sapiens
ctccgccctgtaccccctgctaggtcacggtatcggtcagacgcctggagtcgggtttggcccccagccacggtggcatccagcaggcagcgccaggcaccgaacactgtcctgcccctccccagagaaggtctgtgttgaggaggagagcactccacagcttcatgagaccacccccaccccctgccccctgaccaacaccatgggagacagagtgctttcccatcctcccttgtctgggagcccatcaatcgatcagcccattagctcagccacaagcctcactcctgccctccaccccacccacagtgtccttgctgggtcagctcctctgctgctgctgtgtcagctctacctacagctcacgtgccttccccacttgctaggccttcatccccacaggttcctggggctgagctccccatcactttttggcctctgtggccctccccctccatagggcccacctgctgtccatctcaccgctccggtgcccttccctcttcaggaatgggccagccagtttctggagtgcctggtgaaaaagccatcacagaaccaagttccctttcaaagacccaccccaactggcagaatatgacatcagagtataatcataccattctttgggtacattatgtgccacttgctttgctaaatgccttatagtcattaatttgtttaatccttacaacaaccctacatgaaggtaaggtattattattattcccatttcacagagaaagaaactgaggtcaagaaaggttaagtaacttgtccaaggtcacatggctataattacacagcagggatctgacaccagtctgcttgactctaggcatctgctcttgaccacaatagggataggtatggacagacattactggtgatataagagaggctggaacaagaggtaaggtccagagaaaagtcccatacctgcccatactcccgttcaatggctgccctctgcttgctgtaggatctgcggagattgcaggtcgggggtgaggtgggggataaggttatgtttggtcctgttctcccatcctcagtcctctactctgggcaggagggagcggttggggggagccaggttcctagagtgtaactacacccagagggaatgggactgatgggagtccttgagatcacctcgggcagctgcaacacaggaaaccctcaccttactgccccgggccccagcaggatcctccccaccccagaggttcatctgtaggcttagaggtgaagactgatgggggcctgggtacgatgtctgccagccttccaacaggtctggaagagggagagggattctgccctaaggttgattgtggggttgggggcagtggtgtggagtcaagggctttgagggagggttcctgtgtgtttatgtgggtgggagggggttgggaggggttaggtgggggagcattcctatccagtatctggagaggccaggcctagggtgagggctgtggatgggtcggctggggagctcttggcccctgttcctccaccccagcacatgtatattggggagaagtggcgcacaacgacgaaggtgagtgtaaatgaagggggttgggggagctacctgatgtcctccagcagatccgcctccctctgctgccaggtctgaaggatgctcagctgttccaggaagcgaagcttcacctcctgggccggcttcacctgtgggggcaaagagaggatgaagaccccagcgcaaggacctaaaaaacactccgcgcagggagcggtgagggggcggggccgggggggtgctgagctctttcctctgttacttctggtttggggtctgaccccttccgacttcccgtctcctaccacaagtcggatgcccccttagctccctccgttcccccagcccgccaggagtccccattcagggccaagctcacttttcggggcggcggctgcatctccgctccagcaaggcggtcagccactggactccggaactggaggaagccccgcccactatggagccccgccccaggccaggtcaggccccgccctctgcccgcccacgacttgtccggcgacgtcgcagggcgcggaagcgagagggggccaccgagaaactaaacctgttactgctgcgaatacgccggcagggtccgggtggcggggcgggcggggcggacgcagcgtccgctgggcggtgggaagaaccccaggcatctgagtcaagacgcctaagttctatttgtagtgtaaccactgattcagcctgtaattattgataattattcatttgcatatgtagatccccagtccccgagctaatgatgaggaatggagaggaattcagtgtgtgaccagggaaactgagtcactgggcacctgagcaaagatgcatctgacgaagagagggctggtcccagaccttttcctaattcccgcttaactggaaaagccagcgtgagcggggtgagaaagatgcctggatccaggaaggaaccaggcccaaagggaaaaagacttggccccactgaaaactaaacgataccagtgagtcggcgagagctgggagatgcgcaggaagcccctgccacctttaggatcttccagccctagcactgcttcctgaggagcctctccccaattcctcatcctcctcacctaagcttctttggctcaggcacctgtcccagtacccctgacatgtctcaaaactccagattcacattccaactccccactgacacctctgctagtatatctaataggaacctcaacttttaaagcttttaaacctccttcaacctgatcctccccccgtaacgttttaaatggcaccgcatttcctccagtcagttaagtcagaaacccagagtcaatgtgccttctcctacccctacattctatccatcagtaagtcctacaggttctatttcaaacaacaataaacaaacaaaaacctcttgatccacttccctcaatttccaagaccaccatcctagtccaagcccccattattagacttctggtctaatatctgatctccttgcttccacactgccctcaccccaacccactgttcacacagcactcagagtgatcaaccttttttttcttttttaaagggaaataagatctcataatttacttgcttaaaatgcacttgcttcagaataaaatccaaatagaatccatggccttcaaggctacgcatggaagaccctgctggtctttcttacttcagcctgtactctcctcccactgtctgctcactgtgctccagcctctttgctgttccctcagtagaccaagtcccttccaatgcagagttcttcatgcctgctttctttctccagaatctcctccttccagcgttccatctgtcgcctccaacagcttctttcccttactttgcaactcttcacagatgccttccccatccacccatccaaagaccatctccacaatcactcttttttttttgagatggagtcttgctctgttgccaggctggagtgcaatggtgcaatctcggctcactgcaacctccacctaccaggttcaagtgattcttctgcttcagcctcccgagtagctgggattacaagcacgtgccaccacaaccagctaattttgtatttttagtagagacagggtttcaccatctttgccaggatggtctcaaactcctgacctcaggtaatccatccccctcagcctcccaaagtgctgggattacaggtgtgagccactgcgcctggcctccacaatcactcttcaagctcatcactttggttcagtttcttcacagcactaaactcacttgttcaagtactggtttatgtgtttatttgctattttctgttcccctccacaacggaggattcataagagcaggggccctgtttgttttgttcatgctatatccccagacctggcaccaattaggtgcacaatacatatttgttgaatgaatgaatgagaatggtagtcttttggttcccaggttt

SEQ ID NO: 317952 - DNA, 4001 bp, Homo sapiens
aaacttcctgaaaataagtggtagacatttagaaaaacaaagaagctgaactcacctttgacactttttctattaacatctgcccccttttcaagtaaatactgagcaatctctttatgtcctttgtaacatgaaatcatcaagcacgtatgcccatgtcggtttgacacttccaaatcagctttgtgttctacaaggtacttcactatttccaaatggccatcgaaacacgcagctcgaagaggagttgaattggttaaagtcgtgttgttgacagatgctccatgatttaacaaggactggaccaccttcagatgtcctgctgcagaagcggcccataaagggggagccccctcaatggtttcgccatcaaaattgacggagcccccaacttctatggaggcactgcattgctctaggaggaattccaccatgtcaaggtgcccatacctggcggccatcaagagtggcgtggccccatttgttttttcagagatcaaggaggaaacctcctctttggatttgcttgccaacaatttggtgagaagccggagtttgccatcccgagctgcgttaaatactgctgtctttagatccatttatgtccagttgagaggctgtgctttatttatctttcaaagcagagctccagtttaactctatcgacacaggcaagagtcacaggaaccaaagtccaatgttaattgctgcaccccagaacggatacacaaccacgaagagtatgttccgtcctactgctttccaacatctgacaaccagggcaccaaactagagaaagaaaaaaaaagtagcagcatttaattttctatagaagaaggcaaaacacttcttaatttccacttctgtgggaagaaaggaataaaagctatacttcaggcactactccatcccacacaccccccccacccccaaagaaaaggtggtaaagaaaaatacagaaggatacacagagacccaaatgttctggtcgcaggcagtctcctccatgtgcggaaaatttaaacactacaggcagcccgttttctcgcctccagctctaaccagccaagctttgttctagttttgctttgcacacgcccagggagagtacaaccgaaagaggcaggagactcgggttcagaaatgtttctctttcttgcaactgcaggagagctggccaagggcgccaggctggaaggcctgaggccgggtttcgagaaagaacaaaaaggtcggacacaccaaaccccggctaaggccaaaactgtgccccgaaagattctctttcctttaaaactactcacggctctcaggaaatccgcctgccttttagtcattaacttcgcccgccccatttcgatcaccccccaccccccgccaagggatgatccgcaggttcctcaaaccacagtcgccccaacacaaccttcccctctccctgttccagacaacggcagccccctcccaatctcctccatcgaccacaaccccctcccgatgggccaagctgtggcctccagcccgctgcccgccttcggctcccccggcgccctccttcccgcccaggccttccgcgggcacctcaggccccggcccgagccctggcaggccgctgccgccgccactacctgcccggggactagtcctccccgccgccgctggtcactcgggctttgtccgtccccttcaaagggaaaccgttgtccccaccgccgcccgggccgccctgctccgcctgcggccgcacagctcctccatgctccgcgccccaaaggaatgaatccggccgcgctgttcgccacgccccgccacccgagctgcctcccgcccttagtcggctcggactgcagcggctgcagcgactgctgcgacggatggtgtaatgggctgcgagccgggggccggacaagcctgagcgtcacatcactgactgtgccgccacgccattgggccgggggagggcggcggccgcggccagcaacagcctaggcgcggggcggggcgtcgcggccggggtggggcgacggggagggggcggggcctgaactactgggaggacgtgcctgcgtgcaacgcgctggggggcggggcgctgcgagggggcggatctgtgcccatcgaagcggcccgaggcagctcgagttctgagatctcgctggctcttctcctctcggattttcggggtgctcccttagggaatctttcggtcccatctcagagaccccagaagggaagtgtattagtgcgttttcacgctgctgataaagacatacccgagattgggtaatttataaagataaaaagatttaatgcactcagagttccacgtggctggggaggcctcacaatcaagccagaaggggaaaggcacgtcttacatggcagcaggcaagagaggaaaatcagagccaaggaaaaagggaaaccccatataaaacaatcagctctcctgagacgtactcactaccaccagagcagcatgggggaaacagccttcttgattcaattatctcccactaggtccctcccacaatatgtgggaatcatgggagctaaaattcaaatttgggtgcggaccagtattaccctcacacacgtgaagtctctcggactagtcttccgtccttactttggtgggccctggaaattaccaagctcgtaattacacctcagaacacacacggaggaaactgaaatttcagaaaatgtgattagttttggaggctgtcaaactgactctctttctaaagtagcctctaaaaagcataaaggctacgaggaatggtaaaccctaagagcaatgtaaagtcaatgaggtcaggttcttgagctctgagtaataaatcgggaactaaagcttaaaaggttatatatatgaatgaaaagaattacttcttcatatagtagttgataaacctctggaatttgatgctaaaacctacgttgcattaaactaggatgaaaaagtttaaatgtgtttgggaaataacgcccataatgaatcctgatgagaaaacagaatttttgaaaatggaccttcaatcactttgtttgagggaacttaagctcacataattccttagtaccactaggagaaatagaatattacagtaggcagtctgaccctcagcatatgtaatccataacgttatgttagaagtcatgcagcactaaaaacatttataaaaaatcacaacttcatttttgtatattgtagtgttgttcagaagtttatgtagttttgcataattgaaataattttcatacaactatatattttgcttttcctttctatactctaaacgtttcttatgtttttacagtcttaataatttttaagtatagcatagtatttcccttaggtagtcagtatcagactacactcaacatcagattcccaaaactgaagttaaggtaattgccactgagaagaaaatataaaagaatagagtataaaggataagattgaccatccataaaaattaaccagccaagaggactggctgttttatccccagcatatgtcacagttctatactctcccagggtacagataacagtgtacagtgtcccaaccaaggcctaacctgagctgacctgtctctctcacctaattcaataagatgtaaacattcacatcagccatcttcaaactgagctctgtatccctcatgggattgttaagggatagacggacacttagtttaaaggctaccaatttctgctgtggctcacacctgtaatcccagaactttcggaggctgagacaggcagattgcttgaacccaagaggtcgagaccagcctggacaacatggtgaaatcccaactccacacacacgcacacacacatgcacgcacacgcacacacacacaaaaaattagtcaggcatggcatgcaggaggctgaggtggcaggatcacctgagctgagctggggagatcaaggctatagtgagccatgatcacaccactgtgctgcagcctgggccacagaaggaa

SEQ ID NO: 317953 - DNA, 4001 bp, Homo sapiens
agatcctaggggtaactgtaaggcagaaggatgacccctgaaggtgcctccaaacatctccccaattctaactggcaaagagaccacagagcagaaattaccgacgacaccactagcttcacacttaagatctatctcttgattagactcttggaggacacctctggccaagaccggaggagaaagatgaggtgggggataaaagcgggagaaggtgacagataggaggagagctggggaggaccgagcgggtcaagggagactgcggggctccagaagcaggaagggatggggggaataccaggggttgagaatgcccccgtagcgggacggcggcgcccagatgagtgccgccgagaaaaggggtgagggtacaggcaagattgggtggtgcccacagtccccccaccaccccgcctcacgcccatcagcccccagaccccgcgacggggcggagccactacgcccgccacagccctttcgcgccggcacccgccccctcagccttcgggtcccgggatggtgggaggggcggccctcgtggggctgggtgtgtagcccggcccaagccccaaccaggaatgctctgctgcgggcgggaggatgagcggatgaccctgcagccagggacgggggttggggggggcgctggctgagggcggaggaagagcctcggcacagcccccaacgccctggccgaatcccgggcgcccctctgcgggcaggcattgttgcccccgctctaggcttgccttccctcctcttcccccctccccccgcgttgccccgggcaacagcgcctaccgccggcggcgcgaaacgcacctacctagaacctgacaagcccgaacccctcagactccggagccagtcaccaccccgcgtcacgggggctgccacagccaataggcgccactgtcacgaacctctgcaaccaatcccgctgcactccggtctccgggcaccctcgaggcctcagccaatgggcaagagcggaaggcgggcgcagccgcccggccctcagccccctcctccactacctcccaggaggcggggagcggccgattggcccggtccccgaaggggcaggacttgggccctaggctgggtgggcgcacgcttagcccaagctgcgggccctgggagtggagacgcggagctgcggtcgccgctttctgggctcgctcaccagcccgggtggagtcccgaggtctgcgcgtttgtgccgctctccccgcctcggtaacctgctcctccctagcgggtgtcctgggctgccgtggtgagatggggccggagacggacgaaggcctcacaggaaactttgggaggctcgcctggccgcggccgggaagtggccggaccggcgatgataagctgaggccgcctggaagggactactcggcgggtcggcagccggaaaggaattcggagagtgggggcggaggcgtgattaaaatgttaagtgtgcccggagggcgctgggcgatccctggagctgaaatctccgggaagggaagctgctttagggccgcgaggcccccacccctaaaataggcacttttcagcctcagaattggtcactttttcctgtacgttcccacgttttacttgtatctgttattaacgtggattgctttagaatggttttcagcaactccagtttactctgagtcccttaaggacgggaactgtctttcaatcctgtactcccagtgcctgagcctgcctaaaaatgttagaaactcaatgctggaattgtaatggatgtttaaaagcatacagcaggtcctgggagtggccccctataataaattcttacctcttcgggagtctagaatgcgtggagaacccaaacgggtctgctcttcagtgatggccgtttctgaagcgtccttcaccaaaagaatttggtgaaaaatgagtaatgtgaactacaagattattactaggtgatcagtaacagtaggataggtatgcgtcattattcgagggtgtgaccctcccatgttcctgtagtagactttttaaggcggtgttatcttttgcattggttgaaccacatagcgtcaatccggtatttcccctccctctcaaaaactgagttacataggagccaaagaagagtggtgaatattttctctaagcagggttatttatttaaccgtagagaacagccctacacataaaaaaacataaatcttaagttggactttttttaagtctactgttttaaagctaaataaacaaaaaccaacataaaaattttaaataagaggcttaattctccctattgaaaatggaggatgagatttcccgtccctttctctccgagcatttgtcttagaaaacttaagtactttcttaattgttaagtactttctcaactctttgaaatgtgtataaatccacttgaggactagataggtcttgtcaactgtatgctcagtcaggaatgtctctggaccttttttttttttttttttttgaaatgctgcacatatcaacggagtagcatccttccctatctcccagtttctgtgagagagtaggagcgtaacttcggtgagcaacttgctccgtgttgcaaaactaccttccgtcataaagacaggagaagtttgtttttcctctggataaaaccaattaactaacacagatggtcaccccaattattaagtaaagttaatgtcacaaatgtcaggtcctcttacttgaggactagttattgttcaacttgaaaacgtgtatgtaatgggtcgtatatacttggctatacaaaagggcaagatttctgtctttgcaatctcttagcaaattgcctgtgatgtgtatcacagtctcgtttaatgcttattcagtaataaaagtgttttgtctactaacgtttgtggagaggatttctgggttgggagattttggtttttaattatatttttccaacaatgcctatacccagaatgttgggatgacaaagttaaggaaagtagttacttcggagtttttaaattgttctctaaaatgatggttaatgtttcatatgtatttcatagtgattgttaaatgcacaaactgtggttctgtgagtaaacttcttaaaatagaagttaattttctgtgaacatcaaatgttatagtatatgtaatgtcaataagaatgaaatgaatgaaaatttggttaggtaaggccaaaatacaactttggagactgcttcatgactgaatacctttcccaagaaccttagaatttctccatttatacaaagggaatcaaaatgtagaaagatgtggttggtgaatacgttattacatatttgcagaaagtagctttcaataaagatatggtagaaatagagctgtttgatacacaacatgtgtgtttgtgttaaggaacccaaatctagaaaaatcagcaagaatctttccatatctacaattgttctctgagttctcacctattcattccaaaaccttaaaagctgtctaccatatgccagtcattgtgctaggaaatgcagttgtgaaagaatatacttgaagtaaatgaatgtggcaaaaatctatgctgcatttttgaagcatacaaaaatatatagcaaatccagtttcacatttttttcctctgttggaattatcacattgcattgcaacacatttaataaacactgtgtgtcaccttagtatatattccatgttctcaaataccaaactttgtctgttctaatagcattacttactggacaatgaaaataataatgtggacatcaaacctaggtgggtaataaaaaatgattgaaaagttttttactttttttgattagcaccatccatgcctcaccccatctctccacctcccttttttcctgtttaaaagtatagactgcaagaggaatcttggttgtgtgccatcttagttcagtagttccaatacttacccctccctccttttcttcatctgtgtctcttttctgccaactcctttgatttgtgactctctgctt

SEQ ID NO: 317954 - DNA, 4001 bp, Homo sapiens
ggggcaacagaagaaagtctctctgagtccctctgccaacagcaaattgttgatcttgccttcagatcaacatctcaagaggggactttcctcggaagccctcaaagaccaacacaaagaaaacaaaggaaaagggaatttgcgactgtgaatcagagtctccaccaaaatcctcagtcatccacactgacaaacagctccagtaaactgctggccacccttcactagacatcacttcccaaagcgaggcccactcctttcagccctgatgccactgctgctggctcactgttacacagagctggtggaggggcagcctggctcgccctcagccgggatgctcaagtcctcccactgggtcggggagctaactcgtaaacaatcgcatccctgtagagaatgaaaggaaaagtgccagtcaccagtgcagaaaggagggaggcaagcgggggtggtggggtggtgggtggatgtaacatagctagagaataatggagtgtttgaattctgctgaggcagagtgagcccttgggcctcccttgggtctctgaaaagtgcgtacttgattaaatgcctgaaatttccatctcagtatctggagggctgcatttctgaagtgctcctctgcagcagccttgcatacctttggcatgtaattgtgatgtgggtgtggatagtgtatgtgccagagactctgtccattctgactccttctttcctagtgcccatcggaggggtactgaaacgaggatgtgatattccaagatcagaaaggaaggaaagaagtaatccgagtgaccatggggccatgggaataccaccctaccaaaaccctgagctgacacacccagataatcctaaacttcagcctgacttctatatcaaaaggttaataaaatctaagctgcccaccatgtggacagcttttccaaggcagctgaatatccaggcttcccaagagagagctagtgtgacacagcacgataatgctagccacactcaccacagccagactcaccgcagctttctgcttctgccgaacctcaagggctgcatccagcactttagtaaatgagaaatgcctgccccctccagccctgattcagggccagtgtcaggcgggcactggaggaatggagataatgtggcggcatggtgcattcatatttttgcagtctctaaactagaagtactatttttacatgtctgtgacatcagcatgcccttcccccagagcagtctgcaccatggtttaaacccagccaaaggtgagcttcttgagattcacttgcaggagtcctggttccagtgctatctgcttgaaacattttctttcttctccaagtagcattacatttgcacttggacacacacacaaaacacacacacacacacacacacacacacacaacctcagctataacctgctctgtttcccagatcagatgccctgattcttacctaaagagcttgtaggccgagggctgtacctctctccacactcgctcagtgctgtcccaggggaagcagaatccacttggtgtcttcttctcagagtagcccggctctctgaacctccaggctactgcagctctgagtggggagagggacgggccgtggcatgcacatcaggttgctggcctgcctccagataccatgccacagagctggctacccgtccctagggctctgtgggaaatcgaggtggggggggtgtaggctgggggagccaagaatgtcagcctctaggtctatctccggtccttgtttatcagtagaggggacctgcctttagacaaccgcccactcccacaccacccgcagggatgcacacagctctaagcaacccctactctggacagccagcagcaggcccaggaacacagagccattggccagccaggagggaggtagagacagaagacggtggcagcagctaccctgggtgttattttaacgtggtttgtcttggggcaaatgtgtgagccgaatggacttctggcccgtctgagcagaatcctgtttattttgaggcctgagttgccagggaaacagcaggtcgtggctcggagactctcctctggagtcagaaggctgctggatgaaagggaggccttttctgttctgtcatctggcatccctgcatggggtgtaggtgtctgtgtgtggcaacgtgtatgtgtgcgtgtgtgtgtctgtctgtgccatccccagagccaagccctacaaatggcattttacgaagtcaatcgaggcaaaagccatccaggttgggactggcgaggggctgcagaggtggcagctctgtcctccctctccactgttcaagcctgtccccgttggatgaggtgaatcctcaggtgagctcaacttcaggggtgggaaattcttcaatgggccatggacatcctctttagacttctggccaggacagggtaaggaagggagggagctgtctggacaaataactctttggctagaaggtggggaataaggtggactgaaaggatatggatcaagagctgtctttgaagaaaccaaatgaaaacatgattaatagtttccaataattgaagagtcgctcctgcttatgcaggcgtttgagcccagaaggcatgagtgtgtgtgtgtgtgtgtgtgcacgcatgcactcccatgtatgtacacaagcctgctcacctgatgattcaggtagagaggtacagatcgacctgtcagaactagaaatatgctctccagtctctacctcctctgggtagttgcttaggtgtagagaggatggagttgcagtttgttccccacactccccacagagcatgggggtgtggggaagccatccatgtgccttctgaagggatgagccttggagaaggagctcgtgtcctgtactaaagagctagaggctcaatcatcacagaactccaatcacggataagcagcagctcccaaaagggacttgaatatacagaaaatgttgatttcttgagaccctattaattggaaccctcatgaactaccacttctacacctgcaaaggatactgataatttgctttaaaacataataatcttcctgagtatctgcaagtttccaaagggccttctgaatccttaaagaaaatattttggacaatggttttccaagtattaaagaatcattatgctagatgtagtatgcatgttaaccctttttaactacgtgaaatgatagacttgaaagttagaaaataccctaaaaatcctaaggacagagatgcagactcagagactcactcaggtggtacccttagttaaagtcctcattgtgactaaaaccaggtctccctgctttaggttaaccccgtgttaacctgcctgcactgtgtggttggccattgttgggcaattcagcccaagggctccagattccccccctcctagtggaaattaatgagactttcctactcatatcttccctgcaaactcacaggattatcatgacaatcaaatgtgtccaagtgtgttcgagcaccttgaacgcagggaatgcaaatgcaagtcattattttattttatttctccattatgtccagttgtgaaaccctgtttaaacacacacactcacacacacatacacacacagcttttaggcaaatataatccctagctactgacatatgctaatttatctactgcatattgggtgtttggcaatattactgtccaaatactgggaaataatcctcagttaaggtatttactgtaatataattcccgccaatgtggaaattttttaaaatttcattataatatccttcaatttctacatttatttgaacttctgttactatctagatttaccttttaaataacatatattgagatttttcccagtctggagacatgatcatgtgaatgcttttcagccccactgttatttagagtaggaagggactttgcaatgacctagtcgaaaagtctggtctcagaatagccctccagctctgtgcctggaaatagtca

SEQ ID NO: 317955 - DNA, 4001 bp, Homo sapiens
ataattggatgtatcctcaaacccagcatatacaaaacaggccttggctttggttccaaatatgctctaagtccttgctgcctgtggctatgaatggcatcacccaaaatcttaattcttccttagagatattaactaaattttgttaagtcaaatatacatgttaaatgttaaaggtaactactaaaagaaaagaaatagaatgtatttagtccaagcggcaactggtaggcgtaagggggataaggtggaataaataaaactgtgcttatcttcgtgaccagcctgacgaacatggagaaaccccgtctctactaaaaatacaaaattagccgggcatggtggcgcatgcctgtaatcccagctactcaggaggctgaggcaggagaatcgcttgaacccgggaggcggaggttgtgatgagctgagattgtggcattgcactccagcctgagcaacaacagcgaaactccgtctcaagaaaaaccaaaaaacgaaaaaaaaacaaaaccctgtgctattccaaaataatctagaaaaagaaaaaaagaaaataaagtaaaaaaattgctcagaattaggtggccaaaataaatccaaatatatgtataatcacaataaatgtaaatgtgctaaatttactagctactgttttttttttaactccatctgcactctgattacaagagacacatttaaaacataatgacatagagaggttaaaagcaaaagaatgaaaaatagataccagacaaatgttaacaaaaaaattgaaaactcggctgggcgcggtggctcacgcctgtaatcccaccactttgggaggccgaggtgggcggatcacgaggtaaggagatcgagaccatcctggctaacacagtgaaaccctgtctctactaaaaatacaaaaaaattagctgggcatggtggtgggcgcctgtagtcccagctgctggggaggctgagggaggaaaatggtgtgaacccaggaggcggagcttgcagtgagctgagatcgcgccactgcactccagcctgggtgacagagcaagactccgtctcaaaaaaaaaaattgaaaactcgtgtggctatattaatatcagataaagtaggtctaaggcaaaaagaatgactaaagataaaagggattgccacataataagtggattaattcaacagaaagatatacaaattccaaacatgtatatatctaatgacatagcctcaaaatacataaaacaaaaattgacaaatatgtaaagagaaagtgacaactccgcaattatggtgggagattttataatacatttctgtcataaatgatagagcaaacagacaccaaatattaatatgtagaagattgaaatacacaactagtaaacttaattgatgagtgtataaaagaaccttgtacccaacaatgaagtgaacatcattcttatcaaagatacatggagcatttacgaaaattgaccatgtaccaggtcataaggcaagacaacccaaatagaaaaatttgtttcattcagactattctttgggcagaatagaaatcactcccacctgttcagttggtgaaaatgccctttcagttttacctttttagtgtctcctaaagccatcctcttttctccagcctcacttctgttgccttagcacagacccagcacctgtctcacctgggctgctgcagcaggtcccacctttccagcactgccttctttcaatccactgtcaattctgctgctagtgaccattctaactcatcactcccctgctgtagatctttgactgggtcattgatttcccgttgtctttccagataaaacccagactcctgccatgacctgtgaggctctcatcatttgaccccttcttaaccctgtgactttttctcttattggcctctttttatagtccccctacaccctcatactcacccaggtcttagcccaaacattgtgctgctgccaacagtattttttctctctctctttttctctttctctttctccctccctcccttcctccctccttccctcctttcctccaccctttcaccatggtctgactaagtcacactcacccttcaaaaatttagctggatatttcggatatttcctcctcgagcaagccttatttggacacatcccccaaccctaacctccctactctttcttaaaattcacatataccagtttaggtgggttcattcccctgtgctctcccaacagcagacagcatttcctttacttcactgcagcgctgggtgtaattcccatctatatccccctgcctaaactcttcagtgatttcccattgctctgggacaaaaacaaaagccttgctgtggcctgcaggactctgggaggttcagcccttactccccctctgcctcatttcccatcacgtctccctccaaacttgccttccattttctgattccccccaccctaggacctttgcccatgctgttccctctggagtgatgttcctctctttctctctaccctactcccctggttaactcctaatttttcttcaaattttagttcaactctcaattcctcatgaaagcctttcctgtcttccctgaactgagtcaggttcctccagttctcataggaccatttaacatttcttcatggctcttactaccagtgtttaattacacattcactcttgtgattatttaatgtctcttttcatgactggactgtcagctccatgatagtacaaaccaattggtcttgctcacaatggtatcccagtgcctagcaaaatgcctgacacctgatgggcatttgataaacatctgttgaatgggcaaatgaatgtaatttaactacgtttacttcactgactccttcattagtctctgagaccctgggacagaaactatgccttttctttctgtatctagcattgagcaaatacctatgcattattagtgtcctgtgaattcttgttgattgaagggccagtcctttctcaggagcctcttgtggaacatcttatcagactacctaattagcaggtgatgtcctataggtattgacaaagaagctaagccaagagtctaaatgtattttaattgggttcaaattaggccagaataccctacctttggttaaaggcaggctcaaaccctgtcctcatcttgtaataaatacttccttatttctttaaagaaaatactatggaaactaaggatctcagaaaggaagtgatcagctcctttagtctcaagtctgaacttatctaaccaagaaaaatatttgtagggcctggaaaaaacatccaggctttttttatttctgccacagcgtgttaggctggcagggccccaccttccactccctggtgaaggaaagtttgccgaagaaagggaggcagtgtgttctttgctttctatttcttttgctccatgttccatggtctgtactgggtctgaggtaggagtgtagccatggctgattggcctgggctagcatctcagcatgctgcccccaaaccagttctgttccatgagctgaaatctcatcttccgtggttgacagtaaactgtggacttgactatgggatggacttgacaatggtgtgcaggagacagctcccagaagctcatgaaagccaattattaaatattcaggaattttactattattaaaccattaatatcttgaaatcaaccctggtgagagtatttatatcatagaaattggcaaatgccagggcttttaaaattctccttttttttcccctctgatagctggtttacccagcatactgctaaacttgggtttgaatcctggttggacactcactagtaaatgactcattctcacagtgccccagtttcctcatctgcaaaatggggctgcataacagtagctactgaacagagtcactgtaatctcagcacttgagaacttgtaagcattcgatagatattagcttgactatcaccagctgtgtacccttttgacacttttttttt

SEQ ID NO: 317956 - DNA, 4001 bp, Homo sapiens
cctggtgcatggtctgggagctaagccacagacaagcatcctgctgtctttcctactctcaaggatctctaggaataacatgccatggagtcttttagtcaccttttccactaataattatccttcctatgagaacttctgtcactaatacatttttatggcatgtaagagggaggagctgctatcagatgagctttgagtcaatctagaccattgcaaaaaagcaacatagagtggcaaccattgacttcggccaccctgcatctagccccctttgtcctgggatgagaactctgatcatttctggggaaacaccccttcattgctttcagtccatgcagttttggggatgggaatgactccatgcccatggcaaggatgggtacagtacccacattcgttctatgagattgaccctgagattctagctagaactagaaagggaagcacctgttcttgtacggtgctgtgctagtaggatgtcagctgggaggtgctgcagccatgtggccttcacaatgggcaggtcttcctggaaacagaaggacgcaggggaggcaaagccaagatatggaaagacagcttcatgatgccatcatctaggcccctggatctcatgataccaaaaccttgctttttcaggcacatgagttaataaaaaaatcctctttttgcctaaatctcttcaaactgggtttcagtccatggttactaaatgaatcctgacttattcaagtaatgaccttgttcctaccagaattttgttggttgcttcttagcatgggtatttgtagtccatagcccaggggcagactacatccaggataacagtttgtgtgtggaagtgatagtggcgtctatccatatccctaaatggatataggtacatgttctatgaggaggcattataggggagaccgaggctgcaaaatctgtttctcctctttgtctctgaagtctgtgtacagagcaattttccccaaacccctgattttattcctcttgttttcaaccagagaaaggaactcttgaatctgttaagtatgttttgcagggctctaagaaatcaggaagagatggggaagggaggtgatggggaaaaagaggctctgcatgtctcatttttgttttttcctttttgccaacgacaaagaatcagctggcatccttttattttctatttcattcagtgctttttaaaatgaagcattaagtctactgtaatgggatttgtctaatgatttcctggtaaacgtcttcttggatctcagcaaagataattcacttagtaggaaccatttcctgcttccccactaagaaccagacctacccagttctttctgggagtgaattggcctttgaatgagagaaggcagtacaggaatatttcactctagcattcatcacatagactcaagcttgccacagacccagatcagggaggagaacaggaaggcgggggtgagggagaacgttcacgctgagcacaacatgaagccaagcagaaagtctgtagcaatctgagccctttgcagaaacagatgcactcacctctttgccttggctctggggtgctttctttctggggcagtgacagcttctgcaatgtccacactgttctaccaggacagctgcaggcaggctgctgcaggaggaagggagttcccattcaccatcagaagggagtgtcctcccagaaaaggaggcgatgccctgattcccctggagcgaaggctgttggatccacttgtcctctctctcctgctccctttctggtatgaatggagctcagagaaaccccatgagaagaactgagtgaaaccacacaccatacccacccacctgttagtaggttggcctcctagccttggggatcctggagaggaaggctgccgagtgggtcatgaggcacttgggcccctacaagtgcagctgacactggtatgcccacagaaaggctaaggacaagcactgtatatttatttctccccctctcatgtgatcttatttttggactggacacaaaagctatttgggggctggacagctgccaggtgaaaggacaatgatctcatccgaattctctccatgcctctctctgcactagtccctgttacctttcccaatatgaggcagaagggagcgggttttgctctgagccttactttcagtacatccaagcaatgtgtccaacttatcatttttcttcaattagctgattgctaccttttgaggtttcacagaggatcaacgtaatgaacgaagtccttacttttatgtctgaggcaggtgagtatttctgagtctggtggtcgtgtcacacagtcatcatacacactattttagatgcaaagatcctcttttcaacaccaggatgggagccccgaccctgaaaggcagatgtgggcaacgccacagagctaggctctcaatgtgttgattctgccttctgccctggctgtttctgcctctggctcctaggcttgtaaaacttacaacattgagacagtttgatttttcacctctgatccttcctcttcagacatgaatggaaagttttgaaaatgtcatgcctggcaagatgccaattcaatatcgtcctcttcaccattatcactgttatttactgggctctttcttgctgaatgcccttcatttgaggagtacttctgcattcttgtatttaatcctcacaacaccgctgccaggagggtaagattgctcctatttgatatccagggaagctgaggtttggaaaggctcctcacctaagctttggagagggtagagtgggatgggaactcccgactgtctgagctcttggccactttgccctaccgtctcctgaagatgtgaatcgttgacatttcactgttgttttcacttcataagagggaaaacaaaacccttagggttgattcagacccacaacttcaatccttgatttctgttccaaatccagttattgaaggggagagaaaataaggttttcacctgtttacagtcccaggccctggttctaggtacaggatggagtctctggccaccattctcgttggagccattttcctgtgaataattcgttgtgcaaacacacacaccagagaggactgggctgggccgcccaggccgggttcccactgtatccaagctggactgcactttccactaccctgagaaagagacagagagattgaaccaacagcttgtccaacactgccctctgcaggtcactgggctgcattaccccagatgggagtctgcaaggctttccaaagaggagggccacaccaaggattatttttagacaatcagttagttctccatttctgcagctactctttcctaaacctggtttgcctgagcacgtgtctgtgttcataacccttcccctactgtatgaaaggaaatcatacctgtcagtcttcacaaatcttaataaggtgccattgccccaagtataaaaatatcaaagtccccaaactaggaacttcctttaatactttaattcagtcttttttaatgattaattaggcattttttaattcaacaactttgcttttccttccttgaatattgagggacagaactgtggaagcaaatcaaagagaatattagaaataataacagattaataggtacacttgaagaatgatgccacagtttaatttttttttttttttttgagacagagtctcgctctgttgcccaggctggagtgcaatggtgcaatgttggctcactgcaacctctgcctcctgagttcaagagattatcttgcctcagcctcctgggtagctgggattacaggcacctgccaccacgcctggctaatttttgtgtttttagtagagatggggtttcatcagtttgaggctggtctcaaactcctgatctcaggtgatccacacaccttggcttcccaaagtgctgggattacaggcatgagccaccgcacctggcccacagtttaatttttaaattccagctttataatatat

SEQ ID NO: 317957 - DNA, 4001 bp, Homo sapiens
ccagctacttgggaggctgaggcaggagaattgcttgaacccgggaggcggaggttgcagtgagccgagattgtgccattgcattccagcctgagcaacaagagtgaaactctgtctcaaaaaaaaaaaaaaaaaaaaaaggaaaagaaaattaatcctttatcctttatcacaaacccttgtagcagagcacatctccccatgatctttttaaaatcctatatatacgagcatggtacctaggatggatgtgttcctcctcttacttttgggaacaccctactctgtcagtggagcagctgtgctttcaccactttactttcttaataaaaagaaagtgcttttgctttgcactgcggactcgccctgacttctttcttgcttgagatccaagaaccctctcttggggtctggatctctttcctgtaacagcagtcccaagatcctaatagtttatgtgtagttcacagaatgcatgtcacctaagtgagtggctgcactgtcccaagatgagatgtcccttcaatgtagatacggcatatggatgtccgcccaccatctccactgaatgttatcatcatggctggtgctactcacctgtaaagtcaaaccacttaaccagatatggcttccttgatcctttgcagaactagtcaagtcatatgtaaacagcagatttgagagagaatttaaaagaaactcattgtgttttctcttaaagttttgcatactaagtttgctttggattacatacttcatttgcaaacccatttattcacactaacaaaggcaggggcaacagaagaaagtctctctgagtccctctgccaacagcaaattgttgatcttgccttcagatcaacatctcaagaggggactttcctcggaagccctcaaagaccaacacaaagaaaacaaaggaaaagggaatttgcgactgtgaatcagagtctccaccaaaatcctcagtcatccacactgacaaacagctccagtaaactgctggccacccttcactagacatcacttcccaaagcgaggcccactcctttcagccctgatgccactgctgctggctcactgttacacagagctggtggaggggcagcctggctcgccctcagccgggatgctcaagtcctcccactgggtcggggagctaactcgtaaacaatcgcatccctgtagagaatgaaaggaaaagtgccagtcaccagtgcagaaaggagggaggcaagcgggggtggtggggtggtgggtggatgtaacatagctagagaataatggagtgtttgaattctgctgaggcagagtgagcccttgggcctcccttgggtctctgaaaagtgcgtacttgattaaatgcctgaaatttccatctcagtatctggagggctgcatttctgaagtgctcctctgcagcagccttgcatacctttggcatgtaattgtgatgtgggtgtggatagtgtatgtgccagagactctgtccattctgactccttctttcctagtgcccatcggaggggtactgaaacgaggatgtgatattccaagatcagaaaggaaggaaagaagtaatccgagtgaccatggggccatgggaataccaccctaccaaaaccctgagctgacacacccagataatcctaaacttcagcctgacttctatatcaaaaggttaataaaatctaagctgcccaccatgtggacagcttttccaaggcagctgaatatccaggcttcccaagagagagctagtgtgacacagcacgataatgctagccacactcaccacagccagactcaccgcagctttctgcttctgccgaacctcaagggctgcatccagcactttagtaaatgagaaatgcctgccccctccagccctgattcagggccagtgtcaggcgggcactggaggaatggagataatgtggcggcatggtgcattcatatttttgcagtctctaaactagaagtactatttttacatgtctgtgacatcagcatgcccttcccccagagcagtctgcaccatggtttaaacccagccaaaggtgagcttcttgagattcacttgcaggagtcctggttccagtgctatctgcttgaaacattttctttcttctccaagtagcattacatttgcacttggacacacacacaaaacacacacacacacacacacacacacacacaacctcagctataacctgctctgtttcccagatcagatgccctgattcttacctaaagagcttgtaggccgagggctgtacctctctccacactcgctcagtgctgtcccaggggaagcagaatccacttggtgtcttcttctcagagtagcccggctctctgaacctccaggctactgcagctctgagtggggagagggacgggccgtggcatgcacatcaggttgctggcctgcctccagataccatgccacagagctggctacccgtccctagggctctgtgggaaatcgaggtggggggggtgtaggctgggggagccaagaatgtcagcctctaggtctatctccggtccttgtttatcagtagaggggacctgcctttagacaaccgcccactcccacaccacccgcagggatgcacacagctctaagcaacccctactctggacagccagcagcaggcccaggaacacagagccattggccagccaggagggaggtagagacagaagacggtggcagcagctaccctgggtgttattttaacgtggtttgtcttggggcaaatgtgtgagccgaatggacttctggcccgtctgagcagaatcctgtttattttgaggcctgagttgccagggaaacagcaggtcgtggctcggagactctcctctggagtcagaaggctgctggatgaaagggaggccttttctgttctgtcatctggcatccctgcatggggtgtaggtgtctgtgtgtggcaacgtgtatgtgtgcgtgtgtgtgtctgtctgtgccatccccagagccaagccctacaaatggcattttacgaagtcaatcgaggcaaaagccatccaggttgggactggcgaggggctgcagaggtggcagctctgtcctccctctccactgttcaagcctgtccccgttggatgaggtgaatcctcaggtgagctcaacttcaggggtgggaaattcttcaatgggccatggacatcctctttagacttctggccaggacagggtaaggaagggagggagctgtctggacaaataactctttggctagaaggtggggaataaggtggactgaaaggatatggatcaagagctgtctttgaagaaaccaaatgaaaacatgattaatagtttccaataattgaagagtcgctcctgcttatgcaggcgtttgagcccagaaggcatgagtgtgtgtgtgtgtgtgtgtgcacgcatgcactcccatgtatgtacacaagcctgctcacctgatgattcaggtagagaggtacagatcgacctgtcagaactagaaatatgctctccagtctctacctcctctgggtagttgcttaggtgtagagaggatggagttgcagtttgttccccacactccccacagagcatgggggtgtggggaagccatccatgtgccttctgaagggatgagccttggagaaggagctcgtgtcctgtactaaagagctagaggctcaatcatcacagaactccaatcacggataagcagcagctcccaaaagggacttgaatatacagaaaatgttgatttcttgagaccctattaattggaaccctcatgaactaccacttctacacctgcaaaggatactgataatttgctttaaaacataataatcttcctgagtatctgcaagtttccaaagggccttctgaatccttaaagaaaatattttggacaatggttttccaagtattaaagaatcattatgctagatgtagtatgcatgttaaccctttttaactacgtgaaatgata

SEQ ID NO: 317958 - DNA, 4001 bp, Homo sapiens
tggctgtcacttatgaagtacactcaagttcattttccttgtccccttggcctgggggtaatgtcctgatcaaggcctgaggggatagttctgtggggccttttcagggtcagaaaactcacatgccagcaactttgtttgcatcagcaaacccacctgcatcatgcaagcacttgactggccactgactcccaacacaaagcagatatcaagatatgaagagggaacacacagggcttctgaactggtagggctttgtcttgatgatctgggtaaaggacaagaatgggtggcatacggtatgccaagagtgaacaacagcagccaccaaatagatctggctttgtgctggcttgagccacgtgggctcccagaggagacgctcactgaggtctgtgaaggccttgctgcacacctgcctgagagagccaaagagctgtgtgtgttggactgtggctttttgaaatatgtttggctgggagatgggaagacctgggatcctgtagaccagtgaaggggaggtgggatcaggacagactccacttggagctgagtcctagaaactgctcttctgttttttttgtgtacacaacatcaatgaatgccatgcatagcctagagtatggaataaatctctcctaataaatatatggttgcctgattaggttagtcattatgctaaacatttgtttaggcaatgcttaccagctagaaatattaacaaataaggaaaaaccaagtttttcttaaagaactaggcactttcacatacactatatccaacgcaccccaggaggctccatggcttctgcctcctcatttgaagaaaccagcttgtactgcctatcaacagatttgcaaaattgaatgttgtgatataattctcccttgaggaaagggctaaatcaaggtcataacaattatcgaagatataaagaactgtaatttaaaagacagtatcaccatatatgcatcagaaaaagagactacaaattacacacacacacacacacacataccccaaaatatgacaaaagccattcctgggtgctaacagtaaagatgatttttgttttcttctttatgtttttctattttttcctaattttctacaaggagcatgtattatttgtataatcagagaaattattattctgacaaaatcaattttaaaatgctatatatacctcttgctgcaacctaggaggcaataccctgagttactggctaaagttcctcactcaagtctccctctaggaaaatagggcttttccattttggattctatttgaaaatttctcagtagggaccaacagctgaccttaagtttcaaaattgtacccatgagagaggtgaccgctaaggaatcaggcttccttccgatcgcttattatgcacagaacattcttcttcatctggccctcactttttcatgttttctgtcaacagactcttagttatagtaaaacagatctacatttgcataccagctccacaatttgctaaccatgggatcttagccaagtcatttaaaatccttgtgcctcagtctgttcatctaaactgataggtttattatgagtatgaaatgaaataatgcatgtaagctcatgttagcgcaagcaataaaagttggctattatcattatcctattggcttcccccaaacatcttttccaattctcatgcagagaacattttcccgacttagctaggctctgtaatctcaaggcttgtagtgagaactgtggccttccagaatgtccccaggagccctaaaacaaaaaaggaaagccttaaaacatgcttacctgctggcccgtggctggcttccctgcagaagtggcaaagcccttctttgagcagtgaactcactcactaaggaatcccccaagagtctggccagccggccccactgcctggttgcctcactgagttggtgctctctttaagctgttccttttgttttctctgactcagaatatcttaggtcattttgagacagccttctcctccacaccttccctaattctacctgctgttctggaaatttgtcatcatttttgacggcccggcatctgaatccccaccccatgtatttgaaagttacacccgccccctcattccccaccacacacatacacacgtacatcttggtctggctggaccattcctgcagtgtgatttggggccaccacaccttcccagtgactctgggagcaaccccaggttctctgaactctccttctagagtcaattttggttgcttacaattaagaaaccaagccagctcctcctcatccttcatacctaccttagtataaatcctctggctgttggtttccaaaactccctgagcatgcatgtcatatgatttagcatattctgttatgatattttactataattgtctgtttatccccacacccccagactgttagctccctgaggacaaggactaaagctgtttagcttgtgatagtctctccatcatgggcagagtgcatggcacatagtagaccctcagcaaatgccaaatgaatgaacaagcaacaaaaccttagcacacatgagaggaccagaaacaagcacggtagctccacttggagaaccagttaactcgccagctttctgatattctggcaccactcctagtcggattccaggggaaatcagatttcttttaggctttggcaaggaagaagatcttccagcagcatcctgagtgggagggtgcattgtgggcagcgtcttgaaatgggtgagtaatcccccaggcagctcttagctttaaaccctggcttgtaatgcagtcatctcctgaagctcccagcttaaaatggaaagtggcattactcatggtgaagggcaggcaataaaaaaacatttaggtggggccagcacaatggagtgagtattccctgatggcggatgagaacgtctccactctgagcactcacagccctggcagacggctcagtcatagcagggcttttgagctacacctccgagttagctcatcacacggcacctcactctttggggtgctgggagacatcgcattcctcagcctacagcaggcgtggtgggaagaaatgcccctgagtcaatattggaaggtggtagaaggagtggatgagaacctgggctttggcatccaactgacctgggttccaatcccagctcttctagttactagctctgtgactccaagcaagccctctaacctctctgatcctcaagttcctcatctgtaaaatgagtaaaataatagtacctactacagaggcattgggataagtaagaaagactatccctacaaatccttatcacaatgcctggcatgtaatcaacattcagtagggtgacagctgctgtcattgacagagttgttcttttaccaccttcctccaacggcctccattactcctccatcctttctgttttatttctgtgttaatctcactcagcttccacacccttacttcctccagaagtcatcctttacctctgatattctcctgagctcaggccacagcccaacctccctccacagtcactgctcatttctatcttgtctttctctcccttactttgtttttttgttttttttgtttgtttgttttagacggagtcttgctttgtcgcctaggctgaagcgcagtggtgcgatcttggctcattgcaagctctgcctcccgcgttcaagtcattctcctgcctcagcttcccaagtagctgggactacaggcgcctgccaccacacccggctaatttttttgtatttgtagtagagatggggtttcagtgtgttagccaggatggtctcgatctcctgacctcgtgatccgcctgcctcggcctcccaaagtgctgggattacaggcgtgagccaccgcacctggcctttttttttttttttttttttttttggagacagagtttcactctgtcacccaggctggagtgcagtggtgcaatttcagctcactgcaacctct

SEQ ID NO: 317959 - DNA, 4001 bp, Homo sapiens
tttctaggggctcctgacatcttaagtcaggcggccaaatccactgtggactccagaagttgtgccagtgttacacacccagagtgcagtctgttgtgctaatgatggaatggcaacagttaagccattttccattgctacagaaattccagtattggagcctttttttactccagaagtcaaggtttccagaagagctagcttaaccccaaggaacatatcatgaagtttgtctttcctcttgggttctgaggaccggagagcattccctactttttcagaaaattggttaagacgtattaggaacacttaaaacccagaggaattaaagcttgttcgtgttgtgtggggcagatcacgtgagttgtgtatcatgcctgacacaatggactacaatctaagtttgctaatttgcagtgaatattgcttatgtatgctatttaacaaactagagtcttttttttttgcctcattctgacacctgtttttcactgagtataagacattcagcaagcccatttgaagataagccatcaaaacaaagcccaaaagagctaattctgcagctgcaagccccagcctcagccttcctgctcctcatctccagggtctgtgcagtgggtggggaggaaggaacaacgtcacctcgtgtaaacgccagcatccatccccattacctgtgcatctgagggtacagcgtgagcaccagcgaagtggtcatttgttcttagagcctgcaacctctggtgcatggtccatgaataattaagaccacctgatgtataaaccatcatgtcaaagtgagtgttttgcattgcattttgaagccagtcctacagaaacttccttcctgcctgtcttcttctatgtctcctgattttccttctcttgatttgtggcaagtttgactcttgagattgctgaccctctaagcagggactggatctgactttaggcttctttgtaacctctgatgctgcagtgggactcagggaatctcagataacatcacgataggacctggacacctaatatcaaacatacacaccaatgccagaagtaccaaagcagaaggaagagatttttttatacttagatagtcaagaagattcttttctctagagtcataccttcatttgtcaacacctctgagaaccgggctgccaggaagtcctggaagagatattcagcatttggcgctagtcgctcctactctccagtttctataaggtctggagaatgactttaccactgctggttaccacagccacatctgcgtgatacgcagagggaaagctgcataatttatgatgtgtaagactacgattatgaactgggatttcacaaatcaagcccagtggaaacataaccaggagagtcagttgacttgaaacggagcccacatctctgtgcaggatttaccaccatgcctgtctggttcatcccatcatgaagcgtgcaggcccctgactagccttcggggccagatctttcactagttacagaaacctgggaaaacatacagcaattgagcaccggcagcccgttctgttgggtcagcagagagtgctttaaaaaacttgaaataggacacgtttgggtaagtggtggcccccacaagtccctattttctaaacccagacattttacgcatttatgtgactccacctctgaatgtgtcatgcctgaatagaaccttggagaagcaagtacctgtacttaaatgtgcaccttcctcccaccttgactacagaagatgtcagaaagggaaggggggtgccatagagatgggcttactgtgctggtcgctcctgtcccttgtcccatccactgtgccatccggaaggatcctcaggaagtggcccccgttgctacagtagaggagtttgggcttcttgtaattccctggaggcagattaaacttctcggtcagggctgtgaaggtggtgatttccccttcagccatggctcagcagctgctgcttgtggcgctttcaagactgtaagaaattgaacaaacctgtagtcggttcttccagcaaaggcacaaaatgcactttgaagagaggaaggacagctccagggcacagggttcccgggtagtgagtaagcacagcctgcccaggtgatgcccgcagtccgcgggcctgtgaggtggctggtggttaaggaaggatggtcccaggcctgggaggggtttccagggcatttttctctcttcccaattggacacagctttggaccaaactgcattttttagaacttcaaatttaatcatctgaccatggggaaaagaatcatgttttggtccctccttctggtccacacacatcctcaaattaaacaccaaagttgcactaaaataacacctagggtctggctgaaacccacaaaagctgagaggccaggaccaaggttctgccctccaccctcacgttgcgttggtgaggtaccgcgaagcagatagcacagatggcctggacgttcgggacctgcagccaaaggcacaggaggcctttcagggacacaacagggaaagtaaagggttagtatgttaagggaagcttctggatttgctgggggaaacagaactggaaccagggaaaaaggcacagagtgggagtaagtggggtttttaaagggcaaataccatatcaaaggaaatgttatgagacagatcattatgaaggctatgcctggttcctgcccattctgcagctttccacatagcttcatgtggcacagagaaggtgggtctgtcccttgcacgcaggctgttttcatcctagctattttctaatgtgagatagaacacagaaaccaccatattatatataatatacctttaacattatatgtagccactacatacaaacttatattattaatgtgaaaatgcatcacttacacctcaaaggattaaaaaacaaaaccaatgagcattagaattggttaaaacatatacttgccccaccatttaggagaaggaagtgctggtgactctaaaaactgaaaagaaagaggccaaaaagagaccaggaaactaacgtgtgaactgcacttttttttttttctcctgagacggagtctctgtagcccaggatggagtgcagtagcacgatctcagctcactgcaaccttggcctcccgggtcccagttcaagcaattctcctgccttagcctcccaagtagctgagattacaggaatgcgccaccacaccaggctaatttttatatttttagtagagatggggtttcaccatgttggccaggctggtcttgaactcatgacctcgtgatccgcctgcctcggcctcccaaagtgctgggattacaggcgtaagccaccgcgcccggcctgggagctgtactttgtaagtgtgagtagtgaatgtgatcatcaatacatattgattatcaagtggtcttagaataaaaatcatcaccctcatcattaacgtattttgggctacaggttatctcaagtaatctcaccataatcccttgaagtggacactaatattatcatcatttttaataaaaccaaagcttacagatgttcagtgacctgcccaagggcaacagctagtaagcgatggagctgaatcgcaaaaggagtctgggaacagaaagccccaatttgcccttgatcaccatgaaaaggtttagtgactttatccacactagtctttttatgaggagtggggtttttacccattgcctgacatgtacatctgccaccattaacttgtcattcatatatttatttgtgacccaaaggttggctagtctccaccaacagcctctccttttgcccccatgccatctgtgaaacaggactccatgcatctccaccttctccaggagaagcccaccccagcagcttcgtgagcatcatggaagaccagcagctaccctgccttccctgcactaaccatccatcagtgcctgtagcagctgtgcggagctgctctcataggagatggttccatcataaatc

SEQ ID NO: 317960 - DNA, 4001 bp, Homo sapiens
taatgtggtacttaatatctttagtatgaaacataaaatgaaacactttaaaagcacctctacacgtatttttattacttataaacatattgtgaattttagtaaatagaaccagtggctgaggagaaacagaagttaatgttgaatgtgtgtgcatccccacagaagaaaactaaattcttaattcttgtaaatttgtattcaaaaataaaatgctaaattctggtcaactgtcattcccattagtacctggtactttctaaaccaaggaatcttgaaatgtttgactgacgtatttaagttaactgacaagacaatctatgcttagaattcctgaacaactaacacaaaaatgtcccctttaaaggtgacttggaatttaccattgagataatgccaaatggtcactaaagatgtttaaacatcattgtctactgtcttcagtgtgccattacagagccttgggttcctttcacataacaatcaatagtggatgaataagtctcaccacttgaaagtatctgagaaaggaagtcaacagagtaatctgggtttgctgggttgattcaagaagagacacaatatccacccctcttcttctagttctcttcccccaaccagcccacacccctgcaagaaagaaagaagggaaagagagaaagaaggaaagagagagggaaaaggcaagaccaaaatgtagggatcccaggcataatttacgctgaggagaaaatgtcacactgtgggataaaatatagccatggaaacagacttatgacttttactttgaaaataaaagaatgacaatgaaatttgtgtgaggtctgtgtgaatccagtcccagatgtttacaatgctgtagtagtatggctctgcaatatgagaggtttcagaagaaacagtacaacaggacaccacaaagcagtgcatacgctattgacaatgcagacatgagcatcatgttaccaagagggaaggcaggcagaagacaaatagcagcggtggtgcctgaaaagctaacttcatggactgcaatcactcaaactaacataagggacccaaaacaaaacaaaacaaaacaaaaatcaaaaccagaaaaatgcttttcgctcatatctagaggtagtggggtaaagggatgggggtggggagagagtggaattgacttttctttcttaaataaagttcccacaaagcccctataattgacagcggataattattttcagcttgaggagcctgtcccaaaactcttaacaagattgccagggaaaagaaacaaaatgtgtttacttgagccatttccagaaggaaggaaaaattgctctttggatgaggtgggaaaggcggtggagagagaaaggggcatctttgcactgcaacaactctcttgagcgccctgcgtggtccggctagtgacaggctggagggaaggggtgggtagagcggcaaggggtgggggatgtgaagggagcgcgcttaggggaggggatgcggcagcacaatgtatacacgggggttggggggtgaattagtgtgaaagtattccacttaatcattttacaggggttggggacgtaaatatttagctggccacatctggaacagatttttcccccccgtgtgggctgggggtggataattggaaggaggggagcatgcatttgttacttactgtacgggcagttctccttcttggtcccgctgaccttcccgttcttctcaatcttgagaaagtacttggtgaaagagaatagctttctccagcggacatctccttgaaggtgattgtagctccgcacatgccttcccgcgctggaaggagaggagaaggaggaggaagaagagttggtggcctctggtgacaccatgtcctgaccaagggcttggcaggtgacagggacggaagacaccaagaacagcaacaaaaagcagcagcagcagcagccgggcaggtggggaaaggctgaggcacaatgtgtcagtatccatttccacattgtactgaaactctcggcactggaaattgtctcatcagaaggaacatactggaagggtaagacccgatgcaaggcaaggagagagctcgaggtggtggctgctggttagctccctctgggcgcggatctggccagaagtgaatgcaccaacatccataactcctcggaaaagccggctgactcccctcgctcctttctcggatccgctgcctacgcctctggagcctcccggtaaatggtggacgtgggtggccgcagcagcaggagctggtggtggcgttggtggtgttggtcaccagcgctcttcgctcccccaggagttactttgttctcttctttactcctttcttcaccatgttagatgccaaaaaggtctgaaaaacagatgacagcacggtgaacaaaacccaagggaggtggggtggggaatagggggagatatctgcacccctctgcggttggcaccttctggtctctctctgcggagccccagcctgcgagccacttctacaagtatatccctttggagttgtcagaagtggaggcagctgcccagtcgccgttgttttcttccctctcttcctttctgtttttagtggtgcctgccgatttgaaggctgccgaaagtcactttttgttttgggggacggcggctggtgttttgtatggccctatctcccacccccttcctttggaaagtccgcttgtaaacaggttgaagcctggagtctaaatgtcagtgattctaagccagaggtgggctctgcctctgctggtcaaacctcatttgcaggggtggagaagaggggggagggggtcaaccggcggtgggacatctgaaaccctaggctgctgggaacgccagggagagggagggtgaaaggggcagagaagggggtgggggagcaggggagcgaggagagagcgcgatgcctttgcaccgagctcgggggctgccaggtcccttcctcgccgcggctgttgcggccgcagcctccgccggcgcctctagctctgtctaattcgctgctaaagcgtcctatgcttgcagcgcgggccacggcgctgacggtatcttcccgctttccgaattttgctgtcttccagcctgaaccaatcccttctggggagcccctttctcacttgctttccagcgtaggatctcctccccccacccccatttcttttggcagtgaagtacttgagagccacctggagcctggtgcttggctgacttttcctcccttctcactcccagaagaggagagggctgggagaaagcagaagatgctgaggattttaaaccgtccaaagcagcaggttataaactggtcagaacgagcacagaaaaggaagacataattagtgtcctttcctcctctgctgccagcttccaaggaggtctcctctttaatgaatcactgatttctcgcttccgttgctgaagtaaaaagttcacactttggccctctctgccttttaagctcagggagatttatcgtcacccttaaaagttgcctctctcggcgcaaatgaaatcagggacccaaataaccgatttctaattgctaacatgagcccttcactgaatcatgcgtgcacttcaaagcaaacgcactttatggcgatcgcaaagattttaccatataatttggctgaatagcctgctgtctgttttcttttttatgcaatttcctttgcactttgtcataaaggggaggttttttttttttctatcttcacatttaatgtttaaagggctctgttttacaatatcactgcactactagtcctcctctccttttcacactctttcaggccaccccaactcctcccttgctcgcagaaactagctcacagcccaggtattgacagaactaagtccaaggctaagaaacctttgccaagagttaagaggcacaaaaaaggaaatactgtgataatccattccaatctgaataagaaacagctcctagaggaccacttctttaagaatgactc

SEQ ID NO: 317961 - DNA, 4001 bp, Homo sapiens
agatagcaggcccaccaccgccaaacactgcgagtggctgttgagtcgcgcagtgctcaaggcacacaacactccttgagccagaaaaccgggagaaccaccaatttcctgtgctcaaggctagctctggggatctccacaatccagaaggctaaggtctaagaatcttctctaatcccggaaagccacctgccttccaccgagggggaagggtcagacaaccctcttttgacctgtgtccagttcctcctggcctggccccttgcagcactaggtgggtgggggcttggggagctgacgcttcctattccctttgcccgccgccccccgacccccaccatgcagaggcagccctggtctggttctaatcggggctgaagtcggctccctttttcgctcttctctctccctccccccaaccctttttccttcatttctacggctttggaagccagagcgttccaactgtctgcgtgccaagaccttcccgagtctgaaagctgctgaagtaacagatcagattttagcaagtgctttccaggccgagcgccaagccctcttctgattcacggagagcgagcgaaccgggagcaggcggggaaccaacgagggctgcaccaccttaggcgagggagtgcggagcgcggcccatccgggagcggcctcgcgggcagcggccactcggcctaggcgccctcgagcttcccctcgtcccgggcatgtgtgtgtgtctgtgtgtgtgtctcagtgctgcaagcgccttcaaaaccacagagtaatttacaactgaagctttctccctggactcgaaatccactcggctgaaagtctttttgtttggaagcggcgatgttaagggaaggttggcagagaaaatccctaggtcctacccctcgctggctgcgggcaggggtcttagagctgggtatattgttgcggctgagcccgccggctctgcgggatctcctcccagccgaggccgacagtggccgcgacagccagcgcctcctcgggccccgcggcagagccccttgcccttggccggttccccgccggcgcagggcgcacgcggagccgcccttccgcgccctgggaacaggtgcactgggctcagcgcccaggaggggtggggcacagggagggggcgcggccggggaaggggggtcggcgtgtaccgcgaggcaggggcgggaggaggtcaaagtcaggagcccacgtacctgtacctggaagcacagcagcaggaagtgtaaacacctgcgggaaacagatggagaagcggtcagtgggacctgaggaagggggcgcacggacagacagacacgcagtcgaagagtcaggtgaaccgacgggcgggcagacagaggtacagggcacaggcatacggacagacagccaggcaaggtgggcagccccgcgcgcgggcgcttacaggcaagtgcaggcggagggcgctgaatacatcgctgggcgggagggaggcggcggctcctagcccagcctgcacatgtccgctccgcgcggccgggaccgggcgcctccgccgccgccgccgccgccgccgccgctgctgctgctccctcctcgccggctgctgctgctgcagactctgctgctccggggcgctccgcggcgcgccctgcggcatcagcgccccgcgcggctcctcccgagcgctgcgccctccgggctggcgcaggggctgcggggcggcagccgctgtgcaggaggcgcctggccggtgcggggaagctcgctcactgctggccggccggccgtccgggcgtccgtgggaggctggctgcccggctcagtccggggacagcatgcgcggcgggtctggaagccgagttgcgctctccggcccgggcgcggagctgcgtggggccaggggtcagcgctccggggtcggggcgcgcggctgcagcgcgaaagcgtcacggccgctccgtctgggcgcccgccggctcatgtctcctcctccgcgtctctccggccgtgcgcatcgccgcctcccaccactggcggcggccggggcgttttctacgcgcgggcggcgagggggcggggggccgggggcgggcccgggcccgagccggcacaatgaggatgcggggcctgggggctcccccctcggggcgcggccggacgggcgctcagctcgcctgggtgcgcccagcccacatcaaaggcggccctgcctgctcgcctgcctgccgcggcctctcgctgcctcctcctccttctcctggcggctcggggttggaggggaggcgctcagactctcggagacgggaccggcagctccaaaggggcaggacccgcgagactgaagctggtgagcgctggaagccgtcggagctctgcgcccgagcgcagtgaccgctcctccgcgcaaacgttgcccaaattgggcaggcgatgctccccaagaacgcagttaggtacggaacgtcctcacctgcccacattcgctactcgcactcactcaccagcgctctagtggagagccgagaggggcgggtcaaacccagccccggggcggctccactgaatgggggtcgcttttacccgccctgcgatcgtggagtttcccagccaccctcttgactggctacccacttaagtgagcccccgtcctcttcttacgtccctgccgctgcgaagggggctcccgggcatctctccttcccacccctcgccccctccggggctctggggtcggttcacgggatcccagctggactctcccgtaggcgagccagctttggaaacacacggctaccaccaagcggccccgagacgtcactgcaaccccagcacggacggctgcacgccggggagcagccagcaggactctggtcagcgaccacgctgaggccctcttccggcctcctcccaaaaccggactaagacttgcctccgtttgcatactaggcagcttcgttcctttaaccagggccccattcaggacactggttcttaccgcctctgccccttccagaggcataactcctgtccttcccaccaaccccaaaacgtaggtgttcttgtcacgtacctgcctcactgtctagagctggtgtcagccaagctctgcttgagcctgatgctaaggaaaataggtcacagtgagaaagacgctggaggacaggctcaagcaaaactcaggaatctggactatttggttaaagcctccttgcgttggcaatggttgatggtccactggagcataaactgaggtaggactgtcgaacagtgctatttgctgaagccatgactataaaacattagtaattgttccaaatatcaggcctccttgcaagctattttaagttccctttcaaagctgaggctattttaaacagatagcctctgtttcaacatcggacacaagtgcagaaaaccttttcaaaaccaggtgctgagggggaaaattcctgcatgaagcttttaagctgaatttacttagacattctgattgccagagctggacttgcagagttactcgtaacttcccaagttctggagaaaatgaatcgatcccaagataggatgcaatgaccaaccataaatagaaatggacagaaatgctcccaccgatgacccgagtcattgccgccgtctttgatcttgctttataggaagattgacaaacccagtcgaggagtttttggcttaccatctgctagtttgaagtatctcctggctaagaatcatgcttccaattttctatattgttactattttttattacttgtgaatggaatgggtatataattatttataccctatctaaaatgcttgcagtatttttcaatgctcaaagtatatttgccaatctcacctaccaaacaaatcagactgaccaaaaagtccagccaagagaacagttctgagtaagagcataaactcaggagtcagaagtactgcatttgaatactgccaccaacatttacttataaattccagcaagcaacggtttgagattctgcttcctc

SEQ ID NO: 317962 - DNA, 4001 bp, Homo sapiens
ggcttactatcctcataggactgttttgaggataaaagagagaacgtgcgtcggcacgcagagtgttggaatgttctcctccctgtgcccggccctagaacggttaacctgttgccctgggtctgcccttagccagtcacctctggttcggatgctgttactgtcaggctgtgatgtacacacaccccagctggctatcctcttccaaatgctaccaaggacgcctctgttccccaaaatagaacactcagaactgagtctcagctgggacaaaggaatcggtgaccactgcagtcctaggggcctatgggtggcactggtgtctctggatctaccctgcgtgggaagcctatcacacctcctcctccttggtcactgccactccacttccagtccatctggcttcccctgccccttctcaaggcaggtcatggccatctcttgcatgggcctctggaaacatcctctccctcggctcttcaaccttcatcttccagcagagttttaaaaaactacaagtcggctgggcgcgatggttcacacctgtaatcccagcactttgggaggccgaggtgggcggatcacgaggtcaggagatcgagaacatcctggctaacacggtgaaaccccgtctctactaaaaatacaaaaaattagccgggcgcggtggcgggcgcctgtagtcccagctactcgggaggctgaggcaggagaatggcgcgaacccgggaggcggagcttgcagtgagccgagatcgcgccactgcactccagcctgggcgacagagtgagactccgtctcaaaaaaaacaaaataaaaaaataaaataaaataaaaaaacaaacaaaaaaacctgcaagtctgccatgtcatgccccccagcttgcaagcccttaatggctacctgtgcccagcaggatccagctcaacatcctagggctccctctctgccgctgcctatctctttggtcacaccgtctgccccttcaggagcgctgaagccattggctttcaaaactgggcacatgtgctctcttgcccatccctctgtgcccctcattgctcttctctacctgactcagatactgctgtctctggcccacctcaactctcgaatccagtcggatcctccttggtaaaactccctaccaagctcggcttggcagggagggcagctctttgggtacacagcttgggctgggagtgggtggggaggcccggggagtttattcctaccccaggctgccctgatatcagagtccttagtcgagtcacccatggctgctgaccgctgaccgaccaccccccacgtgggaatggagggcctgccttaggcatcagacagtcctgggttctccttcagcctcccgcactcgcgctggaggcccccgggcactaagtgactgaacttttcggggcctcaggtccctcatctctgccgccggcgcgaagacagccgcagggacaagcgcgcttgtcctcccccacccttgccgggccagcctggggggaggtgcgaatcaatgggtcccgagggtagctgcacagggccagcctgcccccgcctcggtgggcaatgagtaaccagctccgcggccggggtgctctttggacggagcgggacaaaaggccctgtgtgcactgcgggttactgatttaccgccccctccaccccctgccgcccggcggacgcccaggtcccctgcgccgggaggggcagtccccgtagccccgccgcctctcgccccctggcggctgggagcgcagcccgggcccacaagggttccggctcacctcgagcctgcgtgactccgcgcccagcacagggtcctgctcacctggctcctcctcacctggctcctccgccgcctcactcccagctccagccggccgcgacccctgcacgcggcagggtccgcagacagcccgagcgctcctcggccgggagcgaggaatgtacccgcgacggcggcgtggccgcgagcggcccacctcctgtcccaccccgcccctcgggcccgccccctcctgctcgggcccgcccctccttccacgccccccccccccccacccgggcccgcccacctcctgccacaccccctcgggcccgccccgcctagaccagctcgagccggagagaggtgtggccaggggtggccaagatccccgcccacctggagagccccgcccccgacccagtcagcccactcccgggaccccgccccagcctatacacacacccctacacgcaacccccctatacacaccccattcaggctccgcctctttcgccccacccaggccccaggccaggctcctaaattctagtctactacccagctctactccttgcttttcacccttcagggaatgcctggctcccctgtcttctgcgcagtgccgtgcagcggataggagaaccccttccttctgctccctcatttgttccctgcgcaacctgcggagtgatacttacaacacaaatctgactgtgtcagccactcccttaaattttcctatagattcccatagctctttatacatagattgccatgacccacgcctcctggctcccaccctgctactcctgggcagtttcacgtaccattctctcttcctggaatggcccttggtctggttaatttcatattattctcagctcacttccttcaggaagccctctggacttgcaagctcctcttagatgacgtctctactgtgaggatggagaaagaaacagggtgaagtggttcagagcacagactacagggctggacgtcataggcccagctctcagcaccatcacacaaggcctcagtcttcactgtcctttcagtaaaacaggcaaatgatagtctcacccacaagaggttgttgcaaaaagtagacatgttagcagtatgtgtaagcctggcatgcagcgcttgctttgtaatactagctgtaattatttaggacctgttatttcttcagcacgcttgccagaattgtaactgaacagttaattatgtaaatagctgtggaatggccgggcacaatgacgggtgcctgtagttctagttactaggagactgaggtaggaggacagcttgaattcaggagtgtgaggccagccctggcaacatagttgccctgtctctatttttcagtagaggaactgtgtcctcagacctcaccattagagttcaagtgtctggcatacagtaggtgctcccagatagctccgtgcccacctggctcatgtttgcctcacctgtaagcacttctctcctgagcatctagactgtggccaaaccaggaggccaggcagcctctgatctctgcccatccctcacctgaatctcaagccttctccttctcttaaggcaccttgagaggaagggaaatgggctgggtgcacctgtggtcccagctacttgggaggctgaggccagaggattgcttgagcccaggaagtcgaggcagcagtgagccgtgatcgctccactgcactgtagcctgggcaacaggctatggagcgagaccctgtctgaggctcaggtcctggttgtcccctctagctagtgtagaccctgtcttaagaagcaacttcctttctcattgttacgcaggcaagtctagttctttccaccctcactcccaaagggatagtggcatatctttgcataactgtaaggcccattaaagagacttaaaattgtttttttctttttcttcttaagcgaaagaatggtctcctcccaaagataaatcagaaaataattgaggccaggcatggtggctcatgcctataatcccagcactgtgggaggctgaatcgggaggatcgcttgaactcaggagttcgaggccagcctgggcaacatagtgagatctcgtctctattaaaaatatatattaggctgggcacggtggctcacgcctgtaatctcagcactttgggaggcttaggtgggtggatcacgaggtcaggagttcaagaccaacctggcaagatggt

SEQ ID NO: 317963 - DNA, 4001 bp, Homo sapiens
ccaaggactatggcacaaaggagtaggctccccagggcgcttgagccttgggtttgagcctttggaattttagctctccctctccctagctgtgctactttgagccaacccttgccttctctgagactcagttgcctcatgacagcatggagccgaccctgcagggtctcatcaagacgatgagatgctaaggcttatgcagaccaaccagtcagtgattcttctccctttacaaatggagttgctgaggctgagaggttaagtcacttgccagagagtagcagaaggggaaccagagctgcccaggtccacagtccagggctccttccggggccccgcaatcgcttcactcattcgattgatttataggtatgcttgtaggtatgaggggactgatgaaggaatgaaaatgggggagcagacggtcttggaacccagagactcacccgaatgcctccaatgcggttctccccatgaaaggcctgtccatccttaagccagcggatggtgggcgtggggttgcctgcagctggacagcggaacttgacggtgttccccgcaggtactgcatgcagtttcttctccatgcgctgggggtgtgtccagtagggtgctggagggcaggggaaggcccctagaatgaccgtgtgttcccacacaggcctcctcttctcagtgatcagatgagcagcagcggggacacaagtccttggagacctactgaccttgctgggggtaactgtgcctattcgaggggtccctatgggacttggggtcctcatcatcgttgctggaggtcaaggagtctacatcagggacagagggaagcatctaaggtccaagaggggcaggtctgtctccccaggcatcccttcactccctgctagagtctcttaccacctgtaatcaaggtgagattctgcaggacgatcatggagcctcgtgccaggcagaggtagcggccagcatcctcaggtaggaagctggcaatctctaggcggcccctccagccccgtacacggccagcaggtgccaggcgactgccctccttgtaccagtggccaccacgctcagcccgcccacagcacagacgcacaggctgcccaagggctactgtcagctcctgctcttgctgctccaggctgggagccaggcagggctctgtgggcagagggcagaggtcagcagaccccgcagccccatctgaggcagcctcctgtgtacaaagaacacaccgcacatgcagggcacaagcactttgcaacgcatgctgaaggagccaccactccttgacacccacacagccacatgctgcggatgccacacccagggcaaatgccacactcttggggcatgtcacacacacagcatttagtgcacacgacagtggccaagacacacacacacacacacacgcatacacacacacacatacggacacacacacacacaaggcacatgctgttggtgccacatacagggtcatgctgcaccggggcatatcaccctcataatgcttataccacacatgctgcctggacctcctaggtcacacacccagtgcacagaacacacacacacacgcacacacacccaggtaaggagctcaccaccagctctgcagcccagcttagggccctgcgccctgcaaggccagtcctctctcgcagacacagtgatagatgaatgcttgctggaagccaggcactgactgagtctcagtggttgagccctgccctgccgccaccttctcagggcctgggcaaggatcctttccagctttgctcagcccagcagccccctcctggtgcccactcttcccacccctgccaccctctcccacctcagaagccataccaagctccacttcctcagaggcctccagggacaagactggaggcccaggcacactcagcaggacccccaacagggccagcagcagccgcatctccttctcacagctctcagggacccaagctggacttcccaccaactgccttcctaaaatagggagggaaaagagctcctgctacacgtgcacctttgtgggggcttttcccttattttgcagataaggaaactgagacaggaagtggccagcagatgtgtccaagtccctggccaggctgtggcagtgcagactggaaccagctctgtagtagccagagcctaaggcctccccacggtaggttgtgcaaggggtctgggctgggcttcctgctctccctgagtcctgctgggaccctggcacacgttcacagaaagcagttttgggattcttttttggagggaagcagagaacggagacatatcttctgcatgctctcggcacacataatttcttttttgctaaataaatgaattgattgcagaagagccaaaaaagaaagtgaaaaatgacacaaggtcaaacttcagcatctggatggcatctgatccgatccccactccttacagcattactgacatttccagggctgggtggtcacaactgacaaggcggccccttccgtggcaagcaggaccgcgaccctggatacctctgcttgttatgcaccaactccatctgaggcacacacggttttgtaaagaatacagaccctaattttccatctgccagagccaagttcaaatcctgactctcaccaacttgtaattccttgtctctgtctctctctggcttactatcctcataggactgttttgaggataaaagagagaacgtgcgtcggcacgcagagtgttggaatgttctcctccctgtgcccggccctagaacggttaacctgttgccctgggtctgcccttagccagtcacctctggttcggatgctgttactgtcaggctgtgatgtacacacaccccagctggctatcctcttccaaatgctaccaaggacgcctctgttccccaaaatagaacactcagaactgagtctcagctgggacaaaggaatcggtgaccactgcagtcctaggggcctatgggtggcactggtgtctctggatctaccctgcgtgggaagcctatcacacctcctcctccttggtcactgccactccacttccagtccatctggcttcccctgccccttctcaaggcaggtcatggccatctcttgcatgggcctctggaaacatcctctccctcggctcttcaaccttcatcttccagcagagttttaaaaaactacaagtcggctgggcgcgatggttcacacctgtaatcccagcactttgggaggccgaggtgggcggatcacgaggtcaggagatcgagaacatcctggctaacacggtgaaaccccgtctctactaaaaatacaaaaaattagccgggcgcggtggcgggcgcctgtagtcccagctactcgggaggctgaggcaggagaatggcgcgaacccgggaggcggagcttgcagtgagccgagatcgcgccactgcactccagcctgggcgacagagtgagactccgtctcaaaaaaaacaaaataaaaaaataaaataaaataaaaaaacaaacaaaaaaacctgcaagtctgccatgtcatgccccccagcttgcaagcccttaatggctacctgtgcccagcaggatccagctcaacatcctagggctccctctctgccgctgcctatctctttggtcacaccgtctgccccttcaggagcgctgaagccattggctttcaaaactgggcacatgtgctctcttgcccatccctctgtgcccctcattgctcttctctacctgactcagatactgctgtctctggcccacctcaactctcgaatccagtcggatcctccttggtaaaactccctaccaagctcggcttggcagggagggcagctctttgggtacacagcttgggctgggagtgggtggggaggcccggggagtttattcctaccccaggctgccctgatatcagagtccttagtcgagtcacccatggctgctgaccgctgaccgaccaccccccacgtgggaatggag

SEQ ID NO: 317964 - DNA, 4001 bp, Homo sapiens
cttccgccatggcatcccccatcaagctgggggctcccggggtcttcagcctagcagggggtacagcaaggtgcagggctcacggagggatgacctctgtcttcattgccatctccccaccagccaaacccaggtccagcccaggacacccctctccatggggcgcccaactaatgccctctctcctcttcataactgggtcactaagagtcactacttactgcagggaatagcttcctcacccttcaccccacgtccctctgtgctccacccgggagcaccaggacactggcctctcctggttctccttatacctgcagaatgttccctggatccctggaagcccccttgccctctgggcccctcctccagggttcccctcccgggtctctctcttcctctccagctactcagcccagctcagacactgcgcccaggtgcctgtcccatgtctcctccaggataagcgtctcccattctacagccctgcagtccaaccaaggtctaccagccactcgacaaatacatcctgagcacctgtgggagcctggtcctgggctgggtccaggagggccaagggcagcgccctgatctggcctgcccgactcggaggcccagatagatgttctcctccctcctcccctggttgagccagacctgccccctctcctgtcctctgcccttcagccagtggacatacaggtggtgagcaaaggcaggctttgtcaggcttactttgggcctcctggggaccttggggaagtgacacatgtccttggtctaagcttctccatgtgtaaaatgggtctgacactccctgtgagaattacaagcatgtaaagccagtatttaattcctatggcgtgcagaaatgttgaggtccccgtcgctgacttcagggcttcagacactggaacccctgaccccgcccttacaccctttgatttccagggacaccagctccgtggggactcccagctcatcttctcagcttcctccctgacatctccatccactccctctgccgcccgctcatcccccacagtccctctttccaacccctccgcctccgcttcaggtctgcgtctctccccgccagagccacatcccaacacaaaccgaaccccgcctctcctgtgcaggggaccctcccgcgggggcctctgctcctcagctggccttcgaggcccctgtcccctcaaatccggggacccctggccttccgccccttctgcggcgctgacagcccgcgattcgcctcctcaagattcgtctcaagtgccagcgtgcacctgcacccgtccgcctcgggcgcgcggtggtccccggcccctgtccccgccgtcgccggccacggggagggggaagcccgcctcgagcgccctctgggggaccgaccgcgagcggaggcgctgggcgtcgggaagtgcgcacccaagtccggggcccggccgggatggatctccggcgcgcgtgggtcgggacggcgcggcgcggggaccccgcggggaagcgagtaagggcgcgaaggatccgggctcagcgcgcagcccggcagggcccggctccgaggacgcggagccaccgacggagacgcggattcaggggccgggagagctacccctgcgccgaggcgcggcccggccgccctggccctgacccggctgcggtccccgcccgccccttcctcatcccgaggtcccgcgccccaagcgccgtgctcccctcaggcgtccgcgcaccagggccaccgtgtcccccgcccgtacccggcggagcggtctcagcgcccgccccaggtgcgcggtaccccctccccggccagccccacgctcgggcgggtggcccgttcgccgcgctcaccgtccaggagtcccaggcagagccacagtcgcaggcacagcgcggcgccccgctgcatctccggccgctgcgcgtgggtccgacccgagcggccgcggctcggggctgaaagtgtccgcgcgggcgccggctggcctggggcggggcggggcggggcgggggccggaggcgggcccgggattcaggccgctccccgcgcccccctccccccgtccctcccagcccgccgcggggcgtccggtgcacccgagcagtgcgcgctccgcaccacagggtccgggccccctcctgggcggctccgggcgcggggacgcgggtaacgcagacggtctcgcgatgcgctccggaggtgatggagcctggtgggcaaaggggagcaaaatgcggcacgcgctcttttccgtcctttctttccatcggtaaaatctagactaaacaagaaagcaatccttgtaaaaatagtatgttacatctttgaaaatagtggcaccagccggcgtaacatagggagacccagtctcaaaaataaacaagcaaataaataaaataatacgccgagcttggttgtgcgcgcctgtaatcccagcttctcgggggggctgaggcaggagaatcgcttgaacccgggagaaggaggttgcagtgagccgagatcgcgccactgcactccagtctgggagccaaaaaaaaaaaaaaaaaagcaaaaacaaaacccgttcagcagtgtttacctgcacagtgtcgacggacagtgtcgacggaagccgcacccgtgagcgggacacccgggatgaccgaccccctccctgcaggcctggcctcctagctttagaactcccccagatgttttgttctcagctcaatcaggacccgcccccacctttttaataaagcgacactttgcttttgctttctgacttggcaaccctcttacagacttccgttctcttttcagtttgtctctagaattttcctgtttaataatgaagcccatgaccatgactgtctcaacctccttccctgcttttcgtttcattcacattttccatccccccacccccgccccccaaagccctttcatcctcgccaaaaagcaagagtagattttcaataaccactaccagctctctccaatccaggtaagaagtggctatattattaagctggaatcacaaatcagtgcggatagtgtagataatttaacaaataaggttggggaaactaggtaaccaagcgatacatgaagttaggtatttatcaatcatatattgattttttttagctttgaaagattatgagatgtaacacacttatggaaagtacataatatatcagcatattataaacctgaattttaaagcaacaaatacctgtgtttccattctccaggccaagggatgtagaatgacatccccacatcccctcacttcccatcacaaacccctcaccaaccccagaagatgcccactaccctggcattatcatttccctgcttttgtttatcattttatcatcaaaatatatgttttgctttttttttcagaatgtacttttttttttttttctcaaagtctctcttttgttgcccaggctggagtgcagtgggacgatctcactgcactgcaatgcaacctctgcctcctggggtcaagcaattctcccgcctcagcctcctgagtagctgtgattccaggcacccggcaccatgcccggctaatttttgtatttttagtagagatgggggtttaaccatgttgaccaggctggtctcaaactcctgacttcctgatctgccaacctcagcctcccaaagtgctgggattataggcatgagccactgtgccccgcccagaatatacttgttttttttttgttgttgttgttgttttagacagggtctcactttgtcacccaggctggagtgcagtgacatgatatctgctcaccgcagcctcagcaccccccgggctcaaatgatcctcccacctcagcctcccaagtagctgggaccacagatgtgcgccaccacacccagtgacttttttgcatagctgggttttcgccacgttgcccaagctggtcttgaactcctgggctcaagtgatccacctgcctcagcctcccagaatgctgggatg

SEQ ID NO: 317965 - DNA, 4001 bp, Homo sapiens
aaaagttaaaactggggctgtcccatgccaaagttcaggcctaagaacagatgcacccatgcaatcccagccacatcccaccctagctgagatccttcagataacaaaggggattttcttaaggggattgttctcatccccttaagaaaaaagaagaaaaggtaaggagaaatcagtagaacctcagaggctccacctttattctcaggtctgtgacctcccctcaggcaattgattcacctcaattttccttcttgacctcctgtttctgctccaagtactgtgagctcagtgatctagaacattctgcccactgctttttttagcctcctggttctgttgcccatggtgagtggaaattcgcttcgtcactctttggcagctgatctcaccccaaagcttctgctcttgttttgtttgtttgttttttcaaagccagcggtaccaggaaatttattttatgggtgaagataatcagcccctaatatcagcataactaccactatttaattctgctgttattatgaatgttaatcatggtaataaccactcacagtaagtggttgctatgtcacttgtcatgctagatgattcacaggcagtaattaatttcctttattcttcatcacatcctctgagctagattcccattttacggatgagcaacctgatgtcacaccgctaatacgtagaaaaaggacttagtgccgcctaaccactacatttcctaatgcaaggctgccgggtttagttacagacgttatcgcaaaatgaggtgccaggactgagacccagttgctgtttttccagacaaatcaaatgagccctctttagattgccaggccccgctttgataagagagagccatcttcaagtattttagtttctctcatgcagttccctctactgattgcccctgatcagaaatacagagacagtcatagtcagcctacgcatattcacataacagtctcaccctgctttgtcttccgcctctcctccctcacatgaaaccccgtaggtttcattttgggttgcagtgacatagtaaacagctgtcaactggattttcgcctgcattggatattaagccaaaccaatggctattatgacctgcctttctctcacctctgctttcccccatcctcttgtgtttgtgcccattttcctccaggagtggagctgcagaaaggtgcacagcattgagtagtttcttaatccttgtttttcttctgtaagggtaacagtgaactaagatactcaggaaggtgaatagtgtctttctatgtggctgaatatttcttcccagtaaatagggaacgaaagggatgagacggatgtgctcagacccttccagggaaggtcatcatgaaggagaccgaatgtttatgtttcctagcttggtgtcctctacacactcatcctccccacaccacacatcactataaatacactttcgaccacgatgaaaagagcttaattcattataggcagccacctgtgtaaaacctttccatcaggagtaatcaggaatcctgtttcttgtcacgcacaaatgttctcttggcttcctatctgccactagctgtctgtacagatggaattacctcagcagacatttttaagagctttctgtcaagacgcaaatagcatcctcaccttttaggaccaggtccgtctcccttattgatttttcttcctctgtttccgtttctaaattctcccctatttttaactattcatttgcccggcccttctccaagcagagtgtgaaaagaagccatttccatttccaagaagagccatctatatgtcttacctgatgcttgcagcgtgtctggttagagctctgccctccgaggtgcagtagattaaagctgagagaatggggccttctccctcctctgctctgggctttccgtgttgtttctctcaacactgagtaatcccactgccgcccctaatgctcacattattcatttcttcagatcagcatcattcaccatggcaaccagcaggcatctgtacgcacgatgctttcagggaccagcctggaaaggcttttgcccagtgagaggagctctcattcctttggctgaaaaagggcagatgatcccctgaaaactggtccccagtgcagtactaattcttctaacactcctacattttctccccagttggctgattattattttcttgtcccatctagatcctctttggccaatggttttaaatgcaaagatgcttttctcagttattccacaaccaaagcagtaatattcatcttcatcccctcccacccctacacttccccatcccaactgcctaccccacctctttatcttcatctttctttattcttgactcatgtgccattacatagttatatggtactggtcaagacccttttatttttattgtctgagtctcagttccaccatcatctgtaaagctgtgggcttgggctacatcaggatggcagatcagaaggcagaagacctgagccctatccctgcacagccctgaacccctgtcaagcttgctaaaccatcatggcactctcactgggttgaataatgcccccccaaaatacatatccatccagaaccttaggatgtgacctgatttagaaatagagccttcgtagatataactagttaaggatctcaagatgaaatcttcctggatttaagggtgagccctaaatccaatgactaatgtctttgtaagagaaaagacagagagactcaaggggaagaagccaagggaaaacagaggcagagagtggaaggatgctgccatcagccaaggaacaccgggagccatcagcagctgggaaggcaaggaaacattctcccctagagccttggagagggcatggttctgcgagagccttgatttcaggcttctggtctccagaactgtgagagaataaatttctgtcatgttaagctgccacatttatggtaatttgtgatagcaaccctaggaatctaatgcagcactgcttccagctgggtgcagaaacagccccagagttcctctgaacacaagcgtcccaagaaactgcttcccaatcaatcagttggagttgacgccagaaatggaaactgtttgctactcctggattgaatcatccccagcgttcctttcctttcaagaatccagactgcttgcctccccttttctcataaagggccgtctggctttgaggttccatcccttcctgttcctttcaaccttgtaagaacccattgccaccattctattgagatcacagggtgtgtctggaatagagggtggaaagtagctcagatagatgtagacctgaataaatttatacacattatatgtttttaaaagtcagcttttctcttcttggttcttggccaaagtatccaagttaacccatgaaggtctctttctgattcacattaatgataaaaggttaggaagaaagccaggcacagctgcagtggtgtgcacctgtagtcccagccacttgggaggctgaggtgggaggatcacttgagcttaagagttccagaccagcctgggtattatagaaagactttttcccttggaaaaaaaaaaaaaaaagagccgccttggtgagttgtgaccctacccttggccaaaggtctccgggaggcttggagtcttgggaactcgggaacaagccagtgttccttgatcagaaagttgctctgcagcttgcccatggcattcagtcttcccaggcgcctgtcttaaatctgcagcaatgcatgcagcatgtctcttcccatgcgagcacagccaggtcaagtgctaatggtgagtccccacggagcataaaagcatcctccccacagaaaggccacgcagctgtttgcagatgccctttgaaaaggttattttgcggggagtaaaaataccagagttaaggggtctgaggaggaacaaggtagaactcaagcctttttccacagaaaattggaatttatttttaatattcttgg

SEQ ID NO: 317966 - DNA, 4001 bp, Homo sapiens
tgtgacattaaccagaatggttttttttccttcagatatgcctattctgtttcatcagttttcatttctcacatgcacaagttttatttttaaagtgagagattccataatgtactgcagttattgggcttacagataattcttacttccactggcaaaagtatatagttatctgcactgctacttgctctatctcgtaagattgctgtgaaacatcaaataagataactgatgagaaagttctttggtaactgtaaaatagtattacgcaactatgtagtagactttacatttttgaaaaccagacgtgaaaatgttttttcatatgagtgacttgagagccttgtaaacctacgtacccaaagtcaatctttgtccagaaatagaaagcagttgtctattcaaatgccaccttttaaatatcctatcggaacctgtttcctattgtcgcttgagttactagatggctcaatgtagtattatctaacctgcactttcatttttcaaaggaaaaacactaaagaaatgtttaaagagagacagatgagcatgacacatttatttttcaggggaaaagacagatacgtagaaaaacctcttcaattccatatgcatttactgaatttttcctgatgagacctgcattagcaagagagagtgaataattttaagaatagcaaaatttcttaaaccagtgtggcaacttcgcctgttccaaaatttgacagattctctttttttatttttattttatttttttgtttctactattgttgtacaactgggctctttgctatcctaccaagtttaaaacgtgtggcatttgacatttagcctagttatatttgcaagtttccacactgcaatacgtataaaggctgtttggacataatctcctcaggtgcagtttaacgactaaattttaccttgaattcaggtttatatcaaatcttacaattctgaaaagttactctgccagcaacaggtactacaatgaaaaattaacaaagcctgtaacactacaaaatgctctactaacattttcaatttttaagactccttttcagtaacaattcgaggaggaagaatctacagccaattccaaggccagatttcattcaatttggtcttccttcggcagtaaccctaaactcaagtttcacatttctccttcgataacattaaggtcgctcggtccggttactgcacacctccaattttagcgtccaagaaacctgaaagaacggcacgttgcctactcgctcctccagccttctctcaactcagaagcttggccaaacgtgccgctctctccacaacgccaacggagctggaacgcagcgcccggaggacaactggtcacggggaggaggggagaacttcgcggcccggagtacggcggctgaggtccaatccagcccgcgcccaactctactcggtgccaggaaggcgtgtggacccaaagtctcaggccgcggtgctaggtccggaggagcagagtcgcgcgtggctgggggcaggtcgtaaacaaaccgacgggaggagggggaaggggcaacggcgaggcgggtggggtaaaataaaaggtaggacctcgctccaacccttcggcgctagcccgcagccggctccaccccaccgaggaccagatgctgctctcggcgcggcgcttccgctcgggtcggaacaccgaaggccccaacacccctggagcccggagcccacaaggccatcggctccgcgacccccgccccacagcgccctacctgaacccgcaatctgggtcccgggcgtcgcggccgggcgcgcccagcccggtcctcttgctgaagagcttctggaacagcgtaggggccatgctagccacggccaggcaggggtcgctccgctgggcgcttgctaggcccctgctcctacagccgccccgccacccccatgggcgcctcagtcatatgacagaaattagtcacttcaaacggccacggcgcgcggggcggggcgcgaggcaaggccggcactcattggctggaggggggccgcatcacgtggcggcgcgcggagcaaggggcaaggtgggggcgtggggcggagctgcctcccataggctcactggcgggtcccgtcacgtggcaggggcggggcgtgagccgagaggacaggactggaaggtggctagggatgtgtagcgggagaagggtcagtctcgatcttcccctgtgaagctgtcagcgaccatcagagggtacgccggggtggcgcggggacgatgccaggagccttggagtgcagaaggcttcgactccccgcacccacagagttgcgtagggaaccacgggcaaccgactcttccttgtcagcccctccctagcttctgcggcttcacacctccattccgcgccgggcagagtctggcggctcctggagcacggaaggcccacaagcgtacccgtggggccgcggccaaggctggactttgagcccaggaccccaggaccgcccttagaaggctgcgccggcccgcgagaggtctgggatctggacagcgcgggggctggctcacagggactggtgaaggaaactgccgggacccctgccacagccatggctccccgcaaagacgacctcgagcaggcactgcgggcagtttgtactagcgcctagaaccctgacaccgggaattagtctcttggaagagctagcgattggaggctcaggagttaggctgtttccttgttaaccaacaaaatcaggtgaaaccaacgaagtcaggaagcctaaagacatatatgtacagatatctaaccctttacgctaattatttagatttttaataaatctatcttaatgtttaggtatgaagacgggaggaactgtggaattttagtcaagttacagggaagaaacgctttctaaaaaaagaaaaacattgctcacatgtgacctcacagtcttatttaacccatggaaccaaaatatatcagagtttgtatcaaactaatcttataaattttcagcaaccccatccattcactcactccccctccaggatgaggaagctcgtacaatgggatgtaatcctcagagaaatttaggaaataacttgtatatggttggaaggctggataaaaatactttgggcaggcgtggtagctcacgtctgtaatcgcaacactgcaaggccgaggcaggcagatcgctttagctctgtagttcgaaaccagcttgggcaacagtaagaccctgtctctacaaaaaaaaaaaaaaaaaaaaaattttaattagccaggtgtggccgggcgctgtggctcacgcctgttatcccagcactttgggaggccgaggcgagtggatcacctgaggtcacgagttcaagaccagcctgaccagcatggtgaaaccccgtctccaaaaaattagccggcgtggtggcggcgaatgcctgtaatcccaactacctgggaggctgggacaggagaattgcttgaacccaggaggcagaggttgcagtgagccgagattgtgccattgcactccagcccgggcaacaagagcgagacaccgtctcaaaaacaaacaaaaattagccaggtgtggtcacggcgcacacctgtggtcccactcgggtggctgaggtgggagggtagcttgagtgtgggaagtcaacgctgcagtgagtgccacttgtacttcagcctgggcaacagaggggggccctatctcaaaaaacaaatactttttgagaatttcatttaattaggtatacaaattaaattttattttctttaagtggctaccaactcccactgatttgcagctagagtttatgctctaaataagggtctgaagatatttagaaaagaaaaagtaataggcagaatttatatctctttgagaatttgtcaacaaccaaaatactgagtttcaatgttccaagacttttttaaagcactatttattgatgattaagatagtaacatattctttccacaatcatttatgtt

SEQ ID NO: 317967 - DNA, 4001 bp, Homo sapiens
agaattgcttcgctggcattcttcaagacctttactatttttgtattattcttttgaccattattttttaacgcctggacctgagaatctctacacctcaaaaaggcttagttgtttttcatctgccaaacgtcaagggagcctctagtgcctggacagggcggactcccttccccggcaccctcttcctccctaccccaggtcgggggttggggggctgtagcataggtcggctttgcataaatagagggacccgcagagccaaaaggcgcgcccgggctgttgacagttttgtccgagaattcgcagcggcgaaaatgggcgcgcgaggtcgagaggggccgcgcctggaggagcgaacaaaacaccgaaccaccaagacgagaaaaggagccgggattcctaccttcttcctcgagcgcgctaacatagcgttattaacaattggaaatcctagcagtaaagttctcgacactggacagggcagtcccttggtgcagagtccccaaggcggcggacgaggagactgaggaggcggcggcggccgcggcggccacgagggatcgggtgagcgcggccgccgggcccacggccgcctgcgccgcgcagcctcctccgctggatccgggagctggcggcgccgccaccggcgagggcgagggcgaggcctgagcggcggcggcggcctgcgcggcggcggcggcagcggcggccgggcccaagctgcccccgatgatgctctcgatggagaagggcgagcgcgccagcgctgaggcgcccgggccgcccgccttggccgcggaggccggcagggggccgggtagggcggcgccgagcgggtgcggccggtagccgaaggcggtccgggccagctcggcggccgcgccgtgcggtggcgggggcggcgggggcgagtgcgggtggaaggcggcggcggcggcggcggccgctgcggcggcgaagagggccgagggcggcgcgtaaggcggcagctgcaggccgtagccgcagccgtaggggccgtagccgtaggcatgcgggggcggcgggggcgcgggcgggaagagcgcggcggcggctgccgggtcgcccgcgccccctgcggctcccgcgccgcgcagcagcagagactcggcggccgcggcgttgggtgggagcagcggctgccgcttgaagcgcttcctccggcgcaggaagctgccgttgtcgaacatgtcggcggactccgggtccagcgtccagtagttgcccttgcccgggttgccgggctcgcgggggatcttgacgaagcagtcgttgagcgagaggttgtggcggatgctgttctgccaggcggggaacttctcccggtagtaggggaagcggccgctgatgaactcacagatctcgctcagcgtcagccgcttcttggggctctgcaggatggccatagtgatgagcgcgatatacgagtagggcggcttcaccagcgggttcttggcgccgctacccgcgctcccgccgccgcccgcgccgccgccgccgccgcccccaccggctcctgcccccgccgccggggccgggcccgggggcgccggggagcccccagcaggcggggccagcaggatgtcatcgtcgtcctcctcctcctccagatcctccagctcgtcctccccggcgtacgagcgccgccgccgccgccgctgcgcggggacagccagccggggcccgccaccgccgccctcgtcgtcgtcctcctcttcctcgtcttcttcgtcctcgccctcccccaccacgtcgatgtctgtttcctcggcgaggccagaggcatcggacatctcagtgctcagggtcatagctgtggcgcggcggcggcggggcggcgcatgggggcgccgggctccgggctccctctgcgccccagcccgggtcccgggcggcaggcccggccggggggcgccacgctgggggcgctgcgactgcggctgccggagctgcgccggggctgccgggtggcggcggagtctcgcgcgccgactttataactcctgcgccgccgcggtagccgcgcggatgctgcgctccctgggctccgctcgcgcccggcccgggcggaggacttgaccttctcctctcggagcagcttttgccccgtcagctgaggagggggtggcggggcccgggcgggcgaatcagaacgccaggcgcccaggaacgtgcgggacgggtgagagtctaagaacagagctcggcgaggccagggctgagtccaggagagggcggaccttcctcggcttatagcagaagggggcctgtcacatggtgtgcacgtcagagcgctgccgagggaaggaaagcaagcctaggaaatcagcccttctcgggagagaaaattcacccgtaggagggaggcagcagctgagaagagtggggaggagaggggacctcactatttcttgccaaagaggctgatgcccgaattacgcggctgtctgcaccgagggccgctgcacgagttagacttcccagcctcctcaattagtcctccaccctaacctcagaagcacacccgcgacactctggtttgacccctcgacagcctgtaggagccttccagccgggggataaccaccccatcctctgaggtggcccctgggggacgctctggggtcggttgggggtgtccagcccctccagatcgggcgagcggccccccattggatctgatgcgaagccccccaatttaagcacgataataattgtttattgaccctttaacccattctcttcggttttactccaaagacgtttgttttccgccatctgttaataaaaacgctgtgagactggcgttttactcacttctctgcgattgaatgccctagagacttgacagttaaactaagccactctaatgagacgatctgacaaatgtcatgggaataaagaacgtaataattgaattcggagaagaaattgaaatttttagtgaaaacccaaatacacgcacaaaaattgcacctagaaactactaaaaagttcgaccagcctggccaacatggtgaaaccccgtctctactaaaaatagaaaaaaattagtaggcggcgcctgtaatcccagctactcgggaggccgaggcaggagaatcgcttggacccgggatgcggaggttgcagtgagccgagatcgtgccactgcactccagcctgggcaacaagagcgaaactccgcctcaaaaaaaaaaaaaaaaaacagaagttcgttcataatggggctatatagttctcagtaggaggaacattctagtcagcactttgcatagtaatctcaaaatacttaaattacataacatatacatatttctactgaggcttattaatagaaactataatgatagatgactttaagataaactttttaaaaatgtgtttttggaaaatccttaaatattgttaatcctttctggtgagatgaaaattttttttatgagattaaagttccgctcaattcagttttcttttcgggtgacaagatagtggaaataattaagatatgatgctcttttaaatatacctatctttatcaccaactcaaacgagctattttggctagtggaaaaatcctaatagtttgttgaattcacattcacttatttgtgcatttcctaaaatgcttctatttcaaagaggggagcttgtcccaaaagtttaactttctgattaaaatgaccccttgacaagaactaagaatcaaaattcaatggcgttctgtaggaacagccatcagctgcccttgtgtatatcattttatcgaccaagtacttttcacattctgaaacgtgtcattactaccgctgtcaatcacagagcctcagaaataaactgtttccccatctaaagacctctattaaaatcgagtttttgttgctgaggactgctaccaccagttactcttacaagtgacccataaaggctatcataggtctttgaacaatctatgagaaagcctcgacgttctaaat

SEQ ID NO: 317968 - DNA, 4001 bp, Homo sapiens
ggaggaattccatcaactgatgaaccacaccacctccatctttaattaagcagcccatgacagggccctttgggactgcagccgagaggcatgagcattaaggagtttgcaatgtaggtctctttaagaaggatgaagaactgggagcagggatgctgagggatttgggggttgggggttggagggctttcaatgctgaaggaaaagaagactcaggaaaactctgggactccctaatagccgtaggcttggagtctgaagacagacttgagtcctggctttgctcctcactgactgaggggctttggaagaacctgttttctagtctgaaaagtgggcccattgcccctgtcttcctcaggcccactgagaaaggatccacaccggatatggaaaggagcgttgcagctgggaggtaccttcccgagggaaggcctgaactcttcctgctaccgtctctcagcctgagggtgatggcagtccttggacaggacacttgccctcttctggggacaaacaggcctggtgtttgccaccctcaaatggggcagagttggggttcctttgagctataccttggcttcctgcggtggaacaaaagtggactttaattctgggaaatggatgcatgagtatttaatacatgcctctctgcaggtctctgagttttagaaatgcatcgttgaaaaggaaaagctcacaatttctgatgttagagaaaactgagttcaaattcaagctccatcactatcacttcattctgtgtcacctctgagtgttattttcctaatctgtagaatgggtttcataagagctaccctgcaggggtgtcttcgggttaaaggaggttacctaagtagaaacaaggcaggcagcaaaatgggccattagtggctgtttaacccaggtcagatcctcttcctggcagtcttgggatgcccttgggctttggttggtccagtcattcattcaccaaagactttctatgtgctgggtgctggagatgcagatgaatcgtaattactgcaggcgattaagcgcttgataacacctaaaaccttgtgtacattatctcatcacctccactgcagcctgcaaagcagatgctgtcactatccctggttttccgatgagggaactgaggctctgaggtctaacctgccagaggtcactgactgggcaggagcacagccagggctgaaacccaaatcttcccccaggcccatgctctccttcactgctgagctcccctctgtcctgcctggtagcatcccccagtcttggggggcacagccctagtcagaactttctagaatggggtcttggggaggaaggaagtgagtcttccttggggacaccccccacactcaaagcctccttacccgggtcgtcctcgtcgcggggcaccttcttgaagcagtcgttgagcgacaggttgtggcggatggagttctgccagccggccttgctcttgttgtagaaggggaagttgtcggccacgtactggtagatctggctgagagtgaggcgcttgtcgggtgccccgtggatggccatggcgatgagagccgagtaggaatagggtggccgcaccagcttcatcagctcctcctgcgaggggatgggcagccagcccaggtcgctccccccaagccccgacacgctgggcagcagcggcctctgcactccataggcctggggcaggaaggggctggcgttggggccgggcaggtagggtggcggggtcatggtgggcccgttgaaccagaggtaggggttgggggtggccccatactcgccgcccccctcgaaggagggccgctgagggctgggcacgccctgtgggtggaagaagttctcatagtagaggttcatctcggggggctcctggccgatgctggggaactgggggctgcagcgaggtggggagggcgccggcaggtcgaaggagctcatgctggggctgggctggccggagccacctgcctggcacctgcaccccggagctgcccctgacaggtgctcagcaggcccggcctcccacttatacccctagggcttggccgggcggccccacccaggggcggccacctgcctgtggatcccagcccagggcccgccctccctcagcctccagcccacggggaggggactttcccgctggcgcctcaggtccccactaatgacatgctagacggcttaccagagctgacacgcagcgcagcgagaacgcccctctatcctctctcccggctttctctcctgtcttttctcaccatcctcatgattcccttcttctttttctcctttattctgtcttacttctctcatttttttttctgtccttccctttcgtcacatttttctacccacctcggtttccttctctctctccctcctctcctctctgcatctcattctctgtttctttccttcttattttctttcctcccttctgctctgaactgtgtttcttttctatgaactgatctggccacatcacagctgctcattcccgttctctctctctctctctctctctccccctccctctctccctctctccctctgtctctaggcttccagttcttctttccacttccatctctcgcttccattctcattgtcttcccggcttctcccctttctccttctctttcactctgtccctttctctccacctctcattttctctgcgcctctcttcccatcccctcattctccctcctcttccccccaatgtcccctcattctctaaccaactgccccagccgggactgggtgggacactttatcagaaaccctgtttcttggtcttttgaggtgaggaggcactttctggagttgccaggagagaaccggccctggagactcagaagagggcgcagaggggcctgggctggcttctggtggggttcaagggggcaaccagtcataggcaccgcagcctcccccaacacacacatacacgcacacacgcgtacgcgcacacgcacacacgcgcacacgcacacgcgcacgcccacacacgcgcacacgcccacgcacgcacgcgcacacacgcacgcacacacacacgcatatgcatacatgctgcagacgggcagagaacctgagaatttgcctggagagcagcaaggctcttaaaaataatagcaaaaggggaaaatggggaatcagtcttcagggaaaagtgagagaacttgaacaattcaagtttctttccagctgcagggcaagcaggctcccagctcctctctgatccaaagacctttcatgtttcagctcgcagaggcccctggcatggaggcagccagggcacgaggagagcgcccgactcaccatgccccaggcgtcctctctctctctccctcaggctccagaagcaggagctgcagcccctgctggcttctccctgtggctcagccagctcctctcctatctgggctccatcctccatcttgtcccagcctcccctggtgccccaggtcaggccctcagcttgggccatgggtggtggtctccctactcagagggtaggcgctggcccctgaccaggttctggtagcagctgagacttctctctgtgatgaagcagatgggagaaaagttggggtcagcccctctggtcaccacctcgctcccgcttgcctccttcttcttcccatccagcttcctcccacttcctgcatgccctactttctttgaggcaagagaaagaggtcactgactgtcccaactggagaggatgctccccaaagaattcttcccctctctgctcctctttcatggttatgtggggacacatgtggcaaacatgaatgagactgaataaacttcattttcagcatattggtgcccagaggatgagttccaggtaactgggtaggagtggtcatgttaggcccagaggaacctgtccccaccataaaacagtgatgaaatgtgactctctgaaaggctctggctgtccagatgaggcttagagtaaggcacacttt

SEQ ID NO: 317969 - DNA, 4001 bp, Homo sapiens
tcatgtaggcgggtacaggaattatttgtgacaggggttaagaaagtaagagaacgagagagaggagagaggagagatggaggggagagagagggagaaggaaagagaaagaaagaaagaaaagaaagaagagaaagaaagaaaagaaagagaaagaaagaaaaaaaggaagaaagaaagagagagaggaagaaagaaaagaaagagagagagagagaaacagatcaagcaaaaggcacttctgaaaaatgaaagcaaaaaagcaacccggcccagcccggagctaccccgcgcggcctccaggcgcagccagcccgacgggcccgttttgcaatccgccagaccggagcacgcccgcggccaccgcgatctttcgaaatctccgagggctgctttcctccgcgcccacgtccgggcaccaggcagagcctctcctctaaaggcgggcaacccagcgcagtgccatgcagacggcgaggggcagtgcccaggagggcagtttacaacatacttaaaatgttaacgctgaagcagggaaagtaatgccttaaggtggggggaggggggagtcttcctaccatttcacggttataagtacctatctcatacctagcaagaaatatttgcaagtgatttctccctcttccccctttttaatgttcggatttgggtcgagaagacttctcatgaatcaccaatatgactttaacaatcattggatcgcaagctgctattattattttaaacattctgcccaaagactaattgaaataaacaaatctatttttaaaaggcaagcttcagaaatttgctcttaacccatttcagaatttaagtcagttatgggctgctcactgttttacagaaagctaagggtcagaaagaagaatgaggcagaggggaaaaaaactgtaaagtgctcaaagcactttggggtaataatttggcttttttttttttttttttttttttgcgagaatgggggatggggttggaagaagcatccactaggcagaaagctacttcccttgaaaatcttcagcacccacatttccaagtttgggcaaagtttctgaaaccacgtcccccagccaccaaataaaattcagtatctctcccccaaacccccaggttttcttttctttctttccttttttttttttaagtatccaaaagatgtgggagggagagagatgagactgcaaatgggtcgactgaaatctccaggctactactgatacttgttcccttcttcagagccaaacagaggagatcacatctaaagttatcatggccagaacttggagcatttaaccctaactactaagaccccagctcgctccctttcctttttcaagataaccgagctccaaactcagttcccagtcctaaagtgtcattgcctacaattttcccactcctctccatcccggagtccccaagttggttcaacatcttccgagagcagcgttgctcagaacagaccaagtggagaccacagaaaagtcgacccccctgtcctcagccaagcctccccagcgcatccccactcgcttaccctgggcactgcggtcctccatgaactggcagagcagcagcagcaggaggcaaagcccacccggctggtgcctcgcgcggaccatcctgggggcaggcgcggggcgaggagcgcagcggcgcggggagccggcgcggcggcgggtggctcgggcgagcggcgcgcgtcgcagaggccagcggcggagggcgcagcgatcccggcgcagccccgcgctcgccgccggccgcccgcgcgattcaatggacgtcagaagccgggcgcagccgcgctttaaatctagacgggggtctccgcggtttgcggtgggcggtctcccagtgtgtggggctgtgggagggcggccgcgagcgagggtgtgcgcggctccttgggggtggggagctttcaaaagttcagtgtgaatcaggtgacatttcccaccttctggaaacccttcccaattatctttcggaggtgcccgaaatcaaaacggctggaagggaatcgtcgagttcttatttgcgtaggagcgagagggagggggaaggcgaccggggcgggggttgggggctacgcgtcgggggtggggagtggggaagaacacccacttcaagtcctgctcgccgccgctcgccggcagcgccggcgcgcccggggtggcgggtgtgtgtgtgagtgtgtgtgtgagtgtgtgtgcgcgcgcgcgcgagtgtgagagggagggcgcggtgggggcgctggaggcggtggcggggggaacccgggagtttgtctccgtgctgcctctcctccgctccaaagagacttttgcaaacggccgaagagccccgggctgcccaaatatcccgccccgggtcgggtcggagcgcgccggcctcgcggcggttccgggcacccgcagcctgggcgcgggacccgcgaggttttgtgtctgggtctgtgagtgcctgactttgcagccacccccagcccagaggtgttgctaggaaccccggccccggcaccttccaccctggcagagcgctaccgagacgcggcccttcgtctggactagtcggaagcaaacaaaaatgtttaacacctcaggcccggtctccccgcggcacagcctcgccctctccctttcttttctcccctttcacttcgcggcgtctggagtcggagcccggagcgggggcgccgacgtaggcggtctggcccccccttcctctcccgcctggagactccccagtttctgtcctgtgtgcctctgtctgtctctcagtctcctcggctccaatctctctctctttctgtctcgtcttctctcttttcgcggaataaaaaagattgcaacatccataatgaacttctgtagcctcagtttattaagtacagtgcctggcattcttcgctgaaagttggcgggtctctcatttataacatttttggcaccgctgaatgaaactgaggaggcgatatttccttttatataaaacgattacttcacggaaaatgctatattgtttattccaaagctgccttttaaatttgttcttttcgcatctgaagcccgaaggacaacagatagcgaagtatgcagacaaaattcttggacattcgcaggtcactgggatttgttctacgaatttcaaatctgcccttcttccccccctgcaactgccctccccccgccagaccctcccccagtcctcctctagccctcccaccccccatcttccgtcaaccttcccccctccacaactgcaaataactcagtgataacagatttttttccaccaactgcaggagatagtgctaatcttttaataaaagatcccattacaatgggatctgtctggacagactataatagatcccgaaatacagccgtgctaatattagaagacagttgtttgggtgcctctcagacgggcccaagcccccctttgaaagtgggcatgaatcacaaagccccgcggccgccgcacctgcaccgcgcgcattcggtgcagcaggctggtaaaagcgggtgacctcgccgccgcttttcgctttataattaccgtcatgaggacgggaggggaggggctcgggcggcccgggggagactggattttgctcacttcagacggctgtgggggctccacatccttcttaatctttccagaatcattctgtctgtttctgtctcgctgtctctctccccttctccctttccctccagtcctccaactcattccctctgctctctttcccctactccttcccctcttctctccttccctccctctacccagactctacccgtactctccctcccttttctccctctctttcttttccagtctccttttctctcttccctccaactcattaatgtagagttgtttagtgccctctaatggcagacgacattaacaattaatagcaaactgtcccctttgcaggagccgccactcaatggcagagttccaaagct

SEQ ID NO: 317970 - DNA, 4001 bp, Homo sapiens
aacgctaagatgggaagcagacacgtgccctgtagggcatctgctcgtatgtccggcttgagctcctgcctgagagttgctgtggctctggagtctcagaagctgcatcactcacacctccgaccattcccttcccaggtggaccccccgccaaccagacccagagtctgtcctgggggccagaggggcaggcacagaaactggcgcctggctcccaggattaagaagacactattaaaaagcatcgctggtttcccctaaatttggcagtaggaaaataacttaggactttcaagaagagtcctagtcgctcactgatccgtcttttcccctcacagattgtgacacaggcccattcccggtgaacattttggctggcagttacttcaccacctattgaaattctgtttacgtttggcccagagaacctggacggatgtttgtatctcgggggccccatctagtacaattcctggtgcacaggcttgcaacaaatttacgaaggtaacagaccaagctgccggcgctgtttttcactggaggaaagctcggcggaagcgacacctagaggggagcggcgggctgtggccgcgccattcatcagtgtcggcggcccgcggccgcgagcgagggctgctggacagcgccccggcacccgctctcgagccgcgacaccgacctcgccgggcccgccccgctgacccgcgcactcctagtgcacttgccgcgccgcgcggaggctcgccgcgctctggaaaacaagaaaccccactgcctcggcggctttccgctcccgcaagagttgcgggcacaaagtcctcaggtggcaggcctggggttggcgccgctttgtcggctgcagggagccccaaagactagcgtcagctcgtccccaaactcgaggcgacaggcgccgaaagcagagtgctgtgcctgcctcgtccaggtccctcctgaaactcagaactcgtctttgttttgcgggcgcaaagagggcggagatcatccacagtgcaagctctcttaggaccaagcccccagcccgaacgctgaacgcccccaacacactgctccctagacacgttcaagcgggtaccccgggccgctcactctggaccgcggccggctacgcacaagcagcgccgcaggctgcctggagtcgggtcgtgccctgattccttcctccccagcctcacatgcggcggaccccggggaagccagggccaggcgaagcgcagcgggccctttgggctgcagcgaggagacgcaagtttccccgcaaagccgcggggaggaggtgctgagaatgcctgcccggcgccccaacccggagccaagggcaccgggcccgggccgaggggccgcgctcgcctggctccgccggggccgctcggggtcctgaacccaagaacggcgcctgcaggatttcggagccgggcgcgagctgcgggctcggcccgagcgcttctgcgtggcgccccgcgtgccaaccgggtcactccggtccccaccgtagaccccggccacgagcctcggcgtcccagcctctcctcgagtcctggccttggccggggtagccctgccgagccctggcccagcggtcccttccccgcgggcaaacttggctttcccggcgcgggcagtaaggacaagcaagcgcccgcgccgggccctgcagcaagatgcggggccgcgggcgccaggaccccagtggggtgcagcgggaccggctggtggcggcgccagcgacatggcaccctccccgcgcccgctgggagctgcgcccgcgtacctgagacggccggggccgaggggaagaccaggtggccggacttgggcgggagggagggagcaccccgtggcggcggcggcgaccccgccccgcgtccttcggctggtttctcgggctgtcggcgggtcccgggctcgctggaggctgttgaggctccagctccctgagccgccgctgcccgctgctgtgccaccgccgccgcggctgccctatttctgccgccgggaccggagcccgtgacgtcaccctctgggccccgcctgcccaatcgccgccacctgtgcgcgccgcccgcccgccagccggtcagacccgcgcggcggccacggcaggtgcgcggagcaggcgggcgcgcacgcggggcgcgatgactccggagcgctggggccatctagggcccggagggaggagggccagcgtagcgctcctgcctctggctagcgtggagctcggcaagtgacagcccctcttcacctctgctctcctccaggctcctttccgggccaggttccccaaagctgtgctctccaggcgcacagggggtctctgaatccgcggccattgctcgtggagtccaggcgggccggtacaccacagcaggagagctgtccctggggacaaagtgggtgaaatcccccgccgttgagacccaacaacctgggaaacagcaaaggttttctcttttctgaatcttccctcttccaactacagaatcttaagacattcagggcatacaggggcaatcccaagtgacatttgcctacctgacctagctgggcccagagggtcccttctcccttagaacaggatatttccccatcctgatcccatccccaagcctggggctcccaaacttttctgaatccctctttaacatcagcagcttttgagatcagtcttccttcccgaatgaactggaaacacctttgtaacaactaggggcccataaatggtcatacgtagcctcagtctggcaggaaacttaggagggagcccctacccaggccaggctgatggccaggagactttctgagggcctgcctcctgctctggctgcgtgggcaccaggggccttcctggcttaggtgaacagtgttctgtccatgcctctgtaatctctcctggccggggggaggtgacagaggggatttttctgaggatgaagttagttaaatataaggaaaaggggaagaataatggaaggctgacctgaagaaagagatattacgtttgttttttccttccacagattttcctgccgctgaacccctccaatgcagcaggcactgtgctattaatagttgctagagatacagcagtgaatgggccagcgcggtcttggcatcacacagttttggtctggggtccagctctccctctatcactgccaagctatgtaatgcagagccaatcgtatctctactgtaggtatcagtttccccacttgtaaaatgaggggttggacaaaacctggttgacttcccatgtggataccatgatttttactcagaaggataaaggctactacatcctcagtgaccctgggccctagccagtgtgatcctctctcagatttgactatgaatctttgccaaggccaccatgactgaacttctggggctggctaggggccagattctccatggcaggactggggaagggatggcacttttcatcttgggaaacagaaaagagaaaatgagtataaaaggaagcagggaagtttggaaatgtgctgtgcctccctctgaaatgtaattctaagtctgtggtcaggaacgtacaccatggcttagaggctggattcggctctcctctaagacatgaggtatttggaaaagcagatttctattctcagctctgatcacaaagtccctgagtcaacctagtggccttattacataatcaaagcaggactttgtgtattttttgttttttagtaactcaaggtcatatgtaaatcagggtctataggttgaccaagatcagaaatagctctgtttaatgcagtgaacaggcactgaacttctacacgcttcccaaagaaggagaagaaggtagttgctgcaaaccagatgtatggaatattccttagagagaatgctaacatctgaagtgagctgtttaactactgtgcataaaataagagtgaaattaaaagtcacctcggaatgagaaaggtgaagtgtgaatgacaaaataaaacaag

SEQ ID NO: 317971 - DNA, 4001 bp, Homo sapiens
cccacttgctgcttttccattttctctcagaggtctgtttcccctaatttcttgtacacttaatcccattttggcatcagtgtttcagaaaacccaaactaacagagatatttaggttgttttcagattcttattctgtataaccagactaagcctcagattgctccattttgagcactgttttcttctgttaagagcctttgaagaccttgcttttgtcccctgaattaagcccaaacccttctcacctctgtactctgccgcagctcatctttccaatcaccactcagtgttctagtctattccaatgctggactctcccactcctcacttccatgcctaaagaaaacatctacctgactagatgcctcctctattctggatcccttcttgactttttaaacccccatgttcttttctgtccattttaaagaccacagaaaggtgttttatgcagtgttttcactcttcttggcaggttaaaagagagactcaatggtgaagtatatagagtgtggaatcaggtctggtttgttatattaccaacattaaaacaacaaaacactgagattgcatatgtttggaaaacactgagctaaacaaaaataattaaagcttttatatttattaactgcaaaacttcccagagcccttaaaatgttaatatatgctgtgattttccaagactaacactgataattcatgtagcttatcccaaatttgactacgaattcttttaaaaaacgatctccagacagtactgcttcttgggacacactgggaaaaggcaaaagctgtcatagcatttttgcatgtataattttcacagtactaaatattcttcacttatagttatttgtatatttttatccattttcccactttagcgttttgcataaggtattgaatatggcaggcacttgttgaattaaaaatcacagaatttaagtgtaggttcatattctgataatacttggcaactggagaacgttagtttgcaccctctttcagtagctttttggagtctttttctataccatagttacctgtgctatcttcgagcctgggaaaataactgccttgatggttagtaaaaagcccttgttaaacatgggcaaaacatttttttctacaaatcactttattggaggaatagtataacagaagaatataaagatggaggtgattttaagggcaagaaagcaggagacagctgactttggtctttggatccactagcctgggaggaaggcagctcgtggcttagttctgcttgttttcatttccaagggtatgtgtgtcaaaaaggtactccgccaggccagcatccggggcccccatcttcactaagttgtgcacgtggtcacctagttctttgatagacttcacctgctcattcaggtagtaggtttccaggaaatcgcacaaatgggggtcacctttatctgaggctagagcgtgcaattccagcaacgactggttcacgttcttttccaagagtagagcacactccatggcatgcagcccgctttcccagtcgtcctgttccggcttcttgatgtcctgcaggcggatccggcctcctcgctggttctgcagcctcatcagcttctccgcgtgctcggtctcctcccgggactggtgaaggaaatacctggagaagttgttcaaggccacgtcatcccgggagaagtaataggccatggacaagtacacgtaggacgcatagagctcgaggttgatctggcggttgatggcagcctcggagtcggggtggaagttctggcgcacccgagaggggccggcggcgggcccggtagggtcccgggaggaggcggctgcggccagggggcggcggggggcgatctgcctggggtccaaggggcgccccggggcccaacgcagcgggagcgcgaagcagcagcgcaccgggcgcagagacgccagcgaagggctgatgtgcctggagaggagcctgaagcaggacagcatagcgccgcctccttggaagtggggaaactgaggcccggccctcttggcgtggggtcgggcgctggaggcgtcagatctgatcagaacgtggccctaggcaacggtgactgcgtcacacgccccttctgttccagaggcgcggggttccacgcggagggcgctggggaagcgccgccgggggctctggggacccgcgtggggcgcagtctaggcggaggccagcgcagatgcccagtcacgattccgtgagcattcgcccccaccgacgacgtgagatttctgctctttggcgattgtcactgatttcacctgcgttaaaaaggctgtcaggagagtaggccctgggacttcccaaagaagggaccaagctgtactcccccttcttctctgaccttttcataaggaccaagagttggactggcaacacagtgaaaagggtgaaccaaaagtcaccaatttacctgtgagaataaaggtccacatccaaagcaagtgtacataaattaactggttatttaacatgtaagtgtggaaacaattgccagcatagtgggaaaatttttaagactctgtttcttttaaaatacatgcatagtttatttttaaacataaaatgtatcttcattgtaaagaaatgagatactgtaggccgggtgccgtggctcacgcctttgggaggccgaggcgggcggatcacaaggttaggagatcgagactatcctggctaacacggtgaaaccccgtctctactaaaaacacaaaaaattagccgggcgtggtggcaggctgctgtagtcccagctacttggaaggctgaggcaggagaatggcgtgaacccggggggcggagcttgcagtgagccgagatcgagccactgcactccagcctgggcgacagagcaagactccgtctcaaaaaaaaaaaaaaaaagaaaaaagaaagaaagaatgagaaatgagataccgtagaaaccctaggaggaataaaatgcctctgaactcaaaatatgttactttcccatcttttcttagtgcagagattatatcctcttaaaatagctctttaaaaattaaactttaaatagcatttagtgttaaaatagtatttatgtaattgttgcagggtactgaagaaaaaagggtaagcacgcagaagaaagttcaaaacaaccctaattcgtcttctgccgagattactattgttaaaatgttgatggtaatgctcagaggtttaaaaaaatgaaaaacgtgtattacagacccacaaaagcgaatacagacatataaaacagctttatatagagatatataattgacatacaataaactgcagttgcggatagttcatgtgaatagagtcaacagtatgtgctcctttttacttgctttcttttagtcagtgtaattattttaggttccatccacactgtatcttgtttcagtagttccttttattgctgagtagtattccattgtatggatataccacaattcgtttatcctttcatctgatgatggacatttttgttgttatagtttttggctattaaaatgaagtcgttatagacattcctgtacaagtctttctgtggtcagatgctctcatttctcttgataaaataccttgtaggaaaagccggattacatgataggtatatgtttactttttaaagaaatttccaaactgttttccaaggtgattatggcattttacattcccatcagcagagtgttaagagttcaagttccttcacattttatgcttacacatggtattgtcagtcatttaattttaattaaaatttaaaaatttctaatgactgtgtgctggtgtttcaatgtgtttttaatttgcattgaagtatgtttgcacctgccttctgtcaaccacatattcttggtgaagtgtatattcaaatctttgtccattcatatattgagctatttgtttttgttatggttgtttgattcttatggttattatctgtctttgatattagcactgcttc

SEQ ID NO: 317972 - DNA, 4001 bp, Homo sapiens
ccaggttcaagcgattctgctccctagcctcccaagtagctggggttacaggcatgcgccaccatgcccagctaattttgtgtttttagtagagacggggtttcatcatgttggtcaggcaggtctcaaactcctaacctcaggtgatctgcctgcctcggcctcccaaagtgctgggattacaggtaggagccaccacgcccagccatgttacttttattataagaaaacaataatctttaaaaacatcgttactcatatattataccaaatacatgctatccagttaaacttccttttttcctgctgttatcttgttttgcctaagaaaatccaaatagcactttataaaccacagtgctcctgtttaaggtcaagctgttttcttttcttttctttttttcttttttgagatggagtcttgctctgtggcccaggctagagcgcagtggcgtgatctcggctcactgcaagctctgcctcccggattcacaccattctcctgcctcggcctcccgagtggctgggactacaggcacccaccacgatgcccagctaattttttggatttttagtagaagcggggtttcaccgtgttagccaggatggtctcgatctcctgacctcgtgatccgcctgcctcggcctcccaaagttctgggattacaggcgtgagccaccacatctggccaaggtcaagctgttttctaggaatcccggacctaaagaccaaacttggaaacgtagagggatttataagtctcactcccacctgagcctgagactgtcttctacaggtgttgccgcaggcagggtcatgcactaacatttcctctaccgtgtactccccttctcaagactcagtgacttgcacgctatcactcttccttcttcctctctcccccatgggaagattaccctctctcacctctactctttccctatcctaactcaaggtgctttcagacaatacacagtcacatcacacatcattgaatgatccctttattctccctgttccaatgtctgcaatgcacaatctccaattgagcaagcacaggagtcatcgtctcaactcctgtcttctcactgggggctgacaaaaggcaggtatcctctccgtaataagagaaggaataaccagtttccagtcttctgggggctggggaatagcagacaaagacagaaaattagctctcttctatactctgagagcatatgaacaccacatatattttgggagccctcctttttttttcccaaagaaataatggaaaattatgaagcagaatattactgctgtagttcagctatgttatgggttaaagtagtgctgggaacccactcaccattttaagtatgctccaaataatgacttcccattaattttgagaagacaatctgtccttaaggttaagactgtttgggctttttttgcgtctcttaattaaaataaaaaaatacattttcaaacaaaagaggtccctttgtaaaatctactgtgttatcaaaatggcaatcaccatcattaatgtttcccaacattcgccactggagtcctttcctgggatccaaactgctcataacaggaaactcgactaaattactggggctggcaccaagctatcctatgaggcaaagacaaagaatgcatattttctttctgcaagacagtgctcttcccctattctgaaggctagaatcaaaaaaagggaactcttgaagccatgtctctcaactggcatgaacaagactcagcagcttcatcagcacaaggaaaaagtggccaagcaaaatcccaaaggctcagaggacctgactgtgaagcaccctcaactctgactgttctatgcagagaagagtagcacatttgccaggagaccaaggagagttataaaatctattacttaccatttttattgaaaagagttgatatgcctggcacacaatgaccccgaagatggtgcagcttggatagtgaatgtgcaagttagctatgcagagtgtacttccttttctgagctgtgtggtctgtccagctttcacacattgatatgtgaggctacatttgcatgttatctcaaccctcagagcatttgtatagctggccaggtttatcttgttattatttttcaataatacaggaacaggtatagatgtagctttgaagactgaaaaattgacacaaaattttttagaagtacctagatattaaattttgctatacattattaatgttttatataacttctatatttttggatacatatgtgtgtgtgtgtgtgtgtgtgtctccatctctctcttatctatgaaagactcacaccaaaatgtgaatagcatttgacttgagtggatatattattataaataattctttttttgtactttttggagtttttcaagttttctatcttgggtatatagcacttgtgtaaaaacataactataatcattattaaaaagagcaaaagtatatgaaaattttaataagcaactccaattatatttaaattcatattaccagtatttaaatgaaggaaacactcataagcttatcatagaatgccattcatttccctaaaaaaaaagtacagctcagtctaggttcatgtattaattttggggtaatatttgttagcatcagatgttaagggcatagtatttgatcccaagtagtcagactttccaatcatccatgtacctctctgaacacattctgatatacagatttggcccctttaattggaatatttagccttctactaaagtaagttcaagggtagaaggtcatctttgttttccatggcagaggaaaggcatgattccttttttggtggttgcaaatttccagatcttgttgtaagtattacagtgcttatttagtgtaaggtcaccaaatttctatacatgatgctgaccaaacactaattaatcctatatccatacaaaatcctttttcaaaaaagatgttacctgttatttattccttaaaataaaaatgttttcaaaattaagacataattagaaattaataggacaggcaaaaagccagggtaggggttgagttccagaagtagaaactgagattgtcctgaaaactttacatattataaagagggatgtgaggcatggtcagaatctggtggatggtcaggaatctgaaattgcacattatcttacacataatacatgcttaatgaatgaatagaggaggaagagcaaagcaagagcgaggtatgggacccaggcatacttttaagtataacacattttccagaatgctttgaaatggagacattctttactttcactagaaagcctcttatctactgtctgttagaatagagatcatcaaagtgcagatacagcttagggtaaagagaatcactctaaagcagtggttctcaacctggctgcacattaaaatcacctgggatgttttaagtctcagctcccaggcttcaccccaggttattatatgaaaatctggggttgaaactcaggcatcagtgtatttcaaagctcaccatgtgattccaaggtatgtgcatatttgagagcctttgccttaaaagaaggagcaggtgactcatactagcaagatagtgaacagatcaccaggccagccttgtgggtagaaataatcgtgacactctgacactgttctctactaagttaatcaacatgtttaccccatgtactacataaaaattacttaatcagcccgggcgcggtggctcatgcctgtaatccctgcactttgggaggccgaggcaggcggatcatggggtcaggagatcgaaaccatcctggctaacacggtgaaatcccgtctctactaaaaaaaaaaaaatacaaaaaattagctgggcctagtggcgggcgcctgtagtcccagctagtcgggaggctgaggcaggagaatggcatgaacccgggaggcggagcttgcagtgagccgagattgcgccactgcactccagtttgggggacagaac

SEQ ID NO: 317973 - DNA, 4001 bp, Homo sapiens
ctgttatccccatttgacagataaagaaactgagtcatggaaccatttaggaactcacccaaggcccacagctggtgcgtggcagagaccaccttcaagctcaggatcttgattctggagtcacagtcttaaccgcaacccctggaaccacagcccaaacccgccagcgagccacggttcactctcttcactttcttgtttttagaaatgttcctgtagagcagcctctagtaacacctcagacaaatgaaatatcatttctacatccctgatctctctctcttgttaacgtattgtgtaaatggtggaaaatgtggtttttaaagcacattgaggctggtaaaagcttcaaagccaccgcctgcacttactctttagaccactagatgtcagtgtgattgctctatgaagcagccgtaacttggcaaggtgcagcattgcaccagaaatcagctgctgcgagcttccaagcctctggactccagcagaagctggggggaatttgaagcccaatggtagtaaacaaataatggacatgacagtcaggcagtgtggatttcaacctttacaataatttctcaagggaaatggaaacctttttagcctttcctttttgaaacggatggtcaacttttccacggggtgccttaagtgcaccataacgcctttgatattcaggatcgcctttaatggtacatcataaaacatgtggttttattggaaagagcacccttatcctcctccccctcacctatcacttatgattaatttcttaaggtatcggactatttgaagtgtgtgtatctcacattgcatggggacgttttactctacctaaaacctccggtggcattcccatagcatgggcagaaaatcacagccacaacttcacccttccggtgataagcccatctgtttcccacgcagaattatttgtatttaatgaaaaaatatttaaaatggtgaatattaattattattttacattagtactcaaaaagtgtatatagttttatcccctcaacaactccatgagatgagttctattattatccccatgtttagatgagaaaactgagacacagagaggttaagtggctctcccaaagtcacacagctaatagaaggcagagtcagaggcccatttctattaattacttccctgcaaatcaagttaaatggggggaaaagaccttgtgaatttttcagaagaatcagcaatgtatacaagacagccaaaggctccgaggaaaatttggagttgctggttgctttgaaaggcctccttggctgatctgcagctgtttgtcatcatttatccagtttgccaggattccttctgagaaggcataattcatggcagtatagtccctttctttagtctatgtagaaatctcatgtgaatcctcacctcctgccaggtttggaggaaattgaaagttactctttctcatcaaaaggatggacacatatttgttaggaaccaggatgaaataaaccatctgtgcccagctctgttggcaataaaaccttgtttctggtttcactgcaagacgttatttaacgctagtggcaccagaggttccaacaagaacacatgagaggccttatccagttacgaaagagcaagtgacagacacgttcccggccacatttttatctgcttatcatccttttggctaccatgaggctgagttttagtgtctcctgttcatctcttttgctattttccaacagaacatgcgtttccttcagttattcagctagcacagtctgtgctgccagaatttggaagtggtgcttttttcctgctataaaaaattacacatttatttgaaagaagaaacctaggcatagctgttacctgactcctgcagaagaaggcggaaggatggcctcctttagtggatcttcctgggccagggtctgggccctactcacttctagctgtcgcatctgctctgcatgtggaactcaagaactgcggagctttctgatgcctggcagggttttgtcccggtcagtggttgagtgagccacacctccctcccctgaccaggcaaacttagacaagaaaagttctattatgccctcaggatattgagtaataaggaggagaaaggggaacttaaaagtgtctgttcagcctggatacttctgctaacattcccaccaagcatgtgatatttaaaagggtaaaaccaaaacaagattctcctgcctgccaccatgtttattcaagaggaagaagctgtaagttctttggacccataatctttccacacacccaggagtgtcacctgcaatgggggccaaagggggatgcttacaattagaaaggtccactggagcatgtggaatatttggaagctaattgcacctgaggtcaggaggtaaagtggtgtgcttgaccatatcaactgaagagtggtcactcatgtgtggaaagcccactagactcactctgtcggctctctgttagactattcttgaggctggaagaaatggagtatttagatgataatccatgtgaaaagaccaccagtggggctgagtgtagtgggtcatgcctgtaatcccggtactttggaaggctgaggcaggaggattgcttgagaccaggagttcaagaccagtcttgacaacatggtgagaccctgtctctacaaaaataaaaaaaaaattagccaagtgtgatggtgcatgcctgtagccccagacatttgggaagctgaggtgggaggatttcttgagcacaggagttcaaggcttcagtgagctatgattgcaccaccattgcactccagcctgggtaacagagcaagatcctgtctgaaggaaaaaaaaaaaagaagaaagaaagaaagaaaaataaagagaaggaaagaaagaaagaaactcaaaaaagaaaagagaaaaaaagaaaagaaaagacaagaaaagaaaagaaaccccccaaaacagaggctaccattgggactaaatgagattttaacaaattgtgattgtgaaattaacctcccccaccttccttctactcattcattcataaacatcaaacacttactgtgtgggtcaagcactggccaagactagaaagatggagaagacaaggattttccactcagtggcttataatcttacagacgttatgccagagatggtcactttcctccccgtatgattttcccttcttatagagtagtagggtcagcaaactatggcccgcatgccaaatctggcctgtggaatgttttgtacagacctcaggctaagaatttacattttttaagaattgtaagaaaagggagaagaagcaaaagaagacaatgatggtaacaatgatgatgacaacaatgatgatgacatggctgagaccgtatatggcctgaaatatttactatctagtcctctgcagaaaaagtttgccaaaagtttaggatgcttattctatcctaagagatctctggctttttacctggcccacagctacacaggataaggcattttctagtccctcttgacattagatttggccatgtggttaagttttagtcaatgggatctatgcagaagggatctatgtagcttcttggtgtgtcctaaaagagggccccatcatgctttcccctcccagctggctgggatgctgtgggggcctgagctcttctgatccagtgatgactaaggtaatactctaggcatgacagagccaggagatagaaggacctggcccccaacacaggagacaaccccatcttcactggattttgctagatggttataaagaagggaacaggaggacagacatttaacttttaaaaatcagtgttatgttgtgtctcttttgctgcaaccaaacatgtattataaccactatagagatagacactgtataactaaccatgacacactgtgatgagtattaagctcaaagtatgaataaaggcatctggaaatacccaggaatatgtaattccttctgcatgggggcagaagag

SEQ ID NO: 317974 - DNA, 4001 bp, Homo sapiens
aggtaatttcattctattttgcctcaagcagtaataaaattagctggactcaagcttaaacagtttaaatgtaggtcattctagtgtttttccatttgacaacttaaattgctcaactttaagtctaagttaaaatgctaattccatagttaaccagtctgtaagggcaagtaaccggaatcgccacaccagcaaagttccaagtaaatgttacttggaacattattataatactgttatagaaacatgtttatagaaagggtttccagaacacgattatagaaatctttatgtttatagaagtgtttctataacatagaagatttatttcactaagccaaggagtatgttggcttttaaataatctaaaagatggtaactactagaaaaatataagctccagtccctgaagaaaagcatcttgtttctgcatatacacaagaacccagcagagtaaatgctaaataaacggagtgtacacaaactttcatccacagatctcgactgtcacagttgttttttccaacacatctccaacaccagtaattcatccagcatgacacgctccacagaggtccaaatagtatactgtaactgggcgccaacctttctattccaattccgtattttaacccacagatgctagtgagatcttaaattcgtcgctttgcacctcattcccttcaactataaagtgaatcttctcaaggtctttctgcaaaagtctcctccaattaaaaaaaaagtagagaaaaaaaaattcaacgtctaaaaccggagcctaacttcccgctggcgggaatttcccatcagcaatctgagattcaaacccgatgaggaacacagtccatgttcatttgcacttactcatcgttttccctacttttttccagaagctacggtggcggcacatctacccagggcctgtacaagtacacgtagaaaggaagcccaaacccttttcctttgtcacattcccacttccaacccttgtctccctggaagcccagaactagcccaagtacaaatgccgctgcagccttctcggcaggtggccttttgaggctgatgctgccccgagggacaagtgctctgggggcaaagactaaaaacaggcttgggaagcggggagctcggagtcagagggcccggcgtcaacaaatccccgcccttcccgtgcgtgcctgtgaccccgctctccaaacccgtgccttgggccgctaaggaaggaggatagccgtacccacctcgccagctcactgcaagaatcaaatgaaaggcagaaaagtggctccgcacagtgccggacacacagtgagggcgtggaaagaacattggttgttactaccactccgtgcactcgctgctccctctttgctctctgcaaaaccgaaggcgcttctgcgacgcgcggaccgcaagactccaatcagactttagtgctgcccccaccctaaacgaaagcctccttctggtccgaaccgactggatcccttggccaggggaggaaaaggtgccgcgggcgcgtggcggagagggtggcgggcgggaaacgctgggcgcgggacccctggccccagagaccgccctggggcccaggcggcggccgcggcttactcctgccccgcgaggccgttggacgcagcacgcgcacgcggcggacacggccacgcgccccagccgggacgggagcgggagcgaggagccgccgcgcgcccgtccgtccgccgcgcgcgcctgcggccgttggggtgggggttggggtgggggacgcgactggcgcggccgccgcgagcgccactcagacttctccctctcacaagtgctgcggctcggcttagtcctctggcctccctgccccgcccacaccccggcgtacctacgcggctgagctggagaggaactagctctgcaccacagcaccgaggatagtacaaacccctcacgcaactgcgtccgcacacacgcgtgctccgccgccggtctatataactgccactcaccctaacttgttgcggccaggtcgggcgacgggatgaccaatcccgaccgcgtcctcagggctcttcgaacagtaattgggcactgactcggggatgaaggcgtggctcttgattggctttgactcctgcctatgagactgtgaggatctcgtttccctagtaacagatcggcactaagagagaccaataaccgaaaagtacaatagaaaggcgagtgagcagttctttgactgatactcaaagtagccaataaatgtgtggggctgctcttattcgttaacacgtcttcccctgggcggagatccgttttccatgcaggagcggttgcgccacaaggtggggcccgtgtactttggggaagtaaacccctagcaactaggaggcgggcgtccgagaggccaagacagcctgtggccaatcgcaacgccggaaggagctgatagacacggaggttgctctgctcggaagagaccgagccccagggccgccgtgccctctgggcggttgtgaggctgtgcagcctgcggcttctgccctctttctttccctgactggttgggtccggcctccgaggcctgtaccccgccttttccgcataggtttgtacctggcgaaccaactagtaaagtttcccgggttgttttctttttattacaacttttttcttacgtgcggcggccaagggccttgctgctctcaccattactcagcactgctgcggggcagaggaaggagggtcgttcctgcgccgcccgcaggctcccgccggaaggtcgccggtggaaggcctgagagtgcgcccttccgccaggcgcttcttggcgggcgctgcgaggcggccgcgggcgtgtggcgaggctccctttgtggcagctgaggcacggtggtccgcgcgtgctccagtggagtgtgggccctcgcaccacgtcccgagctgcaccactattgttcagcctcgaattgccgcgggtgggggcttattctcgtcgctacgcctttaaaaggcaactcgtcccctcctcctggcgtttcaggcactggcggggctacaactcaaggctggccggccctatttctatggaaatagctttggttcccagccgtccggcacagacacgccccggtttgttctcgttccaggcatgtgaccagggtctcccgcggagttttgctgagaattttggaaatgaagcatgtggagcgcctatgtcgggggagagaggccgagctgaaggagcacgggcgccggcctcggcctctggggagccgggcccgctcgcctccctgcgcggggctagcccgagcctggaactcgggaggcccaggagcgaagtgaaagccccttctggtcccccagggctccactcccgcagcagcccggctccgtcggcgtcagtggagccccaggcctgggtccgagatgagcgagacgctgctctggctcgcggtcgcccgagcgctcccaaaaccagggaacaggccccaggagagaagcccctagaagtttcctggagcagggagtctcctgtatcctgttagctctgcaaaggaatctggactttattctgagggccttggagaacccctgcaaagttttttaaaaggtggactaagagattggcatttcacaacatgactctccgaattgaaacactaagaagattggcgaaatttaacatttacagattagtaatttaacccaggtgactcgcgatgagggacatggctacccttcacttttggagggagttttaagtgatacagatctttttgccaagcaattttttttttttttttgagacggagcgtcgttctgtcgccctggctggagtggaatgccgtgatctcggctcactgcaacctccgccttcctgagttcaagcgattctcctgcctcagcctccctagtagctgggattacaggcgcgcgccaccaggatctgctaatttttttgtatttttagtagagacggggtttcaccatgttggccaggctgg

SEQ ID NO: 317975 - DNA, 4001 bp, Homo sapiens
tttaaaagagaaaaacaaacctatcatggcacttcagttgttaagaaagtttcttgcaaatacaaacataatagtttaaaagaaaggctaagctgcagtcttaccactttctaccttcaacctccccctcccccagacacacgctccaaacgttaccatcccatgccatccatatcaaagactaagttgagttttcgtgttcagaatgggagagacccctacacaagagggcatttcaccagcgtccactggaaagggaaaaacaggcaattttgcagccaggacaagagcgtgccttccctaggatgatggaacagtgagacaggttttccgtcccagcgtcttaactttagatgatggcccccgacgcccctccccaactcaccccagctcccccttgcaaataaataaataaataaaagaccaaaacaacatgccaccacccaccctgcggaatacattcaaatatgcctaagaaagaggagaagaaaagaagaaagacagcgggaaaaaaataataataatgctcttatattgctgcggtttcaccctgaaagaaaaacatttcgttgtttctacctgctgtgggatcaggctcctgtcctgctcgctcccttgctcgctcgctcgctctccttcttctctctctctctctctccccccgtctccccccgccccccccccccgactataacattcctgtctctccagctaggaaaagccacgttcaaagctctgtctgtgtatcgtggtccaaagtcgcacttacctaaggccccctctggacacaggatctcttaagaccggggaaaagtctgggagagagaatcgtggagagactggagccagcgcgagtctgcgagtccgagtccgggcgcgccagagcagaggggcgtcctcgctctgcctctcactcacttggtctgagccatcatggactctgcgtgctcctttgctgaagatttcacacccaaatttgcttcccaatatccaatctgcagctatacaacaaaagatttctctttaccaagacagtagtaatacgtcccagggcaaaccggatgtgaaataggcggtgacttcatgccagagagattttattttagaaaggaaggtggtaccagcctctggatctggagaccaatccgcccattttttatatgcagcacaatttaacttgcaccactctggccctaatccccttctctctagctgcaggctcaaatccttctacaatctgctgcaagcttctctttttggggggagcggcaatgggggagggaagggtagaaagggtgagagacatacggactgcacttagagtcttttcacacttgcaatttatgaacacccgattttaaggtgagcccattaaaaatacaactatttagtgcaactattctacctttgatcaaatattaaaccactgcctgcatatgaatgaacgcaagctctgaaactgggagatgcagggttacacgtgtggggagagcactcgtctcgcctctctccctcacacacacactcccacacatatgtctaagtccccgtgtcttgcagagtcacgaatggtgacggatggtaggaaagagttctggcaggtaggaaattggctactggatttagagagtctttcgcactttctcaggttgggagcgctttccaccccaccttcttctgtagcttagaggacagcaagaataccctccggaaccgggtttttacctttggaggcaactgtttgtctatgttatcatggagaaaacgcaggcgctgttacctctgaattgtgctgggttcctggacgaagaatatttaactaataaatcactccgatcatttctaggtttgagaatcatatctccatttccggaatcattcctttgcctcgagctccatcattctcggattaggaaaatgggagagggagaggaggaatttttagaagtcaggacgaaatccgcatctacttttccccccccttctccggcatcttctgttaccctccctggtagctctccacccacaaataattatacactaggaaaggggggtgtgtttcaacatcagtctaactaaatttccaaggaatcagggatgacttggtttcctcctcggattttgtgaatggctgtttgtagcagagaggggatgggtgctgtcttcctgggagcgcttactaagacctaaaacactgggagctgtcccttcagcacttccgtcctgttatggcaggaggtgctgaaaaggtgaggtgccccatacaatgtttctggtggataaggtctgagctttggtaagctcactggtcattttctcctagtgagttcctagcagagaagacgtttcagatggggcggagcctgagcaagtgaagaaaaaaatctgagtagccagtccataaccactttggggtttctgattctacaagtgcttcttgaccttgtgcagcaatgcaatcagcttaatgattaaaacttaaataaggtgattgcaataataaggaatataaaactgaagaccacattaggggttgggcttggttaccttctgagttttgtggtcaagtgtcaactgggaagtgattttagagataaacttttggaagagagatttgaagattatgttaagatagccctgtttctgggcagtagttaattgcctgttatgttcagatataataaatgccaatgtattcttaaagatattcgctgaagaaacatcacagcttccctatgtgtcattacccaatttttatttacttatccattgattaattaatttattgagtggtttggagaataaaactgaatttaatgagatttataattaataatgaaatcctgagttaacgattagaaaacattattcttttacttcatctacaatgcaattccacagttttgtcttgttttaatgaaagtcaacagttataaaaatctgaatttttagtgttctcctggctaaactgttgcaggtccttttatgatcttctacaaattgaaaataaatttatatcctttatctaatgaaacacaactaaatcactctactgattttggttttgcaaacaaattcactgaagcttcatcatgtgaacaatagtctcagagcaatgccaattacattctgcttcagattaaaaaatgttatgtgactatgaaacaggatacaattgcacagcgttttcaaacatttaaagaaataaatattaaataatttgggggctatagtgtgtatatggaaatggaaatacctatactatgattctctctttaaaatgtaatactcacaaggtagattttactagatgattctctatgaatatcagcttgtaatatgtatatgcatgtatgtatacatacacacatacatgtaatttgctttaagacatctatatttttcataaattgtgagtgtttaaaaataatgatattttaatactccaaaacatcaattgatactctaattatgggtgtgtttattgtgttccatctgatatgtcattaatatatgcacatactaccataaaatataataaattaatgacaagaaaatactttatattgtgtttttatattcaatattttatataatttttgatattcttgtgttttgttttagccagaatgaaccacttcaaactatgtgtgcatataatgatgtcagtttttttaaatgataataactatggtgtttaatattcttagagtgtttacttggtgccaagtaatgtgaaaagtaattttcataataattcaatttgattctcaaaatgagtctctatgagagatggtcttaatatttctgttatacaaatcattcagtaaattgtagactagagagatcaaaagacttgcctaaggtcacacagctagtgaatatccacactaaaatgcaaatccaaatgctctgacttcaaagcctattctcttaaccacactcctacattactctctttccttactgtgagactgtgagctcatagtaaaatctttttc

SEQ ID NO: 317976 - DNA, 4001 bp, Homo sapiens
actgcaatcttttaaagcttctttttcattaaaccctctatagtttaatgtggtatgcctttaaatacatctacaaaatgctttctgcagtctcgggaaatcatttaaatcactaaaaaccattacaaacaggcttgtaagcaatgaaacataatatgtttagagcgaaatggtctagagataagaactctgagcctcgtcatagcttttccttaatttagtaatttagtgactggttttgaaacagattagttgactatgacaagaaatcttggataaatattatgttaaaatgctacatctaaattgcaaaattttaatttacccttttactaatcttcatcgtttgttacaagggaaaaacaacttttcttagccctattaatttttgttgatctttttaaaaagattgaatatctgaatgggtaaacaaaacacagcaaaaccatttgacaaggcaccatagatttttgccctcttctgacatttttaaaagagaaaaacaaacctatcatggcacttcagttgttaagaaagtttcttgcaaatacaaacataatagtttaaaagaaaggctaagctgcagtcttaccactttctaccttcaacctccccctcccccagacacacgctccaaacgttaccatcccatgccatccatatcaaagactaagttgagttttcgtgttcagaatgggagagacccctacacaagagggcatttcaccagcgtccactggaaagggaaaaacaggcaattttgcagccaggacaagagcgtgccttccctaggatgatggaacagtgagacaggttttccgtcccagcgtcttaactttagatgatggcccccgacgcccctccccaactcaccccagctcccccttgcaaataaataaataaataaaagaccaaaacaacatgccaccacccaccctgcggaatacattcaaatatgcctaagaaagaggagaagaaaagaagaaagacagcgggaaaaaaataataataatgctcttatattgctgcggtttcaccctgaaagaaaaacatttcgttgtttctacctgctgtgggatcaggctcctgtcctgctcgctcccttgctcgctcgctcgctctccttcttctctctctctctctctccccccgtctccccccgccccccccccccgactataacattcctgtctctccagctaggaaaagccacgttcaaagctctgtctgtgtatcgtggtccaaagtcgcacttacctaaggccccctctggacacaggatctcttaagaccggggaaaagtctgggagagagaatcgtggagagactggagccagcgcgagtctgcgagtccgagtccgggcgcgccagagcagaggggcgtcctcgctctgcctctcactcacttggtctgagccatcatggactctgcgtgctcctttgctgaagatttcacacccaaatttgcttcccaatatccaatctgcagctatacaacaaaagatttctctttaccaagacagtagtaatacgtcccagggcaaaccggatgtgaaataggcggtgacttcatgccagagagattttattttagaaaggaaggtggtaccagcctctggatctggagaccaatccgcccattttttatatgcagcacaatttaacttgcaccactctggccctaatccccttctctctagctgcaggctcaaatccttctacaatctgctgcaagcttctctttttggggggagcggcaatgggggagggaagggtagaaagggtgagagacatacggactgcacttagagtcttttcacacttgcaatttatgaacacccgattttaaggtgagcccattaaaaatacaactatttagtgcaactattctacctttgatcaaatattaaaccactgcctgcatatgaatgaacgcaagctctgaaactgggagatgcagggttacacgtgtggggagagcactcgtctcgcctctctccctcacacacacactcccacacatatgtctaagtccccgtgtcttgcagagtcacgaatggtgacggatggtaggaaagagttctggcaggtaggaaattggctactggatttagagagtctttcgcactttctcaggttgggagcgctttccaccccaccttcttctgtagcttagaggacagcaagaataccctccggaaccgggtttttacctttggaggcaactgtttgtctatgttatcatggagaaaacgcaggcgctgttacctctgaattgtgctgggttcctggacgaagaatatttaactaataaatcactccgatcatttctaggtttgagaatcatatctccatttccggaatcattcctttgcctcgagctccatcattctcggattaggaaaatgggagagggagaggaggaatttttagaagtcaggacgaaatccgcatctacttttccccccccttctccggcatcttctgttaccctccctggtagctctccacccacaaataattatacactaggaaaggggggtgtgtttcaacatcagtctaactaaatttccaaggaatcagggatgacttggtttcctcctcggattttgtgaatggctgtttgtagcagagaggggatgggtgctgtcttcctgggagcgcttactaagacctaaaacactgggagctgtcccttcagcacttccgtcctgttatggcaggaggtgctgaaaaggtgaggtgccccatacaatgtttctggtggataaggtctgagctttggtaagctcactggtcattttctcctagtgagttcctagcagagaagacgtttcagatggggcggagcctgagcaagtgaagaaaaaaatctgagtagccagtccataaccactttggggtttctgattctacaagtgcttcttgaccttgtgcagcaatgcaatcagcttaatgattaaaacttaaataaggtgattgcaataataaggaatataaaactgaagaccacattaggggttgggcttggttaccttctgagttttgtggtcaagtgtcaactgggaagtgattttagagataaacttttggaagagagatttgaagattatgttaagatagccctgtttctgggcagtagttaattgcctgttatgttcagatataataaatgccaatgtattcttaaagatattcgctgaagaaacatcacagcttccctatgtgtcattacccaatttttatttacttatccattgattaattaatttattgagtggtttggagaataaaactgaatttaatgagatttataattaataatgaaatcctgagttaacgattagaaaacattattcttttacttcatctacaatgcaattccacagttttgtcttgttttaatgaaagtcaacagttataaaaatctgaatttttagtgttctcctggctaaactgttgcaggtccttttatgatcttctacaaattgaaaataaatttatatcctttatctaatgaaacacaactaaatcactctactgattttggttttgcaaacaaattcactgaagcttcatcatgtgaacaatagtctcagagcaatgccaattacattctgcttcagattaaaaaatgttatgtgactatgaaacaggatacaattgcacagcgttttcaaacatttaaagaaataaatattaaataatttgggggctatagtgtgtatatggaaatggaaatacctatactatgattctctctttaaaatgtaatactcacaaggtagattttactagatgattctctatgaatatcagcttgtaatatgtatatgcatgtatgtatacatacacacatacatgtaatttgctttaagacatctatatttttcataaattgtgagtgtttaaaaataatgatattttaatactccaaaacatcaattgatactctaattatgggtgtgtttattgtgttccatctgatatgtcattaatat

SEQ ID NO: 317977 - DNA, 4001 bp, Homo sapiens
tgcaatcaatcaccatctgattgttgaatttagacttggtagtggaatgttggagaactggaagagtacagaaagcttagagaattaaaaatgtatatagtctatgtgtggagtcagttttcgaaattcaatgcactacctggataaggagcagctatggtaacattttaatgtgctgtaattaattccagtcataatataaggaatgttcaaagtatttaatctatatttctttgtagggtaagtgattaatagactgcaatcttttaaagcttctttttcattaaaccctctatagtttaatgtggtatgcctttaaatacatctacaaaatgctttctgcagtctcgggaaatcatttaaatcactaaaaaccattacaaacaggcttgtaagcaatgaaacataatatgtttagagcgaaatggtctagagataagaactctgagcctcgtcatagcttttccttaatttagtaatttagtgactggttttgaaacagattagttgactatgacaagaaatcttggataaatattatgttaaaatgctacatctaaattgcaaaattttaatttacccttttactaatcttcatcgtttgttacaagggaaaaacaacttttcttagccctattaatttttgttgatctttttaaaaagattgaatatctgaatgggtaaacaaaacacagcaaaaccatttgacaaggcaccatagatttttgccctcttctgacatttttaaaagagaaaaacaaacctatcatggcacttcagttgttaagaaagtttcttgcaaatacaaacataatagtttaaaagaaaggctaagctgcagtcttaccactttctaccttcaacctccccctcccccagacacacgctccaaacgttaccatcccatgccatccatatcaaagactaagttgagttttcgtgttcagaatgggagagacccctacacaagagggcatttcaccagcgtccactggaaagggaaaaacaggcaattttgcagccaggacaagagcgtgccttccctaggatgatggaacagtgagacaggttttccgtcccagcgtcttaactttagatgatggcccccgacgcccctccccaactcaccccagctcccccttgcaaataaataaataaataaaagaccaaaacaacatgccaccacccaccctgcggaatacattcaaatatgcctaagaaagaggagaagaaaagaagaaagacagcgggaaaaaaataataataatgctcttatattgctgcggtttcaccctgaaagaaaaacatttcgttgtttctacctgctgtgggatcaggctcctgtcctgctcgctcccttgctcgctcgctcgctctccttcttctctctctctctctctccccccgtctccccccgccccccccccccgactataacattcctgtctctccagctaggaaaagccacgttcaaagctctgtctgtgtatcgtggtccaaagtcgcacttacctaaggccccctctggacacaggatctcttaagaccggggaaaagtctgggagagagaatcgtggagagactggagccagcgcgagtctgcgagtccgagtccgggcgcgccagagcagaggggcgtcctcgctctgcctctcactcacttggtctgagccatcatggactctgcgtgctcctttgctgaagatttcacacccaaatttgcttcccaatatccaatctgcagctatacaacaaaagatttctctttaccaagacagtagtaatacgtcccagggcaaaccggatgtgaaataggcggtgacttcatgccagagagattttattttagaaaggaaggtggtaccagcctctggatctggagaccaatccgcccattttttatatgcagcacaatttaacttgcaccactctggccctaatccccttctctctagctgcaggctcaaatccttctacaatctgctgcaagcttctctttttggggggagcggcaatgggggagggaagggtagaaagggtgagagacatacggactgcacttagagtcttttcacacttgcaatttatgaacacccgattttaaggtgagcccattaaaaatacaactatttagtgcaactattctacctttgatcaaatattaaaccactgcctgcatatgaatgaacgcaagctctgaaactgggagatgcagggttacacgtgtggggagagcactcgtctcgcctctctccctcacacacacactcccacacatatgtctaagtccccgtgtcttgcagagtcacgaatggtgacggatggtaggaaagagttctggcaggtaggaaattggctactggatttagagagtctttcgcactttctcaggttgggagcgctttccaccccaccttcttctgtagcttagaggacagcaagaataccctccggaaccgggtttttacctttggaggcaactgtttgtctatgttatcatggagaaaacgcaggcgctgttacctctgaattgtgctgggttcctggacgaagaatatttaactaataaatcactccgatcatttctaggtttgagaatcatatctccatttccggaatcattcctttgcctcgagctccatcattctcggattaggaaaatgggagagggagaggaggaatttttagaagtcaggacgaaatccgcatctacttttccccccccttctccggcatcttctgttaccctccctggtagctctccacccacaaataattatacactaggaaaggggggtgtgtttcaacatcagtctaactaaatttccaaggaatcagggatgacttggtttcctcctcggattttgtgaatggctgtttgtagcagagaggggatgggtgctgtcttcctgggagcgcttactaagacctaaaacactgggagctgtcccttcagcacttccgtcctgttatggcaggaggtgctgaaaaggtgaggtgccccatacaatgtttctggtggataaggtctgagctttggtaagctcactggtcattttctcctagtgagttcctagcagagaagacgtttcagatggggcggagcctgagcaagtgaagaaaaaaatctgagtagccagtccataaccactttggggtttctgattctacaagtgcttcttgaccttgtgcagcaatgcaatcagcttaatgattaaaacttaaataaggtgattgcaataataaggaatataaaactgaagaccacattaggggttgggcttggttaccttctgagttttgtggtcaagtgtcaactgggaagtgattttagagataaacttttggaagagagatttgaagattatgttaagatagccctgtttctgggcagtagttaattgcctgttatgttcagatataataaatgccaatgtattcttaaagatattcgctgaagaaacatcacagcttccctatgtgtcattacccaatttttatttacttatccattgattaattaatttattgagtggtttggagaataaaactgaatttaatgagatttataattaataatgaaatcctgagttaacgattagaaaacattattcttttacttcatctacaatgcaattccacagttttgtcttgttttaatgaaagtcaacagttataaaaatctgaatttttagtgttctcctggctaaactgttgcaggtccttttatgatcttctacaaattgaaaataaatttatatcctttatctaatgaaacacaactaaatcactctactgattttggttttgcaaacaaattcactgaagcttcatcatgtgaacaatagtctcagagcaatgccaattacattctgcttcagattaaaaaatgttatgtgactatgaaacaggatacaattgcacagcgttttcaaacatttaaagaaataaatattaaataatttgggggctatagtgtgtatatggaaatggaaatacct

SEQ ID NO: 317978 - DNA, 4001 bp, Homo sapiens
tgctcaacataaaaactgtgagttgtttatctctaggttttatatttagaatatagtttggtttattctcttcttgttgtttatcatctaaatatttggacttttaagatttcagtttccacagtgaactgtgcattaaaatttttaagctggtgtctctaacaggaagaacatatttagggattggaggggataggttaacatgttgtgatggctgaattcctctttgaattctgcaggtaccttgatttcagaagcaactgtatttatttctatttaaaaacataggaaacacactgttgaatgccggagtcgtgcttttattctgttcctgtgactgctttgttaaacatgcttcctaatgtttctgtgaagctaaaggacacactttatagtcaagccatgtgctgatctctctcacatacaaaccacacacacacacacacacacacacaaatgcacacaaacatgcccacacatatctttcaagccctctcaaattctgccaggttgctgctagaaaatgtttcatctcaaacagatggaagctggagtgctttgctttgcatgaataaagggatctttttacctcttaggtaaagtgcaatcaatcaccatctgattgttgaatttagacttggtagtggaatgttggagaactggaagagtacagaaagcttagagaattaaaaatgtatatagtctatgtgtggagtcagttttcgaaattcaatgcactacctggataaggagcagctatggtaacattttaatgtgctgtaattaattccagtcataatataaggaatgttcaaagtatttaatctatatttctttgtagggtaagtgattaatagactgcaatcttttaaagcttctttttcattaaaccctctatagtttaatgtggtatgcctttaaatacatctacaaaatgctttctgcagtctcgggaaatcatttaaatcactaaaaaccattacaaacaggcttgtaagcaatgaaacataatatgtttagagcgaaatggtctagagataagaactctgagcctcgtcatagcttttccttaatttagtaatttagtgactggttttgaaacagattagttgactatgacaagaaatcttggataaatattatgttaaaatgctacatctaaattgcaaaattttaatttacccttttactaatcttcatcgtttgttacaagggaaaaacaacttttcttagccctattaatttttgttgatctttttaaaaagattgaatatctgaatgggtaaacaaaacacagcaaaaccatttgacaaggcaccatagatttttgccctcttctgacatttttaaaagagaaaaacaaacctatcatggcacttcagttgttaagaaagtttcttgcaaatacaaacataatagtttaaaagaaaggctaagctgcagtcttaccactttctaccttcaacctccccctcccccagacacacgctccaaacgttaccatcccatgccatccatatcaaagactaagttgagttttcgtgttcagaatgggagagacccctacacaagagggcatttcaccagcgtccactggaaagggaaaaacaggcaattttgcagccaggacaagagcgtgccttccctaggatgatggaacagtgagacaggttttccgtcccagcgtcttaactttagatgatggcccccgacgcccctccccaactcaccccagctcccccttgcaaataaataaataaataaaagaccaaaacaacatgccaccacccaccctgcggaatacattcaaatatgcctaagaaagaggagaagaaaagaagaaagacagcgggaaaaaaataataataatgctcttatattgctgcggtttcaccctgaaagaaaaacatttcgttgtttctacctgctgtgggatcaggctcctgtcctgctcgctcccttgctcgctcgctcgctctccttcttctctctctctctctctccccccgtctccccccgccccccccccccgactataacattcctgtctctccagctaggaaaagccacgttcaaagctctgtctgtgtatcgtggtccaaagtcgcacttacctaaggccccctctggacacaggatctcttaagaccggggaaaagtctgggagagagaatcgtggagagactggagccagcgcgagtctgcgagtccgagtccgggcgcgccagagcagaggggcgtcctcgctctgcctctcactcacttggtctgagccatcatggactctgcgtgctcctttgctgaagatttcacacccaaatttgcttcccaatatccaatctgcagctatacaacaaaagatttctctttaccaagacagtagtaatacgtcccagggcaaaccggatgtgaaataggcggtgacttcatgccagagagattttattttagaaaggaaggtggtaccagcctctggatctggagaccaatccgcccattttttatatgcagcacaatttaacttgcaccactctggccctaatccccttctctctagctgcaggctcaaatccttctacaatctgctgcaagcttctctttttggggggagcggcaatgggggagggaagggtagaaagggtgagagacatacggactgcacttagagtcttttcacacttgcaatttatgaacacccgattttaaggtgagcccattaaaaatacaactatttagtgcaactattctacctttgatcaaatattaaaccactgcctgcatatgaatgaacgcaagctctgaaactgggagatgcagggttacacgtgtggggagagcactcgtctcgcctctctccctcacacacacactcccacacatatgtctaagtccccgtgtcttgcagagtcacgaatggtgacggatggtaggaaagagttctggcaggtaggaaattggctactggatttagagagtctttcgcactttctcaggttgggagcgctttccaccccaccttcttctgtagcttagaggacagcaagaataccctccggaaccgggtttttacctttggaggcaactgtttgtctatgttatcatggagaaaacgcaggcgctgttacctctgaattgtgctgggttcctggacgaagaatatttaactaataaatcactccgatcatttctaggtttgagaatcatatctccatttccggaatcattcctttgcctcgagctccatcattctcggattaggaaaatgggagagggagaggaggaatttttagaagtcaggacgaaatccgcatctacttttccccccccttctccggcatcttctgttaccctccctggtagctctccacccacaaataattatacactaggaaaggggggtgtgtttcaacatcagtctaactaaatttccaaggaatcagggatgacttggtttcctcctcggattttgtgaatggctgtttgtagcagagaggggatgggtgctgtcttcctgggagcgcttactaagacctaaaacactgggagctgtcccttcagcacttccgtcctgttatggcaggaggtgctgaaaaggtgaggtgccccatacaatgtttctggtggataaggtctgagctttggtaagctcactggtcattttctcctagtgagttcctagcagagaagacgtttcagatggggcggagcctgagcaagtgaagaaaaaaatctgagtagccagtccataaccactttggggtttctgattctacaagtgcttcttgaccttgtgcagcaatgcaatcagcttaatgattaaaacttaaataaggtgattgcaataataaggaatataaaactgaagaccacattaggggttgggcttggttaccttctgagttttgtggtcaagtgtcaactgggaagtgattttagagataaacttttggaagagagatttgaagattatgttaagatagccctgtttctgggcagtagtt

SEQ ID NO: 317979 - DNA, 4001 bp, Homo sapiens
gcagattgagggcttactctcttttggcaaaattaaacatcttgctgtttttttaaatcaaattttcaacaagctaagtgtcttccagtatgtctcattggcagaagacaacagtaaggcaaaaatagttttgtgaatgcaattatttataaaaactcattgtcacaaaatcaactgccattcctgcatctttcaaggatgctggaaggtcatcttgataaagatggaaaataaatgctagaacaccctaagttgtgaggaggccctgatcgggaactctgaggaagaaagcaatacaataagaagaaataaaagatgaaatggggtaacatgactaaataaacttaaattattaaaacaattcttaaaatatagagtgtttattacctttatctacaccctctaagtttttacagcttatataaaattcagaaaatgcttttcttcctggttttgtcttacaaatgttttcaccaattgtttgcattggaatgcagatgcccaaagagaccactgccttttccccaagaccagttctgctttcccagctggaatggaaatctttattttacgtgattttttaatgacatttcatctttacttctaacttactatgtcaagttttaattgccagaaaaaaaccctacgaataagatgcttattcattttgtattaaacactcatcccaatgtagtgtttcctaaactgaatatatattttgaagagaaatgccagttacattacctgattttgattccatatgaaccactatataataaaacactgtgcactaactccatctacaggtcattgcaatagtaacacttcatataatttttcaaaagcagtaaagacatttaacttctctcattaaggatatctgataataatgcctgtctgtcagtgtttaccatacacaatagcaaaaaacaacaacagaaaacttctgaattaaaataaatcttcctaaattcatatgtctttccagactattccatctccctatcttaactcttaagagttcccttgccattacattttgaataaactcatgtttttattatatgtctgaccttcttatgggtcacaggaataggctacacaagaaatacaaaagcagataaagaaaaatctgtaatacttagtcatgtaaatagtttctattatattaatttcacatgcttgattggatcattagaacatattttgactatgattaagctttataaacaattagtaattgtttttttaatagggaaatttgattttaccaaagttcttaaatatttgtctcatatagtccacttttattagttatatagataacaatttcaaaacgtgatatgcatatgcatttagagagacgtgattttcaaataacagatattatttaaaactttccatttctataaacacaaaagttactctatgatctttacaataggctagaaattttcttgttgttaaatcaggttacacagtatgcaaccactaattggggtaactttttctatgaattaggaaaccgcacgttttgttcagttccaactgaacagtgagaagttcaatctaagacttaaatgttgaattaatacatgtcttaacaatggcttgttaattgtattctaactaacgtgcaaacataatgatttgtttcatactgctcctctttattcttagctggaaattattgcagttaagttttctgaattcccttagtcataaattcatttgaggacaattttcttcccccgataaaataaatgaaaagttacagaaattttcatgcagatttttaaaaaagtgtccccaccttcttccagtcagtgtgctcagaaggaggatccaggcccaaagacagtcagacagacctggacttttcctcatcgcgggctggagcagctgaaaagtagaataagtagagatcaatgtctctagcaagaaacatcaggttataaccaccagggctgactgaggcagtttagatgaatgctttgaagtcaggaaatgacctcactgggatatgacacctcattggaagcaatggaaacctggaccatccattctccactttcccttccatttctccattcagaaatatatcagtgtccttattctcctgtaaaagaatacaagctgaaacgctttcaggtgacagtattgctcaacataaaaactgtgagttgtttatctctaggttttatatttagaatatagtttggtttattctcttcttgttgtttatcatctaaatatttggacttttaagatttcagtttccacagtgaactgtgcattaaaatttttaagctggtgtctctaacaggaagaacatatttagggattggaggggataggttaacatgttgtgatggctgaattcctctttgaattctgcaggtaccttgatttcagaagcaactgtatttatttctatttaaaaacataggaaacacactgttgaatgccggagtcgtgcttttattctgttcctgtgactgctttgttaaacatgcttcctaatgtttctgtgaagctaaaggacacactttatagtcaagccatgtgctgatctctctcacatacaaaccacacacacacacacacacacacacaaatgcacacaaacatgcccacacatatctttcaagccctctcaaattctgccaggttgctgctagaaaatgtttcatctcaaacagatggaagctggagtgctttgctttgcatgaataaagggatctttttacctcttaggtaaagtgcaatcaatcaccatctgattgttgaatttagacttggtagtggaatgttggagaactggaagagtacagaaagcttagagaattaaaaatgtatatagtctatgtgtggagtcagttttcgaaattcaatgcactacctggataaggagcagctatggtaacattttaatgtgctgtaattaattccagtcataatataaggaatgttcaaagtatttaatctatatttctttgtagggtaagtgattaatagactgcaatcttttaaagcttctttttcattaaaccctctatagtttaatgtggtatgcctttaaatacatctacaaaatgctttctgcagtctcgggaaatcatttaaatcactaaaaaccattacaaacaggcttgtaagcaatgaaacataatatgtttagagcgaaatggtctagagataagaactctgagcctcgtcatagcttttccttaatttagtaatttagtgactggttttgaaacagattagttgactatgacaagaaatcttggataaatattatgttaaaatgctacatctaaattgcaaaattttaatttacccttttactaatcttcatcgtttgttacaagggaaaaacaacttttcttagccctattaatttttgttgatctttttaaaaagattgaatatctgaatgggtaaacaaaacacagcaaaaccatttgacaaggcaccatagatttttgccctcttctgacatttttaaaagagaaaaacaaacctatcatggcacttcagttgttaagaaagtttcttgcaaatacaaacataatagtttaaaagaaaggctaagctgcagtcttaccactttctaccttcaacctccccctcccccagacacacgctccaaacgttaccatcccatgccatccatatcaaagactaagttgagttttcgtgttcagaatgggagagacccctacacaagagggcatttcaccagcgtccactggaaagggaaaaacaggcaattttgcagccaggacaagagcgtgccttccctaggatgatggaacagtgagacaggttttccgtcccagcgtcttaactttagatgatggcccccgacgcccctccccaactcaccccagctcccccttgcaaataaataaataaataaaagaccaaaacaacatgccaccacccaccctgcggaatacattcaaatatgcctaagaaagaggagaagaaaagaa

SEQ ID NO: 317980 - DNA, 4001 bp, Homo sapiens
ttttagagagaaatgccacctgagaaccgtaaaagaataccatgatacactttgttctaaaagatgagttcaagttttcattgctacttactataaataccctcttatgaatgctacagccatctgtacctggaacagagtccccagaacacctactggtccatcctcaatgtaaaaggtggagagcatcagcctttccaaatgacctctttactgttttaataaaatatactgataatgatgttgccacaaaagacaattatgctttaggttttatagacatactcaataaacttttatatggaataagatctgtgtgttttttttcttcctccaataaatttgctggagcttcacaaagaaaggggaaaatctcttctctttggagggaagaattagtgcatagcatgtggatggaagagaggacataattttaaaaagtccctcagcttaaaatgttcaagcccttagtgaaatgtgaagattaagccaggaatccattctaatggtcatgccctcccagcatgaatacaaatattgtgtcatgaatctggagccaagcttggcggcaatgcccattatcattagttttgggactccactctcctccccgaaatgaaaacacccaactcacttagaacttactcaccatctccacatctgacacgggcccaaaactggtcacataaatgtctgttttgacttcagtgacagcacctgaaattagcccagagggatgaaacaattatcaccactgatgttaaggggattgatctcagccctctaccaccaaaccccttacttatcatagccagtatctgcaatgtgtcctattgcattccagtagtggggatccttgggtctctcaactctgaaaactcatgtcagtggccttatttagaatttattctagtcaattgggagaacattaaagaatgaaagaagctagattcgttctaacgaaaatgataataactaatgtatattgatggctttaatgggaaagtgctaataaaactgttttacatgaataatctcattttgcactcataccactctatgaggcaaacattgatcatatacccacactacaatttaggaaatgaggcttagagagttcagataacttgaacaaggctactaatggtggatgaggcagagactggatgggaacatacccatggtctctctcccgtaccctgccccttcccactacctagtttctgactcttctgggtcttcaaagggcagaaacggaggaaggaaactacaggtgtttgtgtagcaaagatgcagcttcttacctccaaatcccggccgcagccgattgtcatagccttcaagcaagttgtccaggatccgactgacgttttctgagtagaagttgccttcaacttcgagtttccctagggcattttctagcctgtgtgtagacagtcaatgatccttactcccaggctcagagaagaggttttgtctaatctactctattccaccctgttacaaatacatgcaacaccacttctggcctctttcatgatttgatataggagtcacccaatggatgtatacttttcctttcctctgagataaaaagaaaaatcaggaaaaaggatcttactcaccacagaataatgcacagccagggcagagacgacgccatcctgcagtgcactgaaatgcagaattcaccctcctagggtcgtcctccctgctagccagctcttctctgccaatcaactggagaaatctttcaaacccttcatatctctgttccttgtttgcctcaagtcagtaatccaatagataaagaggttgcctaaaaatttgcaggattcccctggctcccttctttcttgtttccttctcacgtggaacaaggtggtttgtggtcttagattatgtcctgcagacacccaggctcctctgactgactcagttgggaaaggagagtctgaagggacagtgcatggtcggagagcagtgacaataatcgaataaggcattaagggagattagaaggaagaaatccactgccagttttggcatggaattagcagggccctgtgaggaaatctggaaagcattggcatcttgctgattgagattatgttccaataggctcagcgtttattatttttatggttcacagaaggattcctacacagctcttactgtttaaaaagtctaacactattgtgaccctcttggattccctttctgattttcatcagcattactagctacagccacacccttatgtatttaaagattattgctcatgatttatttaccagcacttgtaacacaacagaacaactcacggccatcttgctgtggattaaatatttttttaaagatactttgctgacccttcttgtcaaaggtgtgtcatcttaagctaagacagaagtgggatctactgctatcattagagacctggtcagtttcttgaatgccacctataggagacaatgcctgagaaatagcaggttaaggctcctcatgcagaaatgttgcaaaaataaagcatctatagacgtggttaatgttgatgattctggcactattttctcaggcttgccacaggttgaaaggaaaatgtctgaatccaagaaacagcattctattctcagttctgctaggaggaagttgtagtcaaaaaaagttcatttaagccttaaacttttaatcttttctttaaataaaaatttattaaataaaaaatttattaaataaaaaaattttaaaaggcattgtgaatagatatgtgtgtgtatatctattatatagaatatatattatatagaatatatttatataatataatataatatatatattataaaaatatatataatataaaatattatattttataatatatattatacacacacacacatacacacagatatttaaattcaggaacataagattgaggatcaaaagtctcaattcaccatcctcctgccaaattcattccttactcacccagttcacagtctgtacctttggaattcaaattctacaaaggccatggtaactattgcagacatctagcacagccgtaacagtcacacttgagaacatgacataaatcatttgaggaacgtttgaatacattattgtcagggaaagacacatggcagccaattaaatgaagatacctacaatgttttctctaatttaagggaaacacccctaaaaccttttcgtgtttgttatgggatccaattttcacatctctactcattctttttattctcctttaaacctcctaccactggtgatcacaatgtattttcaactcacattaagtgtgctattacttaaatcccctaaatatctggtatatatgatgctatgaaataattctcttcagattaatcacaactttttttcaaccagagaaccctatatttatccctgttatcttttttagatctgtgtttctttttttttcctatcgaaatgtttaccactcatctctgatttgtgtcatcagagagaaagctttgtgagggttttcagaccgaatgtttttgttttttcttttttaaatttaatttaatttaaagttccaggatacatgtgcagaatgtgcaggtttgttacataggtaaacgtgtgccattgtgttgtgctgcacctatcaacccatcacctagtattaagccctgcatgcattaactacttaacttgatgctctccctttccccacatccccaacaggccacagcatgtgttgtttttcctcttcctgtgttcatgtgttctcattgttcacctcccacttatgagaacatgtggtgttttgttttgtttcctgttcttgtgttattttgctgaggataatggcttccagctccatccatgtccctgcaaagacatgatcccattcctttatatggctgcatagtactccatggtgtatatgtaccacattttctttatccagtctatcattggtggacatttgggttgattccatgtctttg

SEQ ID NO: 317981 - DNA, 4001 bp, Homo sapiens
gtctcattgaaagaccacggaagtggtgggtagcaataatccagcttaagttttgatcagtttctcaatatggtaaaatagagacacattcaggacaccacatgcacccacaactagggagagggaagagagcgcgcacaaagctcaaaagacagcttcggctgtggctggacttatttgcaaggcaaccccattacctccaaaatctggtctcagacgaatgtcatagcctttcaggagtctatccaccgtctctttaaccagcgacatattactagggtcattgacactaaagaaagaaatgacaataagcaggcatcaataaggaagcaggcatagcgttttcagcatcggatccctactacatttccctgctcacagaggtatgcagacagaacccttcaaagtgagaacggaaaagagaaacgctgggcacacttacctctgcgcacagacagcggcgattattaaggggaaggaccaaatcccaaagtagccccttttccgcactctccacatccctttagtttttgatggaattgagggtttcactgaagagaggagatccaacttagtctgcccagtgcagtaattctaatgtgaggcgcatgcgcacggcgtaccaaaacatcaaaggggaagcggcggctgccggggaccgagcagatttccttgtttaaaaaaaaaaaaaaaaattaaaagggaaaaaggaaaaacatgtatatgtataatacatacatatttgaataatatagaaaagtcaccccacagcagcatccagaataaaatttttgttgttatcctttcgttaagacaaaataactacagcgtctggtaagtttcggtagttgcaagaggcagttttgcaccgagcgggttgtgggtttttggtgtgtgtgtgtgtccttttaaatatgcaaaaccagattagaaaattagaggagagcaggtgtggcgtgccagcggaagataggtgccggtaagcccacttctggtctcagccggacacggggcaaggagtttgaactttatttccttggcaaatagcatgccctgcctggggcgagactgggatggggggggcgggggttgtgcagcgggtgggaggaggggggagggggcgttgggagtcgaagcgggagggagggaaaaaaccaatgggaggaatgctgagcaacccgttggatttggggcggggggttggggaggcgggtacagaataagaaaggcacggaaaaataaaaaaggaagaaagagaaagaaaagaataaaataatggctggtctcttctagtagtcaaagagcaagcttttcttcactactcacgagcgatttctttctcctctcctcaccctttgccccctattcccagagaagaaaacctcggggtcctgttttctcgccgtgtgacgttcctgacccgctagtccgggttatttatagcaggaggggaggggggcgaggggagcagaaaggcaatgctgtctctccaggtttcggtctgattctgcagtgggaattattagtgggcagggtggggtttgcatgagggggagatgggacgtggaggcgtgagggatgcgggtgacgggcgccctagcgcaggtgcgggggactggagggcgtgggcgaccgcacagagcaggaagggcaggtggccgggtgggacgcgccccggccggtcccccagcgccccctccgctgcgcgcacccgcgcgcacacacgtgcaggcgcactccccacccgccgccatccctccttacctcgcaggcccgcgctcgccgcccactcccgcggcgtgcggagctggcgcccccggcccctcgtccgggacaggggacggggactcccggctgttcaggggctgtacctctggatacaagaagccggagcggtccctagaaggcaggcaaaatgaggaagagcccctcacctccggaggcactgtgttctcccgcggtctccgcgccacctcgtcctcttcttcccttccccgcgcccaggggactcgcacacccagaggctgcctcttcccttcctcctgaagctcaggccgcctcgccgtggccgccgggacccggaggaggcagcaagcttggggtggggaaattgggggagggagatactcaattcacaaaagaagtcttccctccgctccagggaaagagaggagccacgggcggcgtgaggtgctacgagtctggggacacaaggccgtccgaaggaaccggagtccacaccagcggctctccgggtactcctgagtttatcttggaactggggaagaggcgggaagagtagacgttcccgctacccctcccccaaccccaccctgggtgaagaactggaaaggccagagctcaaatctctattctggaccccaatgcttagcctctcactgctgctgccaatcatggtcactattaagtgagttcctacttcgtgccagagcgctgcattcattaattctgacaacagttctagcgtttagctatcacttcagtgtccccattttatagattcagaaattgtctcactgaagtcaagaagctcgcccaaggtcactcagatggcatgaggtgaaaccaggattggacttcagagccagcgttcctaaccactgaactagacagcctacactccgaagtctcctgagtcagcgaccttgcccgctgccagcgctttgctgtggcgggtcaagctcctggcgcccgaggagcccgcggcggctgcgggtggagttgagcgcggaccgcacgagctagacccggccggtgtctgcggagaggaggggtcgccggcccgcagagttggcggcaggcggcggaagtagctccacaggcttgcgaccccggcagccctgggggctcctcagggtcctgttccgtgctgcactcttgacccacttaccttctgataacctttcccctcccccaccttggtcagagggtcatctgggggtagtttgtggggatgactccgggggaagtgtggaggcgggagggctttaaaaggggggaatccgacagctcctctgggatggatgataaacaggaaaagaaagccgagttccttcaccgaccaagggagtttctaggttaggaacaggtaaagcccagcaccatgaacatactgctgatctaccgcgcggcgctctatagactcccaggctcataggagcccatccaaagacgcgcgcttactcacacacacgcacacacacatacacacgagggtgggggaggaaggtctgtaagtctcccatctgcagttacttgggtttagcgttacctcagaatgtagaactatagccaaggaaaactgctgattttcctttctctttactcctatacacagtgagaatcttttgcaccagctgagtagaatgatgggtagggggaggatcggggttgggggggtggttagggcattatcagcatgatgtccagaagattcctaaagcagtttagtctcaagtaacaaaatgatgaagtcctaaaatgctccccttcccctcgaacctctaacacatctcaaaatagggttttccttctgaccctcagttacccacgtttttctttctgcaccatcagccccttctacctaggctcgcttcagtgtaagttgagagaacaaaattcagtagacagaacaaaccacaaatactgtcacccatctataatgataataataataataataatggcccagggaatgatgaaacaagtatatattaaaggtctactatatacagaaagttaagaaagagaggggcaaagagttaaaatagcttgcatgtcagcaagtaaaattgtgtagtgtaaactgagagcataaaagaaccggaggtaaatctttgggttcaaaacccaggtcaaatacttagtaactttgtaactcaggcaagtcatttaacctctaagccttagtttcctcttctggaaaactgagaaggaaaagaataccctctccactggattgctctagaatgaggtacata

SEQ ID NO: 317982 - DNA, 4001 bp, Homo sapiens
agtaaggtacaaaaagtgctggaagagttaagcagaccctctctctgtttagaaactccaaagtgaggctttcactctttgttttgcctgggtctctttatcataaatctatctgtcttattacccatcttacagaagagggggccagagaagttgcctagtttcaataatttttttaaaaactagtttaacctccatccttttcagctgcttttgttacaactaccatgtaagattgtcgacccacaaaaaaatgttagggcactgtcttgatattttctatagctagtttttgtttgtgtctttctttatattggtaggatatgagaggtatatttatagaactttatttcaaaatgaaagtatagaagaatgcaagtaatgtaaatagtggacctctaacatggctttggtcctagttagaaagcttggagagcggggaaggtgcttaggtaggtagacgaatagtcagctaggctgcatggatggttgctcctctaatactcttagctcaggaaagttcaagtaaatttaaatgccgggcacttcagggcatacacattctcagggttttcaggagtccagtctccagccttacctttttttttctattcagtgcagcaaggttttaaaacattaatgtgtacttcacgattatggcatcacattcacctggttcagcatattttccaacactgcagcaaggccaactcttttccagacgtatattcccctatgcaatcatttaactacgttctccaccctatgcccaatagtccccttcccatatcaaggagggagtagaggtaaacagatcaggatctgtatatttcattagtgccccgtggcttcattggccttctctctgactctgtggatgccctgagtatatttagagacgttctatcaggttagacaagcctctatccctttggccctcaccaggactgctgtccctggtgctgaaccatgtttgcacacgggtagttggctgttgggtcaatgggactggatgcaaaacctggctgactgaccttaagaatgccaggtgcagaagcatgcgatgccttagtacacaggaacagggccgcccgccgcccctccccccagctccctcacacatatctctccggtgtgcgccaggacccatttgtaaatttctccatcagacccccacccaaaatgcttgcaacacggcctcaaatgccggcgtgtatcagcacagcccactccgatatcagattgcaataatgtcaaaatgctactccctaaatatttagtctttatgaggttaccttttccactctaaaaccaaacaaaaaataaaataaaatccaataaatgaatacattaacgaaagtgaccttccactttcctccctccagtccccgccccatatattcgctctctcctaaattgtaaagccgcacatcctaggagagtgttttaaatctgggtggtctcccgagttacccctccccacaccttccccccacctcttcagaacaaaacgacgccaaaaagggcacatcttacccagggtagagcgacagcaggagcagaatccacaccgtcattttctgtgaaaatacaggagtcgagtagactgagcttcctgtgctccatatatttggcgaactcatcgcttttttttttttccttctctcgcctcttgcctcttggttgcagaagaatccctcccctttgtattattcttatgcttatgatctgatggtggctccccccacctgcctctagtaggtccttcactggggagatggattgctaccagattagggaattaatattcagggggcagagataagatcagcaaaaacgcttgcagataccatcaaagcgtcactctggcagcggcttccaagtctgggggagtaatatcatcgaggcagggggagggtacaaggagagactcatacggagacaaataagggagagggaaagacacgcacactcgtgtatactcatgcccctcacacttacgcgttctcccctgggtccatctctttggggttatttatttgtttgttttgattttttttcttttacagggggcagagccctgtgggtgtgtgtatttaaaataaataggaaaaaaatcactagagactctgcgtgattaactatcacgcagattaactatgaggtcaaagtggaagtgatgcacgctgctgcagcacgaattaacacatgcgtggtgtctttccaaagctttttaaccctttactgcacacaccagcatgcaaggactggcattcatggggacaagagatgctttagcaagcccagaagctacatcatcaatgacagaaggtttgtggtcgtcagatctgccaagaatccttattttaaactcgtacagtcttagaaatcatggttgcattgttagagctgggggagcagacagtgggggaggtgtgagtgtctcagtaagtcatcctgtaggcagacagatttggtgaattcaatttgaatgagagaagaaaacattgatagaattaaaggacatggagaaattctatgctactcaagattcattcctcccttgtcagttctccaaccccagtgaaaatgcacagacacaaaactgcttgaagtttgacaaatgtaattgcgtggggatagctgcttgaataaagattacacatcacaaaataggagggctgttttttgaaggaagggtgggcagaggggtataatcaggaggtcatttaacaatgcaaagggatttctgtttgtcatgtggggggttgattttttgttcttggtaataatcccgaaagtttttagtttggatgagtggtattagtatgcttctttcttgcctagaatgttactatagatactaatatgtagaagataccccctttatgccaaaccagttcatccaccacagaggaaatccctttcattaatcatgaaaaataaagtgggggagtgtttcatggttctttaaagtcaagataccacattgaaagtatgcaggaagcagtagtagtgatgaggaacaatcttagctctttgtggaaagtgacaaggagttgtttcaaaataagtgccttttttgcaagaaaaaagtcttccaggaatggaacttgggtaaggagtctaggagacataggaatagaacatgagaaaatcaggtccacactccatcactaacactaaagtatatccaaggaaagcagaaagaattaccagtggctgctgcccatcacatgggctgaggagatgcatcctgacaatgaagcaaaaaagtcctgacagacccacctggaatcctgcatggcttcataattctgccttaggcagagttattcttaaggcatttagacaaaaatccaatgaaaaccacattcaaatgcagttttgacttctttccattgtgactaaaatggaggcagagcaaacataatcccctttttatataatgctcttgttctttgctgcaccgtgaaggtattttccccttctttgatttttacttatttgtttatttatttaatttagtgacaaggtcttgctctgtgacccagcctggagtacagtgggacaatcatagctcactgcagcctcgaactcgtgggctgaagcaatcctcctacttcaacctcctaagtagctgggactataggactacatcactatgactgtctaatgtcatgccccttcttatgttcacaatttttattccaaagagcctagtttgtttatagctctatatattttcttagtgaaattattcaatcacacttttgtaggctaagatgtgtgtgtgtgtgtgtgtgtgtgtgtgtgtatgtgtgtatttacttaagtgcctacaaaacccaagcaagtgagataaatggaagacattggcagtttatgaatcagtaaagtggtggaaaccatgcacactgaagtgccaatactccatccaaatggagctgccactgttcagttccagtcagaattgccagaagaaatggaaataagaattg

SEQ ID NO: 317983 - DNA, 4001 bp, Homo sapiens
atcaagtgatttggggaaccatccagtcttcagttccaagactcctcttgaatagtgctttcccagtggccaaacttctgttaggaagatgtaacatttggccctgggcctctcagcctcctctaaggagtctcatgatctgagaagcttcacccaggctagagccagaaatgtaatcccatcctaccgtgtttgcttggttaagttgctaaacacgtctcattttataagggaagaaaagagaagaaaaaggcttctaaatgcccatgaattgttagaagccatgtctggtgcttaatttcatttaattctcatggctgctggcccagaaggtgttaatttttagagtcaaatcttagatttgcaaggggatttggctgaggtcacacagttaagtggcatgatttaaatctgttttccaagtcccttttctttgccctgcatttaggaggagggccttcagcacccccaagctgaactggattccacttgaatcttgtcctttttataccaaacccatctgggggatggagtgttgcatccgcagcacatcccaagtgacaagtgcagctgatgccatcactccctgtggtagacgagccaatcgttaagtggctatttatgtgtcggccagcctcaatggaggctcaggccaccagttctggtacaggtgctgggggatggaatttagtggagaggtactgagccaccagagagcagtgtcctaagggttgtccccaaagctgcaacacagatgttgactggaaccacctagccttctgcatctgcagggacatggtgctcaggaggccctaggaggctcctgagtaggggcagcctatgcattatcctgccccgagggcatctctggccaagctcctacctccacttgtagaggagaccttgagctctggatcctgatacacccgagtcatttaacctctcagagtctcagttttcccatctgacaaatgggaatagaaagcattcaataaacattagttttcattctcctctgccttccgtgtcttccatgggaattcagtgattccactatgactaatagaacccaaatctcaagctctttctatttctatatacaccccaggtgccactcagagtgtgagctaactggcaccacctcaggaagtacagggtcaggcacagggcattaaggtcacatagggagctgatggcacctttttctaaaccagaaatccagcctaatgtctcccagtctcccccgcctcttcctggcttggcctactgggcttctatactccgtgctcttggcctctatgtctcttttgaaaacttcccaggctggaagcagaaataattccaatatgtgcaagtttctactaccgtttctactctattcccagaatttctaccatgtaaatacagtgacccccaaccccaacttgtcacctccagcttccttcctatgcaggcacagttttcctatccttatcacttcagcatagacagaatcatttgttggaaagcaggagtagagcccgaattaggttaaggtgaggaaaggcattattgccatgggtcccgcttaagaaaatcccagaagataaagtggtgcggcgcgtgccctgtgtctgctggtcttggccagctgctgcacaggggtgaatgactgtggctgtagtgaggacagcaggggctctaatcttggctctgctgctcgtcctgcagtggcgctccctgatgctcattaggtgttcagcagagtccaggcctgccccctccctcggtcccagcagggcttgtatttggatctccctccctcccctctctccagacacctggaggggccagcagtttccttaccaggtagttgttgaggctctgttagggcaagtccttcaggcctacaggcaggacttccaggcaaggcacggtcttctgggtccccagggttctcctcatcctcagccctgtcccctcgtatgtggacacgcagccaccctcagatggagtggctctctggggaagaatggagctgctaaacctgctgtgcagaaacagaggtgggcggagcctctcaaagccccatccttggtggggacactgacttgtcctgagtgtctggagatcgtctggtcctgagtttctggagatcgtcagctcctgctatagctactgcctccaggggtttgattctgagatcatgtctcagtcatgctcccagacctctgccagaaaagacccctgagatcaaggacccatgagagtcagataaagtgggtgacccccacccactatgccgggctctgaatttggtggacagccctccaccctggtgcaatggaatggctatagtggccacttcacctccttaggcctcagcttcccatctataaaatgagaagctgactgtgtgtaaaactccgatttcttgttgtgtattttaagagcatctttgggatcaacagaaggcctattctatgttaaaagagactttcatatcccaggacctagtgctttccagcctgggaagtttcaaaaagactcatagaggccaagagcacagaggatagaggcccaggaggaggaggcggggagacacagagacactgggctggatttctccaaccctccaccttcccccatcctgctctcacacagaggattctttaacttcccacagagtcctttcaggagcatcccagagagggaggccttcttcctccctggccaaccaaacctcctaacagaagtgcttcgacagtgctcactgagctctgggtcatcccctcatcatagccagtggccccaaactcactcttggctccagccatgcaggtaaggggagggattccttggaggcttggccttgcaccctgagggagctgggagccaggagggactcagatggaggggcagagagagagctgaggctgtggtacgaggcccagaggcatctccttccctcctgacatcatggcgaagctcctgcctagacccagtctaggagccgggaagggagagagagaaaggaaggggagcaaatggaggggcaggaaggggagggccacagtgtacaatgaaccatagatgcctttggccccaagccaacttccttagtgagcttctggagcctggccagcctggaaaacattgctccgctggtgggtaaggagtgggcacctaaagagacagcgctttcatttctcctgagaggactcactttcacttgggaaccttgctggtggctagagcaggaatggctgaggagccggtttcaggttctcaatgaatagacagtgatctggggcttttctcaaaaagcctaagatattctcacacagaacaaaggctccagagtaataaagacaattcagagctgggaggtgggggtgggagggtttcctctgacccaggaacagtgagacttagatgaaggaacatgggctggctagctgcatggtcctggacaagttgcttaacctctttgggtctccatttcttatctgaccaatggggctgatgcttccttacaggattgctgtaaggagtcagcaatgacagatgtggtaacacatctgaaagcacctggcaccttgacctggcacattgtagacgctcaacaaattgttctttttctcctgatggtgtagtgtcttgtcaagtttgtgcttatctatccaaacctccatccagatatctatctattatctatcttcatcaccattatctgtcaatctgtctatcctgtgtttaatcttcccaatcatattgttagtattttcattgcaaggggcttgaattgtacttctatgtagacatccagtaaatatgttaagagactgattacccctggtggccagggaaagccagatcttaagtgaaagtaggtatgataaggcgtcttatctcccactttcaaacaatgcttcattctagtgttggcttcttcttagattttcttcagatcaagtgaagaaatgcctgggaggggaatttccaggaaaactaggttcttc

SEQ ID NO: 317984 - DNA, 4001 bp, Homo sapiens
ggagctgtgtccagtatggagcctccacagctagggatgctacaaggaactctggactcaagacagaaaaaaagaagggaccgttgtattcctcattgattaactgatagtatcacagaatgttagaactggaccaataatcatggtttacagaccaagaaagtaaggctcagaaaaggagatgaaaggtgatcaaggacacacacagtaagttagtggtagagctgaggtcagaaccctggaactcctgactctgatgctggtactgaataggaacagaggaaagagatttcatgaacggaaaatccatacagatacagaatttcagggagagaggtctaagctagctgtcagggtttgaaccaggggtttaggaaagagatggaaaccttagtttctaaacagtaagctctaccagaaagatcaatgagaccctctgggatgctttgcagcaattaacagagttacaggcggagctcaaattggtcagctctgtagcaaagagccctctgtgctccagatgccagactgcctagacagcagcctgatactgggaagaataaggaaaaccatcaatctcagaaaagccagcctctttcgtcgaggccagccaacagtcagtcaagtctgaccctgatacacaaattatccacttctcatgggaccagagaaatcccgtaagaaagcctgaaatgttccactatatgaaacagtctaagcaatacactcactagcacctcctgggagggtgggagtgatgtgacagagcttctgctatgagggagctgctagtctaaatgcgtgcacgcacacatacacacaaacatacgtgggtaagttcaaaggaggcagaaaccattccgatcccagttttggctgcaataaacactacaactaaccagactagacaagttcagaagagatagggaaggcttctggtgttccatcctcaggacactgggcaccaatagcctctgggacattttgggggtccccccaccagagccccacctctggactcccataaggtcaaaggcagcaggtccctcaaggaccaggagcttacccccttctccacccccaggggcttgaagctttaaagggagcatgatctttacattctgcaaggaatccacaggatctgagaaaggaaaaggctagagttggggcgggggtgttgaataaatggggagaggaggaaggcccgggtgtctcgttgggcagatgagaaatcaggaaaagggctgacctgagcaaagaacactgggatcagcaggtaggggttgtgggggggggggggtgggaggagggaagcagagaggacctggacaccaaatagaagaaccagaatcttcattcctattggcacaaggcaggagtcatcctgggatacagggatgcagataggatccttcaaaagagatccgctggaagacgtcaaggaataccagacggggacagaaaggaaggtggtaacatgtggtgagaaatagcgtcctgagtgctagttcggactcagtctctgactggcgtgggaccctggacaagtcccgacaggacttaattttcccatccggaaaatgggaagagctgaagagtctcggagctgactctgaggaggcagacagcagaaggtggaggaaggaaccacaggctaaaagtgaattcgggaagggggtgttcccggcctgtagcaacggggggactcacctgtcccgccgccggcgccaccgccgcccccgatcccccaggggtgccgtcgggctgccgctcgcggtacagcgcccaaagccccacgttgggcaggaggaccagggccgccagcaccagcgccaccgcctgcaggagccgcttctccttccgcctcatcggggccggtcagccccgccgcgccccgccggccccgccgcgccgcccccagctccgcgcgtccgcccgtccgcccggcggcggcagcagctcagccagcagaagcggctgcggcgccggccccgctccaactccgcggcacttccgccgctcgccggccggggagctgggcgccgccaccacgccgccgccacgagggggtcgtcgccgccgccaccgcccccgggccccgccgagccgcccgccccgcgccgcctgcccccgcgtcgaccgccgagtctctgcgctgcaggctcggccctctcacggagcgtctcggcccgcccgggcgctgcaggatgccgggccggagcgcttcccccctctcgagccgcgatggtccgtcccactcctcggcggctcccccgccctctggagctttgcgaaagtcccggagttggcgagttgggcgctaactggtgcgggctgggcaccgctgggtggggtgcatgtccgctcgcccgggtaccctgccgccccgcccggcaacctccgcccgggactgcagccgaacctttgctgcctccctggggatatgcaaatagtgctggggccccgccgggcgttctgagcctggagcccccggggctgtcacttccagcccacctaggctcggcccccaggacctgcggacctactttgaccccggcgactcggtgttcccggccatgaaacggggccacagccgtgctgcacgctcactgttccgcgggcgggccctggttttcttcctctaggggggccctggcgttaggtgtgaacgccctctgcaaactgtagggagctgtgcccggccgccgcccgtctgtagatcctgcaaaccggcgggtgggtaagtgacggtagcctctctgcagcacctttcctcacgcaagtccaacccccttggagttagaatgccctgcattctcacgcgtgcttttggatcctaagcgcactgagcccttcccggaaagctctcagcaaaccgttggcgagcgccactatgtgccaaacactgtgccaggctctgggatgaaatgaaaacagacctgagccctgacgtctgggagctgaaacatgaaacacgtaatttcactagaccaggcaatgtgtctgtaactgtggcgagggctttgacagaggagtcgggcttctgggcgatgcggagggccgtggagccggactccgacggtgatgccagccagcggctcctcctcggggcgctcgacgctggtcacttagctgcctcctccctgatgcggtggaacggagcacccccttggctaccttactctctgccacccccacattcgtcctcttgattctctgcttctctagctcagccgctgaccttcgtgcctagctgccactagtccttgaccagcgttctggcaactcttgcctccaagttcttccagctccaggctgagcgatggggattcagttttctgacatcacagctcagttcttgatttctgcagcaaaaccttcaaggcttccatcacctcggctctagagtccatcatgctcctctcctatgacctgctagggctgatcaaacgttctgtctcctgccgtgccctgccctgccctgccctgagcttcgcttagcctgttgcaggctttgtgttttccttcttgtgctgttgaccacgcagctccttctacccataaaacccccttctctaggtcggtggaaatcttgttcatccttccgtgtctagttaaactgccacctcctccacgaagccttctaaaactcctcctcagggaactgttttctttctttagatttccatcacaataatgcttaccttttattgagtgcttactctatgtcaggcagcccttgagatgcattacctctttaaatgctcacagttaccctgtgaggtacatgcttttcttatacccattggcgaatgagagtcagatttaaaaatgcatgtaatcccagcactttgggaggccaaggcgggcagatcacgaggtcaagagatcgagaccatcctggccaacatggcgaaaccctgtctctactaaaaatacaaaaattagctgggcgtggtggcgggcacctgtaatcccagctacttgggaggctgagtcag

SEQ ID NO: 317985 - DNA, 4001 bp, Homo sapiens
gtttatacttaaaacatgaaatgagatctttaaagtaaaccaatgtattttcaaaatccttagtatcacaggttttctcatagctttcagaaaataacttccatgcaagatgattttacattgttttctgttgatgctttaaaatggcaaggagacaagaaggggaagtgttcaactgggctgcatgttccattgtgattttatcaacaaaacattattactgtatattttcagtctagacatagacatagatccaacagtgcctgtgaaatgattattatcatctatggaatgttattatcatcaataatgtttagttaagagtttcagcttttaaaaactgttacagggattatctcatttaatcctatagctgctatatgtagtgggtactattcatatcaccattttatagataagaagagaggcttaaagaagttaagtaacttccttacaaccaaaatgtgactgaatgagaattcaggtaaaaatttccccaaaatattatttatccaaatatctgtaacatgctactaagtgcatcagtcagaaaatttgtatagcttgattagctctgaggttctcgaaggttggaaatcatatattatttacctttgtattaccaacaccagcattagacacagaatgactaatctattagacatttgttaatgaatgaagtaatctccttatgggataataatagtaacaatgagaagaaaaatagaaattcacaaagtggtgctctgctttcagtgagttttcatgaaaagtttaatggtaatgaacgttcataaatttgtccaaggttagaatatattaatatgcaaatatttaatttgacatttcataaaagaaaattaaataagatgtgcagctaatttatacaattttttgataaaaatacagggacaagcaccccagatgcagaaacattttaatctccttggaatttttgggagtaatattgaggttgagaactgtatggtccgccacataagatttacaatctgcagggtccctcctttataaggccagccgtgcttgtgttcaaggacaaaagtttagccaaatgactttaatcattaggacctcatttcctgtctgaaacagatgagcaccaattatctgcaagatattttatggtatacatggttaatgatttaagaagttatttgccagaatatttgaaataaatttacaaaatacactttaagtattgattgaaattaatcaactttttgaaagatactaggcctgcaacagaagtcacggtgagggttgaggaaggctaactattgtcacttctgtagctgaggataaggcaataaattactctcttaatttttaagaagaaaaggcatttttaccatctatgttattctatgtagagtagaaattctggtacatccaaaatattaaaattgtttgtctaagagatatttaccaagataaagacaagaagactttttacagaaaaagaaatgcatcattttcttcgaaataacattagaggaaaaaacctgtgagacatgaacaaagacctactataatgaaaaacatattttaaacaataaccattcaaatatagtttaacacttaaataatgttcactttgaccagtttgaaagaagactctgttttcattttggaaagcagttccaacaggttacctaacaatttgacatttttcttaaaatcgcaaattgttgagaaacttcaggaattttcaagtaagagaatgccctgctgtttggaaacaaggtaacagcaaagcataatcatattgtaaagaaacattaacatcactctcagtttgtaaattgggtttcccccttacagctacgtaaggcatttttttctaaaaactgtagtaagataaaaatcattgattaattaaagacaaacttgtttcttatagtgtttaatcatccaaataccttaaatcaggttcttacttacctcaagattggtgtgtcaagctctctcttttgttcttttggttatgttttaaacctgcattgggttagaacttgttcctctttttcactttggtgggttacttccttctttccctccttcgttcacgctatttaatacttgcaaagtttcctggctctagaggaagtcagtatcagatgcagcagaattaagataaatggcgtgaggttttgaataaggaagtctggcccttcatctttgtcaagtaatagttttttaactgtgtcagaaaataatacgtaaagcctacatggttttttatttgggccatatttgcagttcccactttaatatcaataaaagtcacttcacttgtactttgattttttaaaaaaagaaatattttaattgtagtaacacataggtcttgggcttttattattattattattatttacttgtgttgctagaccagtcctctcttcaaatattaatattatgtaccaatgctcccaagttatagccatacaggtcaaatcagtgtcccaatttgggtttggaaaatgttaacgttcttttaaatttataaataggaatttcctaaggtatgttttgaggcccattacccctgagatatgctagcagctcttccatcaagtaaatgtggggaatactgcttccctggagattcatgggtacatcagcatgctaaaggctctcagcagtcttacagccagcaaacaaaataaaaccaaataagaaaaagaaattgtttaactttgcttaataatagtagtcagtatgttcctagcactaagtactccaaaccttttgtgtaatactcagcaaatcttggcaacaaccctgtgagggagaaaaactgttattagtcctattttacagaagaggaaacagaagcacacagaatgatcacttgcccgacagagcctgcagtttgcccccagcacctgtgtgctaaaccactgcactggctgccttgctagattgagtaacatgtttcccacatagatacgcttaccaagagcatctcttggagtccaactcatgggaacacacacagtgggagatgctgaattagacaaattacagatgaattcgacagatgagatgacaaagtaatggaaaatttgtcttttaagttgtcttggaactttttgaaccacagaggattaactttgcataaggtggttttaaaaaagaggatttagttactgaaataactactggacattggaaggacaggacgtattattaacacttgctgagcactgacattatgccaggcattgtgctaagagatgaggatgcaagagtgaataagctccctgcagcacttaaagccaagtagagaggctgctgcgcccacagaacatttcagatcaaagtgataatgcctaagaaagacaggattatggacagggacagtggaggtaaaggaaagaggcatccagctcagagggtggtcagggaaggcaagacctgagctaagcctcatagaataaggtgttaaggcagaataggggtgtcctggacaaaaatcttacagtgaaggaggttatgaagttgtgaagctatgaacttgatgtgctccacattctcaccactatatttaacttcagtattagccacccctccaaataatatacacactcacctgcctaggcatacatctgtaagaaaggcaatttatacaatgtttgtataaaattatgattttctctagaaggcaggacaactggtgctcattcagcttttgccctttgaagttaaaaaagttgcttaaccccttattactttagtttttctaacggaaaataaaatggagggaaaatgactggcactttcctcaaatagaatttttttgatgtaatggatataattattcttcaagtttataaaagaaatgctgtatatattcaaaatagaattattggatcattgtcatttgtagggattatgttttatgtcttgaattctatattttcctacttcccaatctttggcctcgcaaaatacatatttattgtctcctttcagtt

SEQ ID NO: 317986 - DNA, 4001 bp, Homo sapiens
gatagaaaaagccttcatagtaattccacttgacaaggcgagtcttactctgcagatcagacacatcctgggctgatctggaaatctccccaggtattcctggaacccgaatcaaggtagcccaaaagtgctcatcaggagagtatgtgtctttagaccaggcaaaaaagtcttgaacgatggagttgttgaaaatatatttaacaaatgcttgacttaaaacaaaataagcactgccaacaaatatctgaatgttatgggggggtgcttccttggagatgtttgtccttattggtagcttcacatattcataaggcacccgtctaagttcatgatggtaagtgaatctttccaatttactgtttgggggtttcaccgtctccaacatatttgctccattgagttttttcaactctgacaccaattcaaaatttgacttcaggggaaaatcttgcccacacaagttgataacatatttccactggattgaagacttcagaaggtccgacaagcaatttaaatcagcctggagtctggaaatgtgggcatattccacagcctctaatttggaagcaatgaaaatattggagaagcacttagctaaattgttcatggcaactttgaaggtatcaggtgccttacgatcataatggatgcagtaaatattgtgctggttgtatatagcatggataagcctttcaaccataattgcatctttgtggacaaccaaagaataggctattgggaagcttttctcctcctttgagacaagcttttgagcataacctcttagagtctgataaatgtcacaatcactggtcattgccacaacatcatcatcctccaagtcaatgatgtcccttcttcttatttccagactctttccaatttccaaaggctcctgttcatagatacccgaacagttaacttcatacctgacttcatccttaacatgagtgtatctgtttcttacaaaaggcgaggtacttagggagtactcaaccaagtaaatgtctttttgcggaaagagtcgtctcacatttagaagctttaacaaagagagcagccatagggttaaaaacaggatgaaaactttctgctgtagggtatgtttaaaataacatttgaatatcttcattctgtaagaggagaaagaaataatccagttggaatattaacagaaaatcaggtcagtttatccaaaatctactgggcgcctaccacatactaggcaaatgctgccccaaagatgaatgaaacaaggtttttacccttgaaagaatccagaaataaggaaatggaattatgaagaatggtggtattttggggtattctgtgttaactatacctaattttgagagatgttggtttccaaacagaagggaaggtaatgtaaactcctaaaatataaatatagtgtgtcttatattgtctgcatttctgcttagcatatttgaggagggattgctctggtttgggcagaggtctagagaactggatgtcatcaacagggcctcagagatgcaaaggactcacctaaggccaaagggaacattcgtcttgattctacctccagatccctattagatccaggtctgaagtcaaacaaggaaagcccagggaaccccacgttcagaaagaagggtggtgggcagacacccaaaggagctatgctaagtattagagactgtaaaatgtatagataacaaaattgggtaagcctgcatattttccttattttttattttgttaacacccattttcacacagggattagcaatttagcccttaaaataaaaagggcctgatttttcactgagagtagtaggtggggtgtaaaaactacgttggggggcaatttggcaatacttgtcagttttaaatgtacccaccctgaagatcccgtgtgtgtgcaaagtcaagcacaaagaggttccctacagtgttttgtattcaggcaagacagaaaatctctcaaacatccttgaacagtgcattgattaaattacatccatgctataatatgtgaaaaggcctgagaccactctgcatgtacatgccaatggggaacaatctctaagatatactgtgaaataaaaataagcaaaatgcagaagcatgtctagtatgcttacatgtctatacatacaaagaacatacattagcaaactttttctctctttttttttttttgagacaaggtcttgctgtgttacccaggccagagtgcagtggtacaatcatggctcaatgcagccttgaactcctgggctcaagcgatcctcctgcctcagactcctgagtagctagaaccacaggtgtgtgccaccatgcccggctaattttttctttagtagggacggagtctcactgtgctgcccaggctggtcgtgaacacctggtctcaagtgatcctcctacttcagcctcccaaagtgctgggattacaggcatgagccaccaccctcagcctaaactttttcttaaaggaccagatagtaaatatttttggctctgtgggccatattgtctcagtcacaactactcaattccgcccgttatggtaggaaagcagccagagattatatttcaatgagtgggtgtggctgagttccaataatactttatttacaaaaacaggcagctggctggattcagcccacagctgtagtgtttccaaaaggatattgtatacacacaacactggtaacgggaattgctttgcagggtagagtgggaaaggactgaggaatggggcctaggtaggaggaggatttacttatcactgaatatcttttagtatcatttgcatttaaaaatgattatattactttttcagatgaaaacaggctgactaggaggagggtacagatgtacttatagggagcagcaagaagggcggcccaggaagtactagcccaaggctccaggacaggaaagctggcagagctcctagggctgcttcaggaggctcagatactgagacctggtggggtctgagcacccctgtgcaatttcctaacatatctcaataaaccttaaatggaagacaatcattgtatccaatttcattcaagagaattgccaagaacttggaacccagtttaattttgtagatttcatctatacagacccattgacaaaactctcccctgggaatgagatcccaccttcctcattcacctccgcttaaatccctctgtttaaagaaccacaccttcaccaccatcaactgtactgcagaatcccacctctccagccacatctcgtctctcctctgtggactgccccaggctcctatcctctgctcacttctcttctcctgcatacttgcccccatctccagattccaccttccacactgatgcctttccatattccaacacctttccctccagccttcacctcttgcccaagcctcagaggtggacctgcagttgctggatggacattgcttcctgatatcccacaggcactcagcctccacgagtccaaaactgaactcgacatcatcacctcgcctgcgtcttctgtctcaacttatggcaagaccatccactcatggcccatgtttgaaactagagttacccaacttgtccatttcactcatacccatgtcaacctatcacctcataaatgtgcctcaaatccatcctttcttctccatccccgctgccaagtccagacagcatctttgctgcatcagcacccaggttaagagactcctggtcaggctcatagcccagggtctgttgactggtctcagctttttgctcctccaaagcacactgaacagggtcccatcactcaggctcaaggccagggttcttgccagttgttctaaagctgtggaaaactgtccccactcccttgcctgacacacaaggcaactcactgcaactccagaagcctgggcacatgtgtagaattgggtgttgtggtacagtagaagactaatcaatcccaaataggggtgtgtgtgtgtgtgtgtgtgtgtgtgt

SEQ ID NO: 317987 - DNA, 4001 bp, Homo sapiens
tcattttttgagaaatttggattaagatgttcgctaggtgcttgctgaaacttctaaggcatgtggaaaagctaaccaattattcatgacgatactcagatctgctggtatgcaacttatggtattaggtttactcttcctctcaatttatcctcacggccttttccacttccaggtgtttacaattgtaattattcgctgcatgttaatttgcgaatttacaaatttgggtgagaaagtcacaattggcatagaagttccagaaagcagaaaaccattaggtctctcagtcctcccaggtggctgggtacagaatacgtacttggagtactggaattgtatttgcgatgttcttaaaagaggacaccgcctttaaccttgacttatttttaaatgtaacatactgatgtccttactttggtctgcacactcatctatacatattttggttgaaaggttttgggatgtttgcagatgctataaaataaatgaacgttttattattattcatccaaatggtggtagaatttgccacaatatttctgtccttacctgtatttctgttcttgccttggagctgagaccaggctagacattatggtttaaaaaaatgaggcaaaggagcaccatgaaaagctgaaatgaggggatattcagcgccaccccgaaggagactatgctggaagagtcagcctacactcatagtgcaagatacgaagccagtttgtgcagtacctacatgagaaaactaaggtatgtctgcaaaatacaagttgactgcctgccgagcctccgtggtccgtaagtagtgttataaaacacagccaactgttgaatgagagcttagtcctagataaaatatggccagcaattccattaacaaaacactgacaagacacctcagggcgagctgtacattgacaacagcatcgtcaagcagaatgcacttcagggaaaacataataaggcctctcacccgactttccttgcttctcacgtggggagaagaaagaactggggcatcgtgattccccccaccccacgcaaaccatctggggaggacgctggctgctgtcgaggcggcctcagcattcatcaattgacgattatttgattatttttgtggctgaaactgacgaaacgtttgtattatctcttgggaacgttaacagcctgccaggggactctaaaacagagtccaagagaagccttcgatgtgtgtccctgattttggtgctggggtcgctcatggcctgaaaataacgaagccccctttgagctactggccaaggccaaatgaaacctcgtgctcctctgctgtggggcggcccggcctcggggctcagaggcgctctgtctacagctgggaagactcgcaggccccaagctcctggccagcgctgccccggaggtcggcaggccccttcctcgtcacctttttgttccctcccccgcctcccgcattcggccgcttcctgactgggattccacagaaaagccgagggctgaggagaagtgtgagcgcctccgcctgtccactgtcccccaaagtcagttcaatccccgacgtcctccgctaggctccaccccaccggcccgggcagggcctccaaggcacctcccacctacgggtcacccagtcagcccacttctttctgggacaaaggcgtcatcccttagagacagtaggaaaatggtatctcccggaagttacctcacgacctccaagagcggcttccaaccttgccggaaatgacgaacgagtcaaccggatcggtgactgtggagggcgagctgagccctgtgcgtgagtggggtctggttgtgcagtgttcgtggaccctgggaggctaggggcgccccgctgggctgggaaaggataaggagtgcaggggcaggagtctggggttggggatggacccccgcggggactgcggcgcttcgcgaaagcgagccaagcgcctgtccaccctcggtcctgcagggccgccgccacaatgggccgcgagtttgggaatctgacgcggatgcggcatgtgatcagctacagcttgtcaccgttcgagcagcgcgcctatccgcacgtcttcactaaaggaatccccaatgttctgcgccgcattcgggagtctttctttcgcgtggtgccgcgtgagtgccttgggcccgcgggagcgggaggctggaccccagcagcagcagcagtcactgcgcctcccctctgagcgctggcggccgggcaggcgctctgtaacttgccgtacacacctttctcattgaatattcctgaccgcccttaagctggtcatattatcctccccatcttacacggggaaaactgagctacagaactgaaatgactggcccaaggtcactcgggtgattccagcatgttcctctgaggtcacctttatttagttcttaccagtggtgaaatgctttgtgttaaacgtgcagcagatagtgatgatagttgcatggccttggatatgctaagaactactgaagtgtatgctttaaagaagacaagaggactgagacctttttttttcttctatatgtcttatatgtgtgctctctgtttactctcttaatttttaaagagtttgtagtgttttatcttatctacacatgggggactgaagagttcgagagatccaagaggaagaatccagctgcctatgaaaatgacaaatgagcaacgcatccggatgacggttccctgtctctgaaagacctttctctggaagaggagtctgcattgtagtgtctcaaagacacaataaacttcctatggtctgcactgttgtgatattacatttttgtgagtagaatcctgtgtgaccactaatattcaagttcatgaagcgcccctcctcagcatgagtcttgaagttttgcctggtctcgggttttggtgaaagagcagggctccccctttgttccattatctacaagaaagtagctgcaggtactcctgcatctaaccatttgtgggtgacatgggctatggcgagtgctggttcttggccctctgctcccatagcaacaataaagtctactaactatattgtaattagtatgtgtcagggacgcttttattttttattttttgagatggagtcttgctctctcacccaggctggagtgcagtggtgtgatctcggctcactgccatctgtgcctcctgggttcaaacgattctcctgtctcagcctccgagtagctgggattacaggtgcaggacaccacacctggctaattttttgtatttttagtagagacaggtttcaccatgttggccaggctggtctggaactcctgacctcagatgatctgtgcgcctcagcctcccaaagtgctgggattacaggcgtaagccatggtgctctgggcctcaaatactcttcttagctacacaaatgaactgttaaacctcacaagcacctttaacgtatcctcatttggcagatgaggaaatgggcacagagagattaagtaatttgccagaaattatacagcagtgaatggtggagtcttgcactaaagtgatgctcttaaaactatgctctattgcaggggtgtccaatcttttagcttccctgggccacacataaaatacgctaacattacaatagctgataagctttaaaaaatggcaaaaaaaaccctcagcgttttagaaagtttacaaatttttgttgggtcggattcaaagccatcctgggctgcttgctgcccaggactgcggttggacaagcttgctctactgcctttcctcctaaggcaggccttagcctgaggggatatcagctataaaacggatgaggtgatctcttagcctccacagcagttttctgtttctgtgccaggaggccaacaatgttttcaaccatatgtggttcataaagcctcaaagatttactctggccctttatgaataaagtttacccctgatctaaagcctttaaattatctttttggtattaaagataccattt

SEQ ID NO: 317988 - DNA, 4001 bp, Homo sapiens
ttcctaaaggccaggaagagcctagcttggtctcttaaataaatttcaggtgtgtgggtggactacggtcacttctgtaatcaggcctcaagtatgcctagctgaagattttatcagctctatatcaagcagctgataacaccttatttagccaatttgttaattagatacagatttacttggttatttagctttcctctcttttcccctggcatttacgtaaaacccgttactgttacactaccggactaactatgtagctgaaagtctaagataaattgaggaatgatcttaaataaaatctctcattttttgagaaatttggattaagatgttcgctaggtgcttgctgaaacttctaaggcatgtggaaaagctaaccaattattcatgacgatactcagatctgctggtatgcaacttatggtattaggtttactcttcctctcaatttatcctcacggccttttccacttccaggtgtttacaattgtaattattcgctgcatgttaatttgcgaatttacaaatttgggtgagaaagtcacaattggcatagaagttccagaaagcagaaaaccattaggtctctcagtcctcccaggtggctgggtacagaatacgtacttggagtactggaattgtatttgcgatgttcttaaaagaggacaccgcctttaaccttgacttatttttaaatgtaacatactgatgtccttactttggtctgcacactcatctatacatattttggttgaaaggttttgggatgtttgcagatgctataaaataaatgaacgttttattattattcatccaaatggtggtagaatttgccacaatatttctgtccttacctgtatttctgttcttgccttggagctgagaccaggctagacattatggtttaaaaaaatgaggcaaaggagcaccatgaaaagctgaaatgaggggatattcagcgccaccccgaaggagactatgctggaagagtcagcctacactcatagtgcaagatacgaagccagtttgtgcagtacctacatgagaaaactaaggtatgtctgcaaaatacaagttgactgcctgccgagcctccgtggtccgtaagtagtgttataaaacacagccaactgttgaatgagagcttagtcctagataaaatatggccagcaattccattaacaaaacactgacaagacacctcagggcgagctgtacattgacaacagcatcgtcaagcagaatgcacttcagggaaaacataataaggcctctcacccgactttccttgcttctcacgtggggagaagaaagaactggggcatcgtgattccccccaccccacgcaaaccatctggggaggacgctggctgctgtcgaggcggcctcagcattcatcaattgacgattatttgattatttttgtggctgaaactgacgaaacgtttgtattatctcttgggaacgttaacagcctgccaggggactctaaaacagagtccaagagaagccttcgatgtgtgtccctgattttggtgctggggtcgctcatggcctgaaaataacgaagccccctttgagctactggccaaggccaaatgaaacctcgtgctcctctgctgtggggcggcccggcctcggggctcagaggcgctctgtctacagctgggaagactcgcaggccccaagctcctggccagcgctgccccggaggtcggcaggccccttcctcgtcacctttttgttccctcccccgcctcccgcattcggccgcttcctgactgggattccacagaaaagccgagggctgaggagaagtgtgagcgcctccgcctgtccactgtcccccaaagtcagttcaatccccgacgtcctccgctaggctccaccccaccggcccgggcagggcctccaaggcacctcccacctacgggtcacccagtcagcccacttctttctgggacaaaggcgtcatcccttagagacagtaggaaaatggtatctcccggaagttacctcacgacctccaagagcggcttccaaccttgccggaaatgacgaacgagtcaaccggatcggtgactgtggagggcgagctgagccctgtgcgtgagtggggtctggttgtgcagtgttcgtggaccctgggaggctaggggcgccccgctgggctgggaaaggataaggagtgcaggggcaggagtctggggttggggatggacccccgcggggactgcggcgcttcgcgaaagcgagccaagcgcctgtccaccctcggtcctgcagggccgccgccacaatgggccgcgagtttgggaatctgacgcggatgcggcatgtgatcagctacagcttgtcaccgttcgagcagcgcgcctatccgcacgtcttcactaaaggaatccccaatgttctgcgccgcattcgggagtctttctttcgcgtggtgccgcgtgagtgccttgggcccgcgggagcgggaggctggaccccagcagcagcagcagtcactgcgcctcccctctgagcgctggcggccgggcaggcgctctgtaacttgccgtacacacctttctcattgaatattcctgaccgcccttaagctggtcatattatcctccccatcttacacggggaaaactgagctacagaactgaaatgactggcccaaggtcactcgggtgattccagcatgttcctctgaggtcacctttatttagttcttaccagtggtgaaatgctttgtgttaaacgtgcagcagatagtgatgatagttgcatggccttggatatgctaagaactactgaagtgtatgctttaaagaagacaagaggactgagacctttttttttcttctatatgtcttatatgtgtgctctctgtttactctcttaatttttaaagagtttgtagtgttttatcttatctacacatgggggactgaagagttcgagagatccaagaggaagaatccagctgcctatgaaaatgacaaatgagcaacgcatccggatgacggttccctgtctctgaaagacctttctctggaagaggagtctgcattgtagtgtctcaaagacacaataaacttcctatggtctgcactgttgtgatattacatttttgtgagtagaatcctgtgtgaccactaatattcaagttcatgaagcgcccctcctcagcatgagtcttgaagttttgcctggtctcgggttttggtgaaagagcagggctccccctttgttccattatctacaagaaagtagctgcaggtactcctgcatctaaccatttgtgggtgacatgggctatggcgagtgctggttcttggccctctgctcccatagcaacaataaagtctactaactatattgtaattagtatgtgtcagggacgcttttattttttattttttgagatggagtcttgctctctcacccaggctggagtgcagtggtgtgatctcggctcactgccatctgtgcctcctgggttcaaacgattctcctgtctcagcctccgagtagctgggattacaggtgcaggacaccacacctggctaattttttgtatttttagtagagacaggtttcaccatgttggccaggctggtctggaactcctgacctcagatgatctgtgcgcctcagcctcccaaagtgctgggattacaggcgtaagccatggtgctctgggcctcaaatactcttcttagctacacaaatgaactgttaaacctcacaagcacctttaacgtatcctcatttggcagatgaggaaatgggcacagagagattaagtaatttgccagaaattatacagcagtgaatggtggagtcttgcactaaagtgatgctcttaaaactatgctctattgcaggggtgtccaatcttttagcttccctgggccacacataaaatacgctaacattacaatagctgataagctttaaaaaatggcaaaaaaaaccctcagcgttttagaaagtttacaaat

SEQ ID NO: 317989 - DNA, 4001 bp, Homo sapiens
actttgaaaagcgcgggaaggaggccagctctgtctctctcatctatatgctgcagcaaggaccaaggcatagccccagattccaactcagcactagcagcaatctgagcttctcccccagaagcctgagaaccaaggctaataggaaaacacagccaggcaaagcagcaaaaccaaaggaggaatttgttgggacgtgccatggcttgggagaactagtgaggaacatatttctccatgccagtcctcttcctaaaggccaggaagagcctagcttggtctcttaaataaatttcaggtgtgtgggtggactacggtcacttctgtaatcaggcctcaagtatgcctagctgaagattttatcagctctatatcaagcagctgataacaccttatttagccaatttgttaattagatacagatttacttggttatttagctttcctctcttttcccctggcatttacgtaaaacccgttactgttacactaccggactaactatgtagctgaaagtctaagataaattgaggaatgatcttaaataaaatctctcattttttgagaaatttggattaagatgttcgctaggtgcttgctgaaacttctaaggcatgtggaaaagctaaccaattattcatgacgatactcagatctgctggtatgcaacttatggtattaggtttactcttcctctcaatttatcctcacggccttttccacttccaggtgtttacaattgtaattattcgctgcatgttaatttgcgaatttacaaatttgggtgagaaagtcacaattggcatagaagttccagaaagcagaaaaccattaggtctctcagtcctcccaggtggctgggtacagaatacgtacttggagtactggaattgtatttgcgatgttcttaaaagaggacaccgcctttaaccttgacttatttttaaatgtaacatactgatgtccttactttggtctgcacactcatctatacatattttggttgaaaggttttgggatgtttgcagatgctataaaataaatgaacgttttattattattcatccaaatggtggtagaatttgccacaatatttctgtccttacctgtatttctgttcttgccttggagctgagaccaggctagacattatggtttaaaaaaatgaggcaaaggagcaccatgaaaagctgaaatgaggggatattcagcgccaccccgaaggagactatgctggaagagtcagcctacactcatagtgcaagatacgaagccagtttgtgcagtacctacatgagaaaactaaggtatgtctgcaaaatacaagttgactgcctgccgagcctccgtggtccgtaagtagtgttataaaacacagccaactgttgaatgagagcttagtcctagataaaatatggccagcaattccattaacaaaacactgacaagacacctcagggcgagctgtacattgacaacagcatcgtcaagcagaatgcacttcagggaaaacataataaggcctctcacccgactttccttgcttctcacgtggggagaagaaagaactggggcatcgtgattccccccaccccacgcaaaccatctggggaggacgctggctgctgtcgaggcggcctcagcattcatcaattgacgattatttgattatttttgtggctgaaactgacgaaacgtttgtattatctcttgggaacgttaacagcctgccaggggactctaaaacagagtccaagagaagccttcgatgtgtgtccctgattttggtgctggggtcgctcatggcctgaaaataacgaagccccctttgagctactggccaaggccaaatgaaacctcgtgctcctctgctgtggggcggcccggcctcggggctcagaggcgctctgtctacagctgggaagactcgcaggccccaagctcctggccagcgctgccccggaggtcggcaggccccttcctcgtcacctttttgttccctcccccgcctcccgcattcggccgcttcctgactgggattccacagaaaagccgagggctgaggagaagtgtgagcgcctccgcctgtccactgtcccccaaagtcagttcaatccccgacgtcctccgctaggctccaccccaccggcccgggcagggcctccaaggcacctcccacctacgggtcacccagtcagcccacttctttctgggacaaaggcgtcatcccttagagacagtaggaaaatggtatctcccggaagttacctcacgacctccaagagcggcttccaaccttgccggaaatgacgaacgagtcaaccggatcggtgactgtggagggcgagctgagccctgtgcgtgagtggggtctggttgtgcagtgttcgtggaccctgggaggctaggggcgccccgctgggctgggaaaggataaggagtgcaggggcaggagtctggggttggggatggacccccgcggggactgcggcgcttcgcgaaagcgagccaagcgcctgtccaccctcggtcctgcagggccgccgccacaatgggccgcgagtttgggaatctgacgcggatgcggcatgtgatcagctacagcttgtcaccgttcgagcagcgcgcctatccgcacgtcttcactaaaggaatccccaatgttctgcgccgcattcgggagtctttctttcgcgtggtgccgcgtgagtgccttgggcccgcgggagcgggaggctggaccccagcagcagcagcagtcactgcgcctcccctctgagcgctggcggccgggcaggcgctctgtaacttgccgtacacacctttctcattgaatattcctgaccgcccttaagctggtcatattatcctccccatcttacacggggaaaactgagctacagaactgaaatgactggcccaaggtcactcgggtgattccagcatgttcctctgaggtcacctttatttagttcttaccagtggtgaaatgctttgtgttaaacgtgcagcagatagtgatgatagttgcatggccttggatatgctaagaactactgaagtgtatgctttaaagaagacaagaggactgagacctttttttttcttctatatgtcttatatgtgtgctctctgtttactctcttaatttttaaagagtttgtagtgttttatcttatctacacatgggggactgaagagttcgagagatccaagaggaagaatccagctgcctatgaaaatgacaaatgagcaacgcatccggatgacggttccctgtctctgaaagacctttctctggaagaggagtctgcattgtagtgtctcaaagacacaataaacttcctatggtctgcactgttgtgatattacatttttgtgagtagaatcctgtgtgaccactaatattcaagttcatgaagcgcccctcctcagcatgagtcttgaagttttgcctggtctcgggttttggtgaaagagcagggctccccctttgttccattatctacaagaaagtagctgcaggtactcctgcatctaaccatttgtgggtgacatgggctatggcgagtgctggttcttggccctctgctcccatagcaacaataaagtctactaactatattgtaattagtatgtgtcagggacgcttttattttttattttttgagatggagtcttgctctctcacccaggctggagtgcagtggtgtgatctcggctcactgccatctgtgcctcctgggttcaaacgattctcctgtctcagcctccgagtagctgggattacaggtgcaggacaccacacctggctaattttttgtatttttagtagagacaggtttcaccatgttggccaggctggtctggaactcctgacctcagatgatctgtgcgcctcagcctcccaaagtgctgggattacaggcgtaagccatggtgctctgggcctcaaatactcttcttagctacacaaatgaactgttaaacctcacaagcac

SEQ ID NO: 317990 - DNA, 4001 bp, Homo sapiens
cagttccactgatggaaggattcctaagaagaaaaaaaatctaccagtagtgcttgaaaatcagtcaacacaacaggcagtcaagtcaaagaattagtacttcataatatgctttctcccttctcttttccccactttctcaagcctcaaaaaaaaaaatgggggttaatatagaaaaggaaggcaattggtatcattactaattcccagcaaccttactggacattttatctccagaaagtcagatttggtggtgaatcaaagtaacagggaatcactacattctgaagtttcatttttattttttatttttttgagacagggtctcactgttacccaggctggagtgcagtggcaccatcatggctcactgcagcctcaacctcccaggtgcaactgatcctcccaccttagcctcccaagtagctgggactacaggcatgagctaccatgcccagctgattttttgtttttgtagagacaaggtctcgccatgttgcccagactggtcttgaacttctgggctcaggcgatcctctcacctcaacctcccaaagtgctgggatcacaggcatgagccactgtgctcagcctgaagcttcattctgagtaatttgctccaaacacagaagcagctgagctgataaggaaagtagtatttttctcttggataatctctagagggaaaaccataatagaaacacttatcagacttactaagatgacattctaagccctagtgaagaaagtcaatttaaaacaatgtaattggtcctagttaatttagaacacttgagattaaaaacagatgctctaaaaccactatattaaaataggatattaaggaagcagatacaactgccctgttgggttagaatggttttaaatcaagagctggtagatatatacttttttttttttttttgagacagagtctcgctctgttgccgggctggagagcagtggtgcgatcttggctcactgcaacctctgcctcctgggttcaagcgattctcctgcctcagcctcccgagtagctgggactacaggtatgcaccaccacacccagctaatttttgtatttttagtagagacggggtttcaccatgttataattttttaaagcaccacacccaactgctgagtcaaactgtggactgatactttgttcttgtaagggccaactgttcaaaacgggaactttaagcttttctctcacagaaagtaacaaacaagagaaaaatatcctatttaacacatcacaccaatagctgtaagagatgtttaaggtccatttctgggccaaaagcttggtggaacagaaagaggtgctaacattctctagcagcacttccgctcagccttgaaagccattaagtctctggtgttgctttaaaattccatcatattagcccaccttaaccaatgagagcgttaggaataaacaataagctcaagtcccagatttgtttcaactggatattgagttttatgcaaaataaaatacaattcaaggaactaggctcagctcctttctgtaattgaaatgcagaagtgtctatcatcttccctccacccagttaaccaatctgctttcacatacctgttacctggtctccaggagcctgcttgtgccgggtacagggggtgaagagccgaacagtgttgtagaggtgacttctattggatttaggaatcccttccttggtagcatatgtcttatagagcttcttcatgtagtgcaaagctctggagtctggctgcagcctaggtgacccacctcgcccaacagatagaactttgaaaagcgcgggaaggaggccagctctgtctctctcatctatatgctgcagcaaggaccaaggcatagccccagattccaactcagcactagcagcaatctgagcttctcccccagaagcctgagaaccaaggctaataggaaaacacagccaggcaaagcagcaaaaccaaaggaggaatttgttgggacgtgccatggcttgggagaactagtgaggaacatatttctccatgccagtcctcttcctaaaggccaggaagagcctagcttggtctcttaaataaatttcaggtgtgtgggtggactacggtcacttctgtaatcaggcctcaagtatgcctagctgaagattttatcagctctatatcaagcagctgataacaccttatttagccaatttgttaattagatacagatttacttggttatttagctttcctctcttttcccctggcatttacgtaaaacccgttactgttacactaccggactaactatgtagctgaaagtctaagataaattgaggaatgatcttaaataaaatctctcattttttgagaaatttggattaagatgttcgctaggtgcttgctgaaacttctaaggcatgtggaaaagctaaccaattattcatgacgatactcagatctgctggtatgcaacttatggtattaggtttactcttcctctcaatttatcctcacggccttttccacttccaggtgtttacaattgtaattattcgctgcatgttaatttgcgaatttacaaatttgggtgagaaagtcacaattggcatagaagttccagaaagcagaaaaccattaggtctctcagtcctcccaggtggctgggtacagaatacgtacttggagtactggaattgtatttgcgatgttcttaaaagaggacaccgcctttaaccttgacttatttttaaatgtaacatactgatgtccttactttggtctgcacactcatctatacatattttggttgaaaggttttgggatgtttgcagatgctataaaataaatgaacgttttattattattcatccaaatggtggtagaatttgccacaatatttctgtccttacctgtatttctgttcttgccttggagctgagaccaggctagacattatggtttaaaaaaatgaggcaaaggagcaccatgaaaagctgaaatgaggggatattcagcgccaccccgaaggagactatgctggaagagtcagcctacactcatagtgcaagatacgaagccagtttgtgcagtacctacatgagaaaactaaggtatgtctgcaaaatacaagttgactgcctgccgagcctccgtggtccgtaagtagtgttataaaacacagccaactgttgaatgagagcttagtcctagataaaatatggccagcaattccattaacaaaacactgacaagacacctcagggcgagctgtacattgacaacagcatcgtcaagcagaatgcacttcagggaaaacataataaggcctctcacccgactttccttgcttctcacgtggggagaagaaagaactggggcatcgtgattccccccaccccacgcaaaccatctggggaggacgctggctgctgtcgaggcggcctcagcattcatcaattgacgattatttgattatttttgtggctgaaactgacgaaacgtttgtattatctcttgggaacgttaacagcctgccaggggactctaaaacagagtccaagagaagccttcgatgtgtgtccctgattttggtgctggggtcgctcatggcctgaaaataacgaagccccctttgagctactggccaaggccaaatgaaacctcgtgctcctctgctgtggggcggcccggcctcggggctcagaggcgctctgtctacagctgggaagactcgcaggccccaagctcctggccagcgctgccccggaggtcggcaggccccttcctcgtcacctttttgttccctcccccgcctcccgcattcggccgcttcctgactgggattccacagaaaagccgagggctgaggagaagtgtgagcgcctccgcctgtccactgtcccccaaagtcagttcaatccccgacgtcctccgctaggctccaccccaccggcccgggcagggcctccaaggcacctcccacctacgggtcacccagtcagcccact

SEQ ID NO: 317991 - DNA, 4001 bp, Homo sapiens
tagcccgggaacctgtggaggtccttactggcatctctgcttttcaggctcccacccctccattctcgctggttttcctctccccacttcacctgagcgggtttcttggcaacctgctttcagaccatccctcaccccttccacgcgtcaccgtgacagattcgcaggaggcagcgctcccgccgtcagtgcccccgcaccttcttgtgcctggcaggctgggaggtttgtttgggctttgccttcaagatccaggtctcagagagagaaaaaggaggcggtggggcggggagacgggtttgctataaactcggtttttttttttttttttttggcggggggaggtagagacagaaattgctggaagatctattgcttttcttaactatgcttcgtgtccttgactgacagaggacttattctcccctcaaccccccataactgcggggcccaagatgagggaaggaaaaagaatttgggacacttctcgcaggcaaactgggaaagcggtctgtttaaagggccaggttccaggcccgagagcacccgaattgctagcgggaaagggctagggacacggcggacttcccagagatcggacacttgttacttgttgaaaaggcgccaccttccctgacaaagcgaaggcgcagcgaaacagtacgagtttggtcgaggccggctttgacggctttgcgggactgggtgcgtgaatgaggttggaagaaacatctcttccttgaaatacctaagcatatattccaaacactgagcaagagtcgagcgcgttctaacatctccgcagcaggggccggaagagttgcctttgtccccgcctatgagcagaagggtcgcgagctctgggatgggtaagccccccgggggcgcgcacatgggtcctggcggcggattctaccaaagccgaaactagctgggccccaggaagctggcgggaacccgcgaaagtccgtttccagcccgaagagggttcgtttttcttcgttggggcaggaaacaaaccaccagtgcggaattagcctcgaggtggtgtaaagtagtggcagtggtggtggggtgtttttggaaggcggcacagagtacaggagaaaaaggggtcattaaaataataacctcaatggcctagtggagtctcaagaatacgttcgagacagagatttgaatccaggactggcaagaaagcccctctcctaacctcgacggggatggttagttggggtggagggcgttaggaacgtgcaggcaaccgggtgaggaatgtagctttgccagacctcgcccggaggaggtgagccctccatttttaggttctcagcacctttgcagcagcccctcccccggcctgcgcttttccttggcacagatcaaaacaagctcaatagtaagttgcactcttggcaatgatagtatctctgcacgtccagagaggacacatttcgacggcggtgggttcgaagatgacccaagccctgaatcgttctgtgacttgacggaagagcacctggccgagtcggggaaggaaactgcccctcttgggcattccgggtccaggcgcatctggggctccacagatctttgcccacgtggaaaaggcaacatgcccctccgaaaggccggcctctctccggttctacttttctctctcctcgcatagcttaggttccctctagtctttccactttctactctcaccgtttgctctggggtccagacgcacccctctgactagggcgcccttcagccggccgcacccacccgcgacgcaggcaccacccgctccctgctccccggcccgctccctcacttacctcggatcgggtctccgcagaccctaggttggacattaactccaggtgccccaagtcccagccaggagacccatccgggctgatggctggagcgcggagccccgcccaacaggtcaggggcaagagttcgcaatcctggggtcgcgcggggcagcaagggcgcgctggaggcggcggccaagactcccgccgccgccgccgccaacagggcgagggctgccggcaactctcccgccgggcccccgcacccccagaagccgaggtccgagcagccgccgctgctttgggtggggggctgacagggctgcgcgcgtcgcgctcttggctggggctgcgcgggcccggggcgctgcgggcggctcagcggcagctgccgcgctctgcgcctcctctgggcgcactgcctgggagcacgagactggtttgtctgatgctgctgccggagctgaggtcttgcctggagatccgaacgagacaccacgtcaaccggcgcggggagtcccgtgaagacatgagggcgccaggagcgcaggctggtcttctagagcccgggctgggggtccggggtccggggtgggggaggggaggcgcggggccccgggagggaggggtcgggaggcgtcggctgggcctggcggtgggggaggagaggagagcagcgaggaggccctggagttcccgaggcggggggccggggtgcgagtgggcgacgcgaggcgcccctccctgggctgcagggagagcgctgagagcgcggagacgccgcggggctagcgccttctcctctccgggtggatcaaaaatcgagaggaatgtgcggcgctctgcgcgggccagccgaaaggggcaatccgaacttgaccgcggcgcccgcgccgggctttgcccccgcgcgccgcactgggagggtggcgctctgccggtgcagggcagcgccgggctttcctcgcgcctgtcgaaggccggccttcccgctcgggtgtctcgccctctcgcttctccgcagggcaggaggcagtggcgagaaaaggagctgccggccggagttctagcaccgagaaggagaggtgcggagcggccgggtgagggaagccgagtatttgccaggggacgctgcgagtggggatgaatttatagggctctcactccgtgacgtgccctccagtggcttttctgattcgctttctgacctaaacacacattagtttagtccccatgctaaggccaacacggtctccaaatatctgctggctgaagtcagaggctttgcatatcatgtattacatggcaggcaatgaagaaggcttctgaggctggccggctcctcagtcctaggctccattttcatgctgttgtaatctaataccagacatggggcaggcacatacattcaaaatcccaattccagaggcgtaagatcactttatcaggaacgggttaggggaggttgagctaaacctgcttttatccagattttcgaaaatgcagatgggaaacttcagcaagcgcccacttggatgctgagtttccagcgatcaggggcccggcccccattccagagctctgtggatgggagaggtgagaccttctgggcattccttttgttggttagttcaccaccagaagctgcctgagccttcttttgtagaggacaggaggagggcaagtccttacacaccctgtgcatggctataaccataaatacatttcattcacatggggcatggaattggctgtacctctaaaataatgtactaaatagggcatgtctttgctaagcagaaacctgttttccggaagccattggacctgaattcagtgggacctcttttattttattagctggggccagggaaagtgtaaacaggctcagtttacgtccatgtacctcttattttatgactcatccggttgttggggagtatgtgttcttcaagtagctgatacagacaataggcaggggaaatgcgtgtggcagtgtggggggaagatcatgtattattaaacttcttaaaagtcaaagatcagctactttgcaggtttgtcagtgaagcgagtgtgggaggaaaattgttcttactaacgttgctgtgatttaagattaagcgaagtgaaaatcgagtcatcaaaacataccttagctgaaattaggatgctctctggagttctgcagaa

SEQ ID NO: 317992 - DNA, 4001 bp, Homo sapiens
tcacttcatgcaacaagcttctgaggagtggagggaaaacgagatcacatcacagctgatatgccctaattgacttgcttctaaaacatgttaatttttgagaggtaaatcacagacttattttctaataagaataacctgggtttttttctcaagagttagcattgtctcacgtggagtgagctacagtctttgtccctagtcccagccagcactatttatggttaagtctttctagaaccggaacttttctgaacagaggaacttttctgaacagatttgacattacccagacgcttgttctggaaatggaggcccttctgtgttttctctgcctctggcttgcttttgtgaaaagccggcctctcgccttgcaggcgcagtttaggatgaaagtgcaatagttctcagaattaagcacagccaggcacagacacacagataaagggctttggaagcaaagaaaaactgggagtgtgtataggtgaggaaacagaaaaggggacagctgtgtgtgtgtttctgaggtggtggtgctggtggggaggatatttgttcatcagaatgctaaaggagcagcataaaaattccatcccctctgtgctgggcaaaccagcgcgtgtcactttcaggccaggcgtgcgggcagcagtgggcagccaggcacccctgggggcttcagcacccgcaccccttgcccacgggtcggtaggccacacagccatcaggctggcttggggtacgtgcggggctggctgcgggtgggggtgcgagggggtccgccggcggcccccccgcggggagggaacggttcttacagtcactgctcagcgcgaagggcgcgcggcggcggccgagggagcggtcttcggcgggcgcctcgggaggcctcttaccggcgggcagcgggaaggcggacgcggtgtggagcagcaccaggcagacagccacgacatcccataacttcatcttaaagtcccgtccggcggcggcacctgcgcgggcaggcgggaggtgggggagagaaccgcagaatgcacgttaagcctgggctccctgcgggtccctgcgcccctctccaacctcgtcaccgccctcctccggcaccgctgcaggccagcggctcctcgggcactcctgccctccttgcaagtccccagttcgcttctccctcctcagcgcgccccaggagcagctcgcactcctggttcaggttgcagctgcccttctccaccacacggtcttaggggtcagagtttcaagcagggctgctgtcccctccagttaaccccccacccccaccaccacgattcctgtccagtcccctctactggtgcgcaacatcccccattcctggggggcaatcgggtagttcccacccttcgtcctccaccccaaccagagacctccccttcttgtcccggtagctcctataggcccctgaacgagccctcggcccaagcaaggacggtgtttctctttggaaataaaatcaagcgcattcccctgcctcgggtcccaaccgggcttctggctagtcgagggcaggctcgggggcaccactcacccagcctgccgcccacacctcattcttcccacctaaataggtattctgttgcgagagcaagaagttagcagggacttggagacttttggcctgtatgggatatctggtttaagttacttaacttcccaaagcactgattcgatttaaaatactcctcccacctcttaaagttatgaacattaaatcacgcatgacaagctctagcggaacatgtagtaagagctcagtaaatgctttaccattgctgttaggcaaagactgcatttgtcttgaaagttttaatcctccgtggtatacccgaaaaccctctcttgactggatttttgcacctttgagagattctggccctaatcccttcccctcccagaggagtcactggctccccgcgcccccgtcacgcctggacgactgtacccagtctcggacgctttggaggtgctctggcactggaaggcctagaccgtggtacggcgcagagtagggggttcagctcttttcagcccgaggtgggctctgtttggcttctcaatcctcacacccctacaaaggagggccacgcagctgggggtgggttagaaaaaggggctgtaaatttgggggcgagttccaaccaatgaggagacggggaagaaccgaggcatcttggggtgcagtgttatccagtgccttcctaatcccagggttcgtctccagggcactagtgacctagagagaatctcctcaagcggaatctgcgagattcgtgcagtcgattatcctatcccctcgaccggctccataaaacggttcttaggaaaaactcgattttttttttcccatgcgggagggaaatgcaaaacccaggttaatgcaaaaacctcagtgcctttcctagccattagttcacaggcacccccgcctccattccagggttccagtcctcatctctacccggaaccccactccctgtcccggtgcaggcaacccggggaagcctttaattcggccgccacctcccacctctgcagagactaatgcattttacatctcctgagcgtctgtttgttcgctatgcagctgttgggctcgagagggtgtagggactagaaactcctagtgacctgcagcaccgagcgcctcttgcctcgcgggctggtttgcaaactcgggaaaaagctaggttctgggtcgcgatgtgcagacacaggaaaactgcaccaggccatgcaaaatgagcccagaaaggtactttggcagctaggacctggggaacgcgagcttcccccctcaagccccccgccggtgccagctcccgggtgcgtgcgaaatggctggcggtccgaccggaggagcatggaggcgcggggttaatgcgccattccaaatcgcggtgcccgccagcaggaagccacagaggcactagatttcccttccgtcttaagagggttttcccttttttcctgcttggccgacggagggctttttaaattggacgtggagatcctcaattagaagtgtggcgaagctggcaaaagactacacagtggaaaactccccgcgtcgccagaggaggctcccggctgcggttcccgccctcggccgagcgccgccagcgcccggatcgagctcccctcttcccccgggacagggagggcgcattcttccctctgagcgccgccgggaccggctccagtccgaggggctctttcgttctcggtatttgctgggcgggggaaaaggggggaggttgggggactcggcacacacagcgtctactaggacgtttttcttagagtccgtgtgggctccacccctcggcttctcagtttgtctctctatcgctttcccaaaacacatctacatctgcccgacgcgcttctcctcaaccatgggcctttgcccgcggtgcaaactgctttacgcgccgccacgtgcgagaaccaagctctgctcctcaagtgacgggggctctgctctgccaggtgaccgcgcaccatttctcgtgcctggcaagctggtccccttctgggtccgggaccaccacgtcccggcagggcaaaagcagcaggccgtgggcgccggcacctgtgggtccccaggcctggggaggcaaggacgcccaggaaagccacagaagtgctcgcagaagcagccgctcgccgcgaggcacttctgagttcccggcagcagggggcaccagaaaccgtctgagccgtgtcgcgcccacgcggcccggaggctgtgttatcattttagttataaaaccggagaaccaccactccctctacgagcctcccgaaatcccattagcccgggaacctgtggaggtccttactggcatctctgcttttcaggctcccacccctccattctcgctggttttcctctccccacttcacctgagcgggtttcttggcaacctgctttcagaccatccctcaccccttccacgcgt

SEQ ID NO: 317993 - DNA, 4001 bp, Homo sapiens
aactaaatcagaatctcctggggtgagacctagcatcagtagtctttaaagttccccaggtgactccaatctcttcttaggagattcttcccaaaggactttaggacaaacataaaggccaaggggcaaatctcatagccactgggattgtggagtagaaaggcttctctttatggtacagttcattgagctctaaagtaacttgcctgaaagtcacagagttagttgaaagcagagccaggagcctgagccagaattaaatgaatctagttgaacagggcactaatacagcaattaaacctccatgaattaatcagctttgtaatcaggcacagtcatttttctcttggcaacgtctgggttagagaactattatctgccactgtgttcctgtccctcttgtctagaccgtttgagtgaatgaatagccagttttggaagacccggcactaaggggcattttaaagtttctgttggagaaacgtttatatacattaaatttgtgatggaaataaaagcctttaaagtaggtttatacagttaattgacagacactcttggaacaggtactttagtttcaaaggattaaccatgttccctaacttccttttgaagtcttaatttgccttataaaaaaatccactttctatctttcttgggacttgtggaagaaggtgcttttgttgctataattaagcataaaataagcacattgcatttactgggttgtttcctagccaaggccattgggtttgggggactcagcgcacagctgactactgcaggactactactgtggttatgaccatagtaagtttcaagcgcaaagttactagagggataattctgggggtggcgttagggagggaagagtagccagggtggtatcctagttacacacagctcattcctgctttattttggggttgtgtgaaattttctattgctatctttgttgacattatgcctctgcaacagcctctatcacatgtaatgtagcctctctcacttcatgcaacaagcttctgaggagtggagggaaaacgagatcacatcacagctgatatgccctaattgacttgcttctaaaacatgttaatttttgagaggtaaatcacagacttattttctaataagaataacctgggtttttttctcaagagttagcattgtctcacgtggagtgagctacagtctttgtccctagtcccagccagcactatttatggttaagtctttctagaaccggaacttttctgaacagaggaacttttctgaacagatttgacattacccagacgcttgttctggaaatggaggcccttctgtgttttctctgcctctggcttgcttttgtgaaaagccggcctctcgccttgcaggcgcagtttaggatgaaagtgcaatagttctcagaattaagcacagccaggcacagacacacagataaagggctttggaagcaaagaaaaactgggagtgtgtataggtgaggaaacagaaaaggggacagctgtgtgtgtgtttctgaggtggtggtgctggtggggaggatatttgttcatcagaatgctaaaggagcagcataaaaattccatcccctctgtgctgggcaaaccagcgcgtgtcactttcaggccaggcgtgcgggcagcagtgggcagccaggcacccctgggggcttcagcacccgcaccccttgcccacgggtcggtaggccacacagccatcaggctggcttggggtacgtgcggggctggctgcgggtgggggtgcgagggggtccgccggcggcccccccgcggggagggaacggttcttacagtcactgctcagcgcgaagggcgcgcggcggcggccgagggagcggtcttcggcgggcgcctcgggaggcctcttaccggcgggcagcgggaaggcggacgcggtgtggagcagcaccaggcagacagccacgacatcccataacttcatcttaaagtcccgtccggcggcggcacctgcgcgggcaggcgggaggtgggggagagaaccgcagaatgcacgttaagcctgggctccctgcgggtccctgcgcccctctccaacctcgtcaccgccctcctccggcaccgctgcaggccagcggctcctcgggcactcctgccctccttgcaagtccccagttcgcttctccctcctcagcgcgccccaggagcagctcgcactcctggttcaggttgcagctgcccttctccaccacacggtcttaggggtcagagtttcaagcagggctgctgtcccctccagttaaccccccacccccaccaccacgattcctgtccagtcccctctactggtgcgcaacatcccccattcctggggggcaatcgggtagttcccacccttcgtcctccaccccaaccagagacctccccttcttgtcccggtagctcctataggcccctgaacgagccctcggcccaagcaaggacggtgtttctctttggaaataaaatcaagcgcattcccctgcctcgggtcccaaccgggcttctggctagtcgagggcaggctcgggggcaccactcacccagcctgccgcccacacctcattcttcccacctaaataggtattctgttgcgagagcaagaagttagcagggacttggagacttttggcctgtatgggatatctggtttaagttacttaacttcccaaagcactgattcgatttaaaatactcctcccacctcttaaagttatgaacattaaatcacgcatgacaagctctagcggaacatgtagtaagagctcagtaaatgctttaccattgctgttaggcaaagactgcatttgtcttgaaagttttaatcctccgtggtatacccgaaaaccctctcttgactggatttttgcacctttgagagattctggccctaatcccttcccctcccagaggagtcactggctccccgcgcccccgtcacgcctggacgactgtacccagtctcggacgctttggaggtgctctggcactggaaggcctagaccgtggtacggcgcagagtagggggttcagctcttttcagcccgaggtgggctctgtttggcttctcaatcctcacacccctacaaaggagggccacgcagctgggggtgggttagaaaaaggggctgtaaatttgggggcgagttccaaccaatgaggagacggggaagaaccgaggcatcttggggtgcagtgttatccagtgccttcctaatcccagggttcgtctccagggcactagtgacctagagagaatctcctcaagcggaatctgcgagattcgtgcagtcgattatcctatcccctcgaccggctccataaaacggttcttaggaaaaactcgattttttttttcccatgcgggagggaaatgcaaaacccaggttaatgcaaaaacctcagtgcctttcctagccattagttcacaggcacccccgcctccattccagggttccagtcctcatctctacccggaaccccactccctgtcccggtgcaggcaacccggggaagcctttaattcggccgccacctcccacctctgcagagactaatgcattttacatctcctgagcgtctgtttgttcgctatgcagctgttgggctcgagagggtgtagggactagaaactcctagtgacctgcagcaccgagcgcctcttgcctcgcgggctggtttgcaaactcgggaaaaagctaggttctgggtcgcgatgtgcagacacaggaaaactgcaccaggccatgcaaaatgagcccagaaaggtactttggcagctaggacctggggaacgcgagcttcccccctcaagccccccgccggtgccagctcccgggtgcgtgcgaaatggctggcggtccgaccggaggagcatggaggcgcggggttaatgcgccattccaaatcgcggtgcccgccagcaggaagccacagaggcactagatttcccttccgtcttaagagggtttt

SEQ ID NO: 317994 - DNA, 4001 bp, Homo sapiens
agaaggtgcttttgttgctataattaagcataaaataagcacattgcatttactgggttgtttcctagccaaggccattgggtttgggggactcagcgcacagctgactactgcaggactactactgtggttatgaccatagtaagtttcaagcgcaaagttactagagggataattctgggggtggcgttagggagggaagagtagccagggtggtatcctagttacacacagctcattcctgctttattttggggttgtgtgaaattttctattgctatctttgttgacattatgcctctgcaacagcctctatcacatgtaatgtagcctctctcacttcatgcaacaagcttctgaggagtggagggaaaacgagatcacatcacagctgatatgccctaattgacttgcttctaaaacatgttaatttttgagaggtaaatcacagacttattttctaataagaataacctgggtttttttctcaagagttagcattgtctcacgtggagtgagctacagtctttgtccctagtcccagccagcactatttatggttaagtctttctagaaccggaacttttctgaacagaggaacttttctgaacagatttgacattacccagacgcttgttctggaaatggaggcccttctgtgttttctctgcctctggcttgcttttgtgaaaagccggcctctcgccttgcaggcgcagtttaggatgaaagtgcaatagttctcagaattaagcacagccaggcacagacacacagataaagggctttggaagcaaagaaaaactgggagtgtgtataggtgaggaaacagaaaaggggacagctgtgtgtgtgtttctgaggtggtggtgctggtggggaggatatttgttcatcagaatgctaaaggagcagcataaaaattccatcccctctgtgctgggcaaaccagcgcgtgtcactttcaggccaggcgtgcgggcagcagtgggcagccaggcacccctgggggcttcagcacccgcaccccttgcccacgggtcggtaggccacacagccatcaggctggcttggggtacgtgcggggctggctgcgggtgggggtgcgagggggtccgccggcggcccccccgcggggagggaacggttcttacagtcactgctcagcgcgaagggcgcgcggcggcggccgagggagcggtcttcggcgggcgcctcgggaggcctcttaccggcgggcagcgggaaggcggacgcggtgtggagcagcaccaggcagacagccacgacatcccataacttcatcttaaagtcccgtccggcggcggcacctgcgcgggcaggcgggaggtgggggagagaaccgcagaatgcacgttaagcctgggctccctgcgggtccctgcgcccctctccaacctcgtcaccgccctcctccggcaccgctgcaggccagcggctcctcgggcactcctgccctccttgcaagtccccagttcgcttctccctcctcagcgcgccccaggagcagctcgcactcctggttcaggttgcagctgcccttctccaccacacggtcttaggggtcagagtttcaagcagggctgctgtcccctccagttaaccccccacccccaccaccacgattcctgtccagtcccctctactggtgcgcaacatcccccattcctggggggcaatcgggtagttcccacccttcgtcctccaccccaaccagagacctccccttcttgtcccggtagctcctataggcccctgaacgagccctcggcccaagcaaggacggtgtttctctttggaaataaaatcaagcgcattcccctgcctcgggtcccaaccgggcttctggctagtcgagggcaggctcgggggcaccactcacccagcctgccgcccacacctcattcttcccacctaaataggtattctgttgcgagagcaagaagttagcagggacttggagacttttggcctgtatgggatatctggtttaagttacttaacttcccaaagcactgattcgatttaaaatactcctcccacctcttaaagttatgaacattaaatcacgcatgacaagctctagcggaacatgtagtaagagctcagtaaatgctttaccattgctgttaggcaaagactgcatttgtcttgaaagttttaatcctccgtggtatacccgaaaaccctctcttgactggatttttgcacctttgagagattctggccctaatcccttcccctcccagaggagtcactggctccccgcgcccccgtcacgcctggacgactgtacccagtctcggacgctttggaggtgctctggcactggaaggcctagaccgtggtacggcgcagagtagggggttcagctcttttcagcccgaggtgggctctgtttggcttctcaatcctcacacccctacaaaggagggccacgcagctgggggtgggttagaaaaaggggctgtaaatttgggggcgagttccaaccaatgaggagacggggaagaaccgaggcatcttggggtgcagtgttatccagtgccttcctaatcccagggttcgtctccagggcactagtgacctagagagaatctcctcaagcggaatctgcgagattcgtgcagtcgattatcctatcccctcgaccggctccataaaacggttcttaggaaaaactcgattttttttttcccatgcgggagggaaatgcaaaacccaggttaatgcaaaaacctcagtgcctttcctagccattagttcacaggcacccccgcctccattccagggttccagtcctcatctctacccggaaccccactccctgtcccggtgcaggcaacccggggaagcctttaattcggccgccacctcccacctctgcagagactaatgcattttacatctcctgagcgtctgtttgttcgctatgcagctgttgggctcgagagggtgtagggactagaaactcctagtgacctgcagcaccgagcgcctcttgcctcgcgggctggtttgcaaactcgggaaaaagctaggttctgggtcgcgatgtgcagacacaggaaaactgcaccaggccatgcaaaatgagcccagaaaggtactttggcagctaggacctggggaacgcgagcttcccccctcaagccccccgccggtgccagctcccgggtgcgtgcgaaatggctggcggtccgaccggaggagcatggaggcgcggggttaatgcgccattccaaatcgcggtgcccgccagcaggaagccacagaggcactagatttcccttccgtcttaagagggttttcccttttttcctgcttggccgacggagggctttttaaattggacgtggagatcctcaattagaagtgtggcgaagctggcaaaagactacacagtggaaaactccccgcgtcgccagaggaggctcccggctgcggttcccgccctcggccgagcgccgccagcgcccggatcgagctcccctcttcccccgggacagggagggcgcattcttccctctgagcgccgccgggaccggctccagtccgaggggctctttcgttctcggtatttgctgggcgggggaaaaggggggaggttgggggactcggcacacacagcgtctactaggacgtttttcttagagtccgtgtgggctccacccctcggcttctcagtttgtctctctatcgctttcccaaaacacatctacatctgcccgacgcgcttctcctcaaccatgggcctttgcccgcggtgcaaactgctttacgcgccgccacgtgcgagaaccaagctctgctcctcaagtgacgggggctctgctctgccaggtgaccgcgcaccatttctcgtgcctggcaagctggtccccttctgggtccgggaccaccacgtcccggcagggcaaaagcagcaggccgtgggcgccggcacctgtgggtccccaggcctggggaggcaaggacgc

SEQ ID NO: 317995 - DNA, 4001 bp, Homo sapiens
cctgagcatgaagaacagcaaccaaagttggatgaagacagggaaatcacagtgcctgtggtgacacatgctgagagctgcaccccaccgggtggtgcttttgtaactcgcaacaagattcacttttgaagcttgaagtcttctgactcttctaccacaatatgtaaatacaggccagaaagaaaatgcctctaaaaattacagtagccttcatgtcaactccaaaatacctctttagccatgaggaagatgacgacattgcaaatgaaaatgcaaccatcttgcatgcggttcagctctgagtgttccactcccactgccaacagtctgatgtgggattgtttctggttacgcagagttagttaacctccctgtggccttcctgacaagccatatggataggaactacaaagtactgggagacccggattccagtctcagttcaattcgttctttcatttatccagaattgttggaggacaagtgagttttccacttattggataaataagttttccaaacaactgaaaattttggctagccacaagatttttgcacttttattgtttaaataggggaaattctcctaagatatggaatatattaaaagcatgggccctggaccctggatgcctgggtttgaatctcagctccaacacgtgcttgcagtgtgatgttgggcaaagggaacttctctctgcttccggggataacgatagtccttgcttcagaaagtagaaagagtaaataaattaaccatacaaaacagaacagtacctagcacataaaaattgtttcagtaagtattattgttattactataaacagaatgactaatagaaaacaggaggcttttcttctcagagtcatcattataaccactaagcaaaatattgcatgtgtatatatgcatattgtttacatatataatatatatgtataagtatacaaatattttatgtatttatgtatacacatactttatacaaccacacactcactaaatatatacacatacatatatatgtatgcatctatacatgcatatataaatatatatatatatatacacacacacacacacactctctctctagacgtaaatatataaaatcatgccctcataacccactggaatatattagggaactacatttaccttaaatgacctcagaagttttcgcttctggtttttcgcaccttgtgtttgcctgttttaaacatcctggtctcctctttcattggtggaactgctagcagccgtgtctggctatgtctgacttcttcctcctctgagttgttcttctattcttccgtgactgagaaaccagattgcaaagcttgttagaattgtggctaacataagagcccagagttccgaatgagaatctcagaggctcctctatgaagaaaacggatgggctttactgtttggacactggatcacctgctatggctaatctgatcactgtgtttagcttgctttctggttcttaatctgtgcttttcagatgtgctcacaagaccttcaggctgggtgagcagattcaaggggctaccgtggtgtagaaaggggtggccaaggtggggtttaatctaggaaggctccaagccctccattttgcttcaaccagagaagctctgagatgttttatataatgggcttctgcatagcatgccatttgcaaaaagggttccgctactacattaataaataaagttggcaactactgttctacagagtcatgtgtttgctagataaatgacatctggacatacactcttttatgtatgtttgaaatatttcaaataaaaaatgagagtcacaagccaaaccaaccctagagattaaacataacaaaaattcatatacaataaatgagacagggcatccacagaaaacatttccaaataaaccaccataactatgatttgtaaattttgtaatgatgttaggttaaccccacatcccaccacagagccaccatgttaaaagtcaataaatataaaataagtataattttaagaagtctaaaatgttaatgatggctacaaatagacagggcttgagttacatgattgggaaaaggggaattttaagaatagtttcagggtttttccagaactcatgaaaagagattctaacagttgacacaggtttctagtcagaaacatccatacactggagatggacatattagcatgatggaaacgatcttccagcaacattaagctccctcttgttctaactaactccatcttactaactgtatgagttagaattgttttgtctgcaagaaacaaacaaaaacccccacaaaaacagtgtggtttaaataagatcaaaatttattcagttagttagttatttgtttgtttgtttgtttgtttgtttgttttttgagacagagtctcgctctgtatcccaggctggagtgcagtggcacgatctcagcttactgcaacctctgcctcccgggttcaagcaattctcctacttcagcctcccaagtagctgggattagaggcgtgtgccaccacgcccagctaatttttgtatttttagtaaagacagggtttcaccgtactggccaggctggtcttgaactcctgaccttaagtgatccacctgcctcgacctcccaaagtgctgggattacaggcgtgagccaccactcccggccaagatcgaaagttatatatttctcagttgagaagcctggcaggaggtagtccaggtcggccatggcactctatggtatcaggggcccaggcctgctctactttattgctctgtcatgagcggccgccattctcaaggtctcttctagtccaaaatggctgccagagctccagacattacagccaccttccagacaacagagagcaggaagaagaagaggaaatccctcttccttcaaggagacttgtaagaagtttcacagaccccttctgcttacctcatattgaccacaacttagtcacatggccacacagaactgcacagaaggctgggaattgcagtctgtattccagacagttctgtgcccagccaaaactcaggtattccagtactaagaaagaaggaaaaatagatattggatgacaacaaaagtctctaccatgccaaattatctcctgattcttatttccacttcctgagtgaacccactcaccaagaatagagtggtatcccattgtccactttttgcccaattatattcttaaaaattaattttcaagtcagtgtaaagccacaaacacttgttaggtgcctattatgatttatacaatggaatactattcagcaatgaaatgtagcaaactattaatatataaaacttcaatgaatcttgagaaaattatgctgagtgaaaacagccagaaaaacagagtacatgttgtatgattccacttatataaaattccagaaaacacaaactcatctgcagtgacagaaagcagaatagtggttgtctgggaacaatgggaggaaggggggtggcttgcaaagggacacgagaaactttagggtggatgaatgcgtttattatcttgattgcagtgatggtttcacgggtatagacatatatcaaaactcatcaagtgtaaaactttaaacacatgcagttgatctgacatcatgtatgccttgataaagctgtaaaacacttttttaaaaagaacgtgttacatgcctggtgctatgctaggcatgagaggcacaagataaaggtacaaggtcctgtcctcaaagggctcacagcccagtaagtcatcctgattaatgaattaggcttgtgagtacagatggggtgaatacatgctgagtcccaacacactaagaaggcactcagcctacagaccgagagtcagactttgtcccgtaagtacccccagcccccaaacccagcctgtaacaggcttcagcgtttgacaatgaggagcaccgtgtatacatgcacggctcttttaacctacttctactaaagctctggata

SEQ ID NO: 317996 - DNA, 4001 bp, Homo sapiens
ccatcctggctaacatggtgaaaccccatctctgctaaaaacataaaaaaattagccgggcgtggtggtgggctcctgtagttccagctactcgagaggctgaggcaggagaatggcgtcaacccaggaggcggagcttgcagtgagccaagatcccgccattgcactccagcctgggcgacagagccagactccgtctcaaaaaaaaaaaaaaaagtaattaatacttattagtagtacttctatagcaacacgatattaacaaaatggtgggaagatttagactactggggatcaaataatcattaaaaattttttaaatagcttaatgcaaagttcttattaagtaggtcttttcctttgttctctcaaaaggcaggtacatcaagtaactatctagcttagaaatgagtttcattcacgcatttacagtctatatcaggagtccatttgtatcaataaccagagggtaattgttttagaccttgtgggccataccatgcctgttgcaactactcaactcttgtagcatgaaagcagtcatagacaatacttaaatgaattagtgtggttgtattctaataaaacctatttgcaaaaacaggcacagagcagtttgccaacctctggtttgtatatatctcctttcaaaaaaagttgagacatcttacaatatagtttcttatctaattaatgaacacaattacaagttactttgcacagatgagctagcaaaactagcttgcaacagaagaaccctcagcacagatagataaaaacggtttgagaaaccagtaagccatggtacctgatggagtgcatgttctgtcacaactgtttttgtctctacatcccatattttcacagtcccatcgtcggagctggtggcacagaggttgtactgaccagggtgatgagaaaatgtgaagccagagaccctttcggtgtgtcccaccaactctcctatgactttaagcaaaaccagacgctaggttaatcgaagtgctatccaaggttcctggcagaatcatactgttgttggatgacaagtgagcagatgctttggagttacttaacccatggtataactgaaacaccgacggacttacactcagaattcccaagtgctgatattggctgtgccacgtgacttcgaacaagtctctgagcctcagcttctcaactgtgaaatgaatgttgatataccttgctctgcttagttcacagactggaaagcagctcaaataatgtgaaagtgactcttatttagatgtggccagaataaatcacctggcatgtcatatcctaaggcacaatcaaagcctagtttggagcctgaaagcatctggttcaacccattcatcttacagtaaggaatgccacacgttgcaggatcttgcttagggcctgcagctgtggttagcccccaaccccaggaaggctcccggggggctggcgcgcaccaggctgggcaggggagccatataaatggccgagactatacaaggctaacttttcagtaagcaagcggccccacgtggaagctccaggaggcgggaccgctcggccacagcatggtgtagctcattaggagaccagaagcaactcagcttagtgactgtgggctgcctctcctcccagcctgggcctcagtttccctagctgtagaaaacggggtggagtcgtccactcggcgcccctggggagcgtacaaagggcagtaagtctcgggcccaagggtggtgagttacctcgaaacgggggtgtccctggactctcgcctgcgcccgggcccacgcggacaaggaagacggaggtccgcgcggcgaagccaaagaggcccccgggcacggcatcgctgcagcgggcgcagtaccagttgggggagggcggcagcgtccgcggctcctgccccataactacaagccgtcagagacaagagaagctgccacagccgaccgctcgtagcctcacgccttaggtagggagcggggcggggtgaactccgagccccgccttctcgggcagtcgctacggtgcgcgtcgaggcccagccagcaccgcgcgttgcgttcccgctaccgccgggctgggaagggcgggaccacgcgtgctgcactggccctcagtacctagcccgcggtaggaggtccgccccaaccctggctagggtcaggtgctgcctgagcacagccccgaggttaagcattctcacttcccacagaaaggcacaaaattagaggattagactagtggaaccaccgccccaggctaccagtttattatttggagctgttcaaccactatcccgtccaacgttttttgagcgctatgtgccagggcactttgctagttgtggaggtgttttaaagatatgcacaagaggccgggtgcggtggctcacgcctgtaatcccagcactttgggaggccgaggcgggaggatcacgaggtcaggagttaaaagaccggcctggtcagcatagtgaaacctcgtctctattaaaaaacaaaaataaaataaaataataaaataagccgggtgtggtggcaggcgcctgtaatcccagctgctcgggaggctgaggcaggagaatcgcttgaacccgggaggcggaagttgctgtgagcggagatcacgccactgcactctagcctggccacacagcgagactccatctcaaaaaaaaaaaaaaagtaaaatgcaacaatccctagacaacaaatactagggaggctgaggcaggagaatcgcttgaacctgggaggcggaagttgcagtgagcagagattgcgccactgcactccagcctgggcgacattgcgagactccatctcaaataaaaacaaaacaaaacaaaaaaagatatgcacaagaggccacttaacaaaaatattgttgtacctgagtgagttagagaaaacgccacactttgagacgaattaagagtccatttgtttagccggtggccaagagatggctaacgctcaaagttctctcagccggaagaagaggctagattttcttttatactttggtttagaaaggggaggggagtctagttaaaacaattttacagaaataaagtaggcaaaaagttaaaaggataaatggttacaggaaagtaaacagttccaggtgcaggggctttaagactatttattacaaggtgatagactgggggctttgggtgctatcaatcagacgaattcctgggaattgcggatattgctcgccacagtatcttatcagttaattgcatcttggatgtgctgggagtcagcttgcacaagttaagttcttgaggaaggggctgccagtgaaagagccaagatggagtctgtctggctctcttagctaagcaagagtcaattcaagtggaaacaaggctaggtgatcagaggaaaaagggagagtctaaaaacagggttagtaaaaacaaggttgggcattacaatatggagtccgggagacaggctggtgtgagctgtgatcgagccactgcactcaagcctgggcaatagagtgagaccctgtctcaaaaaaacaaaacaaacaaaaatatgaaagtacgaatctggaattaaaaagggaaagaacagtttctgcaactgggtggaaattctggctctgggttctgggtactcaaagatgaaggagaagcaaatggagtgactcttgatttgcttgattgagggccagctgtgtgaaggaagctgtatgtggtaaatggtgtggaagaaagtttcctttcaactcaaaaatgctaaaatgctcagattctgcactactcgtgtgttgcttgtttgcattgggtatctgacattcctgcataggtagcaaaccgcaatctgaactacctgttattctaatacagaggggtcaaatacatatatttgaaggcgtctaggggcacaaatttggaggcacctagtcgtagattgatcactggtttgccagttgttagttgagagactttaacatatcctaaatatgtttcc

SEQ ID NO: 317997 - DNA, 4001 bp, Homo sapiens
tacagacaacaaacaaaagtaacgaatacaatacatagtctctcccatgatgatagggtgctgtagagaagaatgaagcaggaaggaggaattgggacagttagaactgtaagtaaagagatcaaggaaggcctcattcaaacagtgacatttaagcaaagacctgaagtagatgagggaggaaattcgggggattgagggacggcggggaggggcgcattaaaggcaaagagattatataacgtactgtacctaaaatatacaaatgctagttactatttctggttttaaagagaatgatgagatcaccttagaaaatggagccttaaaaaactgcttcaaaggcggggctcggtggctcacgcctgtaattccagcactttgggaggccgaggcaggtggatcacctgaagtcaggagttcgaaaccagcccgaccaacatggtgaaaccccatctctactaaaaatacaaaaatattagctgggtgtggtggcgagcgcctataattccagctacttgggaggctgaacctggagaatcgcttgaacccgggaggcagaggttgcagtgagacgagatggcgcatttgcactccagcctgtgcgacaagattgaaactccgtctcaaaacaaaacaaaaactgcctcaaagccgggcgctgtggctcaagcctgtaatcccaacactttgggaggccgaggcgggtggatcgctcgtacccgggagttcgagaccagcctgggcaacacggtgaaacctcatctctacaaaaactacaaaaatcagccaggcttcgtggcgcgagcctgtagctcgctacttttgaggctgaggtcggaggatcgcttgatcccgggaggtcgaggctgcggtgagccgagctcgtgcccctgcactccagcctgggcgactgggcgagatgccgtctcaaaatacccataaaaacaaaaacaaaaacaaaatactgcctcaaatacaagcactaagaattaatgaaagtattcttttggtacagttctttttgttcatcaactgaatcacgctgcaagctgtgaagtaattaagggaacttctgcaactgtgcagtaaaagggtaaacctgatagtgtatttaagtagacgtactttctggtagttaattacttcttgacactagggggccactaaatacaagtccactcagcatttgattcggtgcaccaaaatgcctcagaaatttctggaatcagtcctgtacctccaaaaaaccagaatgttatcttcttcttttctaacagctgcaaagccccagtagttccatttttctgtacactaagttttcattcctcagtatccttcacaatcatgcacacattacacagagtgaccggaacaaagatgagtcgacttcgccgaatgatagagaaaaacttccatactgagcgaacaccgaggggagtccggaggccctgttgtcctcttccgtggctggctgtgtccgtcgcagcctgaaaggtcagcggtacccagcgctgtgacagggtcacaggcgcgcgatgtctcacagctcggagcagtactcacctggcattaggccgcgtgccgcaggccagctctcaccgctgggctcttgaagcaggaggcgcgagccgcgccaaagtctgcaacggcctcaagtctcgacgccagcctaggcaaaaggcaatgtatctaaacgaaaagaaaataggctttctccgctctaccgcctcgggcagccacacctccacacttccggcggtgtaccggccaaatgccgcctgccagcaacttccgtcctcctagctaaaagcggaaaacagaggctcggaaccgctgcgtggttcttgctcttcactcggccgttttaaagggtgactctttcctgtcccggcctgcgtggtgtgggcttgtgggtctttgagacccgaaaattgagagcgttttcgcactccagcggctgctcctggcggctctgcggccgtcaccatggtaaggaggatgcctcggacgctcgcgacacacagcgtctgagttagtgggacctgaggactctggggcgctggggtagggggtgagcggtggtaggcggaaatgagaactgccaagagaaaaggatggtagacccgtggggtgggctctgaggagtggaaacaacttcacattcgagacacagacggtatttgccagaacacaagctttggagcaagattttactctgtcctgttttcttttttctttttgatccaccgctaagagtcctaaaaattcctgatttcaccacaagcgtggttatcagccccagagcctaatgggaatatggttgtcccttgtacagtcttagatgtcagtcccgcccccttcattttactgctgaggaaactgaaggcgtccttgccaaagaccagacagctaatgaattgcgaagccgggcttaacggcccagatctaactgccaggtcctttctctttgtgttacgtctctataatctgcgtttctttgcaaaatggcattccatacacccttcatgtgattgctgcaaagtttatgtgatagcagttggtagcagcacaccttgttggttgttacttaacattgctctctgtgctggacttggctttgtatcatttttatttttgcagccttaaaatacgaatagactcacgcctggccgcgtgtttaaaacgtgtctaaaatgcaaaaagcatcccatacattgctggtgaaaagaaaaataatgcacttttggaaaacggtctggcagtaaacacacgtccacatgaagacttgcatgcagttgtttattgcagatttattcgtaatcacccaaaactgggaacaaccctgatacctatcatctggtcagcgggtaaacagtggtgtatccatacaatagcatactactcaacaataaaaaggattgaagttcctatacctgcagcaaattgggtgaatcccaaaagcaagaaaccagattcaaaaggctatgtactactgttgatccctgtttcattctgggaaaggcaaaactgtagggataggtatcaaactgagggttgggaaagaggattgacttaaaagttacatagggaattttagggggaaatggaaattctttgtattttgattgtggtggttacagaactgtgtagttaggaaaaacttagaactgtatacctaaaaaggacaggttttactgtgtgtaaattatgcttcaataaaactgacttaaattttttaaatgtgaaatgaaggtgttattaaaaaagcaaattatgtcaaggaaaaaagatactgtaatcagttcatcccttttgtggtccagtagattttggaccattccctaatgagattattagagatgtaagccctgatgcctcatatcattcaagaccaaaatttaacttacatcatgtgaataaacttaatggtgcaagaatcatttaagtaagtgaacatttggatgaaacagggtctttgtgctgtgtaaaagaaagcattttagaataattgtcagtactttaaaaaattaaaataatatttcttccatcattatagccacagaatgaatatattgaattacaccgtaaacgctatggataccgtttggattaccatgagaaaaagagaaagaaggaaagtcgagaggctcatgaacgttcaaagaaggcaaagaaaatgattggtctgaaggctaagctttaccataaacagcgtcatgctgagaaaatacaaatgaaaaagacgtaagtggtctcatttatttgtcataacaagttaacatcttttgagtaatcattattaaaacagataatcttgaatcttttttccttcttggtagtatcaagatgcatgaaaagagaaacaccaaacaaaagaatgatgaaaagacaccacagggagcagtacctgcctatctgctggacagagagggacaatctcgagctaaagtactttccaatatgattaaacagaaaagaaaagagaaggcggtaagcaa

SEQ ID NO: 317998 - DNA, 4001 bp, Homo sapiens
cgttagcaccaagttgaaactttctcctgatgttcttgaaaaggaaataactttcccatgcagggattccacgacttcctgctgagctgtgccctccccacttcccccaccctgcccccagccccaaatcagcaaatctgggaattctgagaaggcacctaagccagcacgcactctttgattctggctccgagtgggcacccccatggaccgcagccactcctgagccctgggtgtcctttggggacctcaagctccttctcacatacaaccacaagtcagtaccagaaaatctgaagatacaggtggtcacaccccaaagctcaacctttccctaggagacaacgcgtgtgtgtccctttaagaagcagaacaaaaacacttgtgattttgtgagctggaggaggtagagcccccccaaagctcagagagacttgggaaaaagcaagatgccagtaggaaggaggatgacaggcaggggtggcagtgggggcagaggagcatctgaaaggaaggggaaggggagcctctggtgctgtgggcagaccctcctggttcaagggtctcctgcacaagtctggccccaaggccaccagttttggccaagggtcttgaatgctacactgagaggtgtggaacatcagggcttggacatctggcaaaactaccacctttgcctcatctctgcccccagaaacacccaaaggtggctctacacatggagaatggcgtctgggagcacgagattttagctgagggttcaggaatttccacggatgcctgttcagcctgggtgaggcggcatcccgaagcacgctgcccgctccgccgtaggtcgttcccttctgccgagcagctggcctccgagacaagaggcctgcacagacctcggccagggctcaccgcgggcgcaccccaccccggccctcagcaaagtcagagagaggcctttcatggcttcgaaagttcctccaggtcctccagccacaggaggctggaatgggtaaccgaatcctactcaaggaaaaaaaaaaaaaaaaaaaagagcacagtgaccttttgtcccagcagaagttcccggctctctcccggccagcggaggcggcccagccaggagagtaaagaattgcagatgtgcgctccgggccgcggccgccctccccacggtcccgcagccacgcgggacagcgcgggagcgccgcgggaatcggacgcccggccccgctccccgccccggactccctctcgtggcttcgggccgaggttcgggcagtgactgcctcttccccgcgcaaagaggcggtaacgcggcagcgacccttctagggaccagacgttcctttggggtcgcgaggaggacgcgcaggccctgcctgaggcactgacgcagcgggggcgaccgggcgggctgcggggacggcggggcggggtcgcctctcctctcctcggtgggcgcggcgggctgagtcgggatgggcgccccgcactcgggatgcgccggcctgcgcgtggccgcctttgtgggcgactgggagacgtggaggagagcgacctcggtcggcatggggtggggacccctctgttacggggtccaggccggaccggaccaggtccctcccctccgtggggaccgggcctcggtccccctcactgtgtccgagaccaggagtcgggttgggcatcccccacccacacctccgagacggccactcggggaacgcgggtgaggggcagccaggcccggccgacgacagcccctcggtaggggcccggggcagatcggcgcccccagccaggtcctcggcgcctgcttgcgggcggaggcgcggagaggctgcggcgccgggacccgcggacggcgtggaggaggcggctcgggcgggcgcggcactcaccgcacatcgtggctgcttctcgggctccttcgcggctcgagggggtctgcccgttcggacgctggggctcctccgtgggctcctccgtgggctccgtgggctccgtgggctccgcgggctccagctcccgtccgctcggcctccagcccttataacccggagccctccgagagggcggggaagggggcggggaaggggcggggcttcccccgcccgcctgctcccattggcccccggttgtcgtgacaacgacgggacccggcccccaggagccagggaggggggccgaggggcggctcccaggcgcgggtcgggcgtgtaaggctggggcgccgggcgccagatcccggagcggggcttagggcaaccaacggcccgagttcagaccccgactcaaccagagtaggcgtggaagccgggcagggcccgatcgcgctgtgcctccgctttcccgtctgtgaaacggggctacccagggaagctccctcccacggggtgctgagaagtcagacgggccgcgtaaggggcagagcgaggggtccggcatcactcgcgcgctccggaaacccgcgtgagccgctgttcctgccgcgctcccatctgagtgacaggcttgtttcagagctccgcagacctctaagcctggccctcaccctgcgtggagagaacgcccgggcttggcggagagacgagaaaaccgaggctcccggaggcagacaaggactctgccaaaaccggacgccgcggcggtggcagaattcgaccctgggatttgccgcggagcccgagcttgaaggcgagggttccgcaggttgtgaacgaagctggaggcgccccaggaagccccgaccccacccgcgccgagctgccccctccccagatctgcctcgcgctgcaggcccgcgagggacccgggggttcctacgcctggggtcggaatccgaccccccagtgaggcaccaaggcccgcgtttctccgccctggttcccggccgtccctcccgttccccctgcactctgggcccctcgtctcccgaggaaggtcacgagaaccggcccaacgtttgcgcactttgaagtttttttttttcttaaaaaaatcctgaaattctaaacggatcctcctcagtcgtgtaaaaaaaaaaagatttttacatctcgtctagagcatttttctaacataatccctccctagtttcaccgcgactctgcaagccctgggggaaggaggttgtgccattggagggttgggaaaactgaggctccacgacagcgaaggagggggcttgggtgagtcctgttgttgggaaatctcagagcgattcaggagccgcagcgtttgcccccaaccctccactatgcagggtcgctttccttccttccttctctcattcctaagaacccacttcacacctgtcagggtgcaggtgcaagagacttattgatgaatgagaacagatctggccctgccctcctggcacttacaagtgaaggggaagcagacactaagctcgtggttacacagagagctaaaaattccaggtaggatacaaggagggggctgggccagcggtggagagggtgccaggctctgcctgggactgggcagggctgcgctggtgcaggtggtccagagcctagcgaagccaggaaggagggagcagcaggcagtgcaaaggtcccctggatgagggctagaacttgaatgtggagatcaggttgtttggcccagactggcctccactgttgtaactgaggcggggacagggtgatgtcaacaggccctctgatagcaccaagaccccaggagccctggggtcttagcagggtccaaatctgtcctttatcctcctggaggagtcacaggtccacggtgaggaacggcatgagtgcacactaccacccatggggatgtgtctgtagcagctgccggcctagcatcactcctgctttgagaaccctctgagagtcatctgggaggttgatggcctgggcctggccacacagcctgggcagtggttcagaggtcagcatatggcccaggctgggacgttgatgacctgctccagcacatgagggaaaccagcagaaaagatgaacttggcc

SEQ ID NO: 317999 - DNA, 4001 bp, Homo sapiens
tatgggaggttgaggctgcagtgaactggaatcacaccactgaactccagcctgggtgacagattgataccctgtctcaaaaaaaaaatcagatttcaaataaaactattaatttccaatttgtcttgaaaaatggaaacactcgggcccacatgtaacgggtggagtaatgactgcccccttttgacaagtcatgccttttccagcttgttatagtccataccactttctattacttgccccacctcctcatttatacagccactgccacgtctatttcatattgatttgttagcaacctggttttgtaactttgttttctgcttcttggctcatcagagaatgagtagctacagaatgggtcagatcaggctatgcctcagggcacaagatcctcatttgtttctcatcagtgaggcccacaacccaggtatccattttatagttggatgaacaaagaaaagtaatgtgcaccaggggatgtagcaagtcaagaccgagtcaaggctagaacccaggactccagcctcctatccacttcagaatgattttcagtacatgacaccacttccccatgaatcggaggtctcctatatgcttggctttagcaggccctgagcaatgatattttccacccccaaagccctctgttggtctgtgctcttgaagagcacttggctctacatggtacctcctagatgactgttttatggattttcaatgaggctacttaaccagatgtcattgctgtcaagtattactgtggaaaatagatctgtcaccaacactgcttcattaaaccatttaatgagaaaggtgtttaatgttttcccctgatcctgacatgcagccataacctttaggattagtgaaatttcctgggcagtcaaatcagactggtgatgtcttgctgccctgacttactgatgttggcaggtggacagaccagggtttttcctccttccttccatatctgtctcaaggcagcatttctacagcactgcgttgtggactgaggtctcagggcagtgtggtggtctctctgtctcaggagtccctccattcagtctctgggcaggagccgcataataagattccacacacccataccactcacgaaggccatgggccttccagggatctcggatcccaggctgttcttccttgggggagtggcctggttctaaaaccaggccttgaactacatctacaaaacatctattgtggattatttattatccaaggggcaagccactgtgctagacggcttgcaaggcctgctattgtagaaggttatgaaacaagtcagttttaacgaacttctttttcttcacctgtacctagtttcttcctcagtccttaaagcagatggaagagttaaagcccacgtggagcaaatgacactctgtttctgatctgattctccccgcctcttagagacgctgtcttggtagtgacctggctgtgggttgttctgtgactgtgtagacctacctcaaaagagggaagaggggggaaaaaggggcgaggaggagatgcttgggtggccaggccattgctggcactcagtctatctcagttcgtacactgtgttaggtgtgaccccagccccttgcaggcaccctgggcttcctgctccagttccccttgttcggctcggatgcaccgggaggctgctgcgccctctccggacaggtgccccgggcctcgcctacacctcacctccccctcccactgtacccccggccggtgcgcgctctgacactcaccggctgcgagaggcagcggcgacggcggcagcagcagcagcaacatcaggactacgggcggcagcggtcgcgggttcagggggcgcaccatggcgagctgtaggcgccgggctccgcgctcccctcgctcctcccctggagctctgagagcggggctccctcgaccggcacctcccgcccccgcctcccgccctccagcgcgacgcacacactctcccaccagggtcctgggcgccgccctccaactccgaagcgcgcgtccacaccacgcgcctccagcgctggtccgagggaccgcgggggtgggggcgggggagggccggcgccccgggagccgccgggcttggtgcggaagaggttgctctttccgaggcggcccacctgctgtctgacaagttcgactagcaagacattgtggaagctgccgctggaaactcgccatctaggagaaccaaatatttctccaagaaaagcaccctttctcactttctggatcccactcacccacacatcaaagaacagacaccaccacaaaagagattttgtaacaaaacttgaacaagccaacacaagggcacttgcatttctagtatttttcttagaatttgcacatctatgatctcgttttttcctctcctaagtgtcttctagggtaagattgggtggttattaagctcaagatgctgcaaagatgggtcgcagacaggtggaatggctttgctgggggagcagacctggggcattagattccaaaattcagccccgatggtgtcgtgagggaagatggaagattaaactctccactaaatagcagagatttccttggaccaaagctcactgaggaaggtgcctggagagaccatttaggagcccatccttttcacatgatgagactttcggagagcaagctactctatcaggattaaacaactaggtagaaacacatctgtgcccagaacacaggacgtctacccataaggataagggtatttattgggcctgggcctgattcccacaagatcccaggataaagccagaagcagaatggcttggaagaatgagaactaagcagcgcatagaaagagagaaggagaagagggtgatgaaaggaagtggagggtttcatcccctaaccctctaacttgaccccctccttacttccacagccagcctggcagagggccagcagggagtactgagaatcgcaatataaacctctgagatttattggctgctgcttctgaatatggccatcctgctgtggcctctggggggcatttgccgatgtaatcagcccagaaagagagtcattccagctgggggtgtaaatcacccttggcaaagctaggagagagacatgtggccctagataaggaaggagactgatgtggcctctgtgcccttccctcccttctcctgcccagggggtgctggttcctgagctgtaatgcactttaaatggagtttgtccttcgttttaatctatatctgccctgccagttttacagaagagctgtaaaagtgaacatctggctactcagcttttgtacaaggcctgttttcccccagctccaccctatctccatgtgcctttcccaagccctcctctccagaaaggtgagggaacatgaagctggggggctaccattaaaggccccatgatgtcaggccctctaccccattgccagagagaaatatgctccaggcacctcattttctctcacacctgctattacaggcagacaatcgttttttgggtttttttttttgaaactgacaatacttaagaaaggaatttataaagcaaaatgtaacaatttcaggctctttgggatgataggaaagggctgagacccatgaaccaacaaagatgtgaggtggtcaaggggtgtctcctctgccctccccctcctccagcccaagccaaatcatgttatgggcaggaagagggtttgggaaaggaagtttgctcagggtgcctactctgatagatactcagtgtctattccagggctgtccccacagaatagaccaagaatgcagtatcaagctgacgggctgggagcaatgaccaatcccacctgtaacaggccagccttttcatgagagaaaataaagtgtctggtgcatatttctgtctgggtacaggggtggagagcctcatatcattgggcctttaatgaggattggagaagctctgcaaataaatatgactccaagactaatattgac

SEQ ID NO: 318000 - DNA, 4001 bp, Homo sapiens
caaaaagtttataagggtggaagaagatgatgagagacgggacaacctctttaagctacacatgatgtcttccaaaggtctttaggccaaaacacatccttccagctccatccaaaggcccagaagggaagctgtagatagctgaagactccttgaaatctaatctggaaacactgagctttgcttttctcaaaaggaaaaagagctcccaatcactgaataaatagaatcaacaatcctgtctgctgcatcaattttgtttctatccagcattttaatttctggaaaggtttcaacatttatcatcagaaaaaagacacttctagggtgattcaggtggaaactagcctggaacaccagttgctcaggaaacagagcctgacctgccacaatatcccatgtctgcaagaaaagatgagtgtcttcccaggcacacacaccagggagcctgaatacctctgaaaccagccagtccctggactgtggacagcagcaccctgaaaatttcaaattcatagctccaacctgtgtctgtctccgaagttctgtactcacacatattacacatcccttagacctcccaaacgccctcccatgcagttctcctgagaactccccaaaacctcacttccagtcctcagccactcagggcaatgcgtttagttattttaaagcccttaatacttaatcctatgcagaaactactctgacttcccaacactttggccttccgttacctttctctgtcccttccaaggtctcctggcggcacaaacagacaggcggcacctctgtggcctcttccaccctgcacaccctactggctcaggcgccgacacgcctccccaggcgcacactcgcgcgcgcacacacagcgcacacgtacactcattcaggacacacagtccgcgccagaccgagagcccccgcagctcggtctcagcaggcatcccctcgggctatatataaagcactcgccccaaatagacttccccacgcactcgcaagtgccctgccccgcaccctctgcgccgccagcgccctctccctagacacgcggccaccccattgacccgcagcctctggcagttctgtcaaaactttaagcctggttgattttacaaccactagtgtgtcaaaagctgggggaggtcggctcgccacaatttccacttaccccagttcatgcggactggtggctgtcactctactgaccccagttccatcggtgccaacgtgcggctgcggcccgcacaaacgcgcaaaagaccgcgcgctctgcgcgctgtgtccacgcgcacagctcgacctccccagtctctccagtcgcgctgccggggattcttccccgcgcaacagcagcagcctcggcagttcctgccgcagccaggcagatgatggcaaacagaaacacactagcaaaacttttatgactttaacaaaactgtctccggagtaaacccctccacgtacactactcgcgggccagagcagacgccagagtgtgatggttcgtctgtcgcccgcaactccctgccgccctcaccaacttccagacacacacacacacacacacacacacacacacacacacacacacacactagattgggttacaacaacccaccagcagaaaacaacttcttcgcaaggaggaggggagcacagccaagtcatccggaataaaaaattatccgtgtaaatatataagacagatcctcccgttttcataaacaactagagtcccagggttcaccctcaggccccctggcacaacaggaggaaaataaagccagactcccggagccccactccagtacctccgagcttcgcctctgatcagagagcgcgggttcgcgtctgcgctggggccaatggtgccggggcctccggcccgcgtggccccagcccggggtccccgccgccgcccgggctcagcagcagccgccgccgccaccgccactgtagcagctgctgctgccgctgccgccgccgccgccgctccctagccctcctcctcttcccatggctgcgccctgcttggcagctcgcgggctgtcaggcttggggaggagagagggggcggggtgaaacgggaagggaggatgggagggcaggggtgggaaaaggcggccaccgttcaccaggggtcacgccgcgcctggcccgcagtcccccagatccaggttgcagaagcgaaggcgaagcggacgttcaaggaggccagttcgagaactgctgcggagaggccgagtgccgcccgggccaagcattccgagttgctgggatgaagtcttcccggcgaggagctggagttggtgcgtgtcactctcaactgagctgcgcggctcctcctagaggaaaatattggtagttgcaatacacttccttcctctccgcctgcccgttccaaatgaaagcaggacctacaagagcgttaagtgcagtccacagactcaaagaaacacttacaaaaaggttagctatctccaggaatgagaggaagatcagcgagataccttggaaagcgtgtttagccatccaaatattgcctttccatcaacaatcaagttccaaactcctgctcactggggcacagtgaaaagatagttaaaactacgaaggactttattgtggaggttagaagacggagacagagagaatgagtaatttaccaaggacactcagcatgttagcagagaggtatctgctagaggacagggatgcagggagagcagacacaggccccagcctgaagttcctgagccaggaaaagggttttaactctgcctcacgctggacatagctcatctgtcaaatgcgagccctgcctacttcattcacaagaagttgtaaaagtgttgcagaaagttaaagttgtgcataagcatgtcatttttgtacagcatcaaaccccaagtcactatatgcttttctgagtagagagtacaaaaatctagctccaggttgtctcagatctgaaggagtagctagtcatgcaatctttccactatttactgacggtcaattgtaatgtcacttacttataagcttctaacagctttggcttactaaagactttttttttttaacagagctcccagacacaaacccaagtttatacccagaaagaaatgtttaaacaacttaaaggaaccaagtttcttttctttagaataaaatatctatagggctttgaagtagtacacgggagccaagacttgagaaggaacagaggaccaaagactctgggatagcagatatcacataagatacccctattttcaaaggaatcagataagtgaaaaactgttccttagaatgctttcagaagctcagctgtggctcaaataccccagctgttccagacagacacctagaatgaacgaaaaaggaaagattctggaaggggcgtgttttatcatggggtgggatggttattgatcctgaactgctcttgttctatggcatctaaaaataaggaggcatttagttcccctaagactcttccccaaaccattgatttctggggcttcatactttgctggagcaatagtggtgcttggctgtgtctggagcttttaaaaggggaggtacccatatagagaaacttgggaaagtaaaagattagggcacagtcaagaaaaactcctgctgggtggtccatacctgccaagctggctgacagggtagtcctggcaggagtagagaccagacaggcctcaaatgctgactccacgcctgtctgaaatgaccttccaagttggaccttcttcagagcctggcactaccaacctctctgtttatatcctctctgtgccttctcatcctttgcccttcttccctgagctagagaatcttgatctagtttaggaggtgccagacggagtcataaaagatattctaaattctattgtttatgctctgagatgagctcagggccatacttaaaaaaataagaattgacttctttttttttttaaatctgggttcagcaatat

SEQ ID NO: 318001 - DNA, 4001 bp, Homo sapiens
gagaagtgtaatcttcaggttagcagatttaaaaaacataatccatgcttttttcactaagctaaacaatttactgtcccactttctcactacgtcactcacatttatctttacattaacattgctcaccaggagatagccaaagaaggctagccaagttggaccaactgcaagatttgtttccctgctgcaagatttgcttcatgcacttggaagaagcacgctgcaactgtggctccatttattatattatgctataaacattatgtcctgagctaacaagatactcaacatgacaatcccataggttaccaagcactgtaaacatctgtttaagcaggcgccagagatagcatacaggaggcctctagtatccattttaaagtggtttatgatgtggagtctgctgtttaaaaactaataataaaaaacatgggcccaaagcctggctaaaacaaatttttgtgagcacagttatgttcattttgaaaaaagaatgcactcatctcgtcactttgtcattgcatttatagactttcatttcacacctttgcccattaagtgttggctttccatgggcttcaggagaccataactataatttcactgtgatatatttactccaataaaaaaaagctaaatgttgacacaccaactttccttagattaatgcaaaacaaaaagtttataagggtggaagaagatgatgagagacgggacaacctctttaagctacacatgatgtcttccaaaggtctttaggccaaaacacatccttccagctccatccaaaggcccagaagggaagctgtagatagctgaagactccttgaaatctaatctggaaacactgagctttgcttttctcaaaaggaaaaagagctcccaatcactgaataaatagaatcaacaatcctgtctgctgcatcaattttgtttctatccagcattttaatttctggaaaggtttcaacatttatcatcagaaaaaagacacttctagggtgattcaggtggaaactagcctggaacaccagttgctcaggaaacagagcctgacctgccacaatatcccatgtctgcaagaaaagatgagtgtcttcccaggcacacacaccagggagcctgaatacctctgaaaccagccagtccctggactgtggacagcagcaccctgaaaatttcaaattcatagctccaacctgtgtctgtctccgaagttctgtactcacacatattacacatcccttagacctcccaaacgccctcccatgcagttctcctgagaactccccaaaacctcacttccagtcctcagccactcagggcaatgcgtttagttattttaaagcccttaatacttaatcctatgcagaaactactctgacttcccaacactttggccttccgttacctttctctgtcccttccaaggtctcctggcggcacaaacagacaggcggcacctctgtggcctcttccaccctgcacaccctactggctcaggcgccgacacgcctccccaggcgcacactcgcgcgcgcacacacagcgcacacgtacactcattcaggacacacagtccgcgccagaccgagagcccccgcagctcggtctcagcaggcatcccctcgggctatatataaagcactcgccccaaatagacttccccacgcactcgcaagtgccctgccccgcaccctctgcgccgccagcgccctctccctagacacgcggccaccccattgacccgcagcctctggcagttctgtcaaaactttaagcctggttgattttacaaccactagtgtgtcaaaagctgggggaggtcggctcgccacaatttccacttaccccagttcatgcggactggtggctgtcactctactgaccccagttccatcggtgccaacgtgcggctgcggcccgcacaaacgcgcaaaagaccgcgcgctctgcgcgctgtgtccacgcgcacagctcgacctccccagtctctccagtcgcgctgccggggattcttccccgcgcaacagcagcagcctcggcagttcctgccgcagccaggcagatgatggcaaacagaaacacactagcaaaacttttatgactttaacaaaactgtctccggagtaaacccctccacgtacactactcgcgggccagagcagacgccagagtgtgatggttcgtctgtcgcccgcaactccctgccgccctcaccaacttccagacacacacacacacacacacacacacacacacacacacacacacacactagattgggttacaacaacccaccagcagaaaacaacttcttcgcaaggaggaggggagcacagccaagtcatccggaataaaaaattatccgtgtaaatatataagacagatcctcccgttttcataaacaactagagtcccagggttcaccctcaggccccctggcacaacaggaggaaaataaagccagactcccggagccccactccagtacctccgagcttcgcctctgatcagagagcgcgggttcgcgtctgcgctggggccaatggtgccggggcctccggcccgcgtggccccagcccggggtccccgccgccgcccgggctcagcagcagccgccgccgccaccgccactgtagcagctgctgctgccgctgccgccgccgccgccgctccctagccctcctcctcttcccatggctgcgccctgcttggcagctcgcgggctgtcaggcttggggaggagagagggggcggggtgaaacgggaagggaggatgggagggcaggggtgggaaaaggcggccaccgttcaccaggggtcacgccgcgcctggcccgcagtcccccagatccaggttgcagaagcgaaggcgaagcggacgttcaaggaggccagttcgagaactgctgcggagaggccgagtgccgcccgggccaagcattccgagttgctgggatgaagtcttcccggcgaggagctggagttggtgcgtgtcactctcaactgagctgcgcggctcctcctagaggaaaatattggtagttgcaatacacttccttcctctccgcctgcccgttccaaatgaaagcaggacctacaagagcgttaagtgcagtccacagactcaaagaaacacttacaaaaaggttagctatctccaggaatgagaggaagatcagcgagataccttggaaagcgtgtttagccatccaaatattgcctttccatcaacaatcaagttccaaactcctgctcactggggcacagtgaaaagatagttaaaactacgaaggactttattgtggaggttagaagacggagacagagagaatgagtaatttaccaaggacactcagcatgttagcagagaggtatctgctagaggacagggatgcagggagagcagacacaggccccagcctgaagttcctgagccaggaaaagggttttaactctgcctcacgctggacatagctcatctgtcaaatgcgagccctgcctacttcattcacaagaagttgtaaaagtgttgcagaaagttaaagttgtgcataagcatgtcatttttgtacagcatcaaaccccaagtcactatatgcttttctgagtagagagtacaaaaatctagctccaggttgtctcagatctgaaggagtagctagtcatgcaatctttccactatttactgacggtcaattgtaatgtcacttacttataagcttctaacagctttggcttactaaagactttttttttttaacagagctcccagacacaaacccaagtttatacccagaaagaaatgtttaaacaacttaaaggaaccaagtttcttttctttagaataaaatatctatagggctttgaagtagtacacgggagccaagacttgagaaggaacagaggaccaaagactctgggatagcagatatcacataagatacccctattttcaaaggaatcagataagtgaaaaactgttccttagaatg

SEQ ID NO: 318002 - DNA, 4001 bp, Homo sapiens
gttgattcagtataagaactttctagaaatgaatctttcctagaatggactgaccaatgaaaaagggagatttccaactgattatttccaataagagatagactagaccattttcacagatagaggttcatgcaccagataattacctctaaagtaattatcatcttaagtaattcttttatgggacatattatttatattatctgtttcaggttgaaaaaaattacttgccagaaagacattctgtactgtcttgtttacacaattggctgagggatgactccagtcttaccaaacttcgattcttatcaattgaagattgaaaaggtgattaggagatttgaatgctcataatatttaaataattaccacagaaattatagggttctttttaaagaagaaaaagtattggcttgtatggacacacataaacacattaagaaatataagttattttcattactgacatactttttaaaaattgctctttaaaagcaaaccaaattcccatagttgtgcaatttgccagtggtacgacctgagaagtgtaatcttcaggttagcagatttaaaaaacataatccatgcttttttcactaagctaaacaatttactgtcccactttctcactacgtcactcacatttatctttacattaacattgctcaccaggagatagccaaagaaggctagccaagttggaccaactgcaagatttgtttccctgctgcaagatttgcttcatgcacttggaagaagcacgctgcaactgtggctccatttattatattatgctataaacattatgtcctgagctaacaagatactcaacatgacaatcccataggttaccaagcactgtaaacatctgtttaagcaggcgccagagatagcatacaggaggcctctagtatccattttaaagtggtttatgatgtggagtctgctgtttaaaaactaataataaaaaacatgggcccaaagcctggctaaaacaaatttttgtgagcacagttatgttcattttgaaaaaagaatgcactcatctcgtcactttgtcattgcatttatagactttcatttcacacctttgcccattaagtgttggctttccatgggcttcaggagaccataactataatttcactgtgatatatttactccaataaaaaaaagctaaatgttgacacaccaactttccttagattaatgcaaaacaaaaagtttataagggtggaagaagatgatgagagacgggacaacctctttaagctacacatgatgtcttccaaaggtctttaggccaaaacacatccttccagctccatccaaaggcccagaagggaagctgtagatagctgaagactccttgaaatctaatctggaaacactgagctttgcttttctcaaaaggaaaaagagctcccaatcactgaataaatagaatcaacaatcctgtctgctgcatcaattttgtttctatccagcattttaatttctggaaaggtttcaacatttatcatcagaaaaaagacacttctagggtgattcaggtggaaactagcctggaacaccagttgctcaggaaacagagcctgacctgccacaatatcccatgtctgcaagaaaagatgagtgtcttcccaggcacacacaccagggagcctgaatacctctgaaaccagccagtccctggactgtggacagcagcaccctgaaaatttcaaattcatagctccaacctgtgtctgtctccgaagttctgtactcacacatattacacatcccttagacctcccaaacgccctcccatgcagttctcctgagaactccccaaaacctcacttccagtcctcagccactcagggcaatgcgtttagttattttaaagcccttaatacttaatcctatgcagaaactactctgacttcccaacactttggccttccgttacctttctctgtcccttccaaggtctcctggcggcacaaacagacaggcggcacctctgtggcctcttccaccctgcacaccctactggctcaggcgccgacacgcctccccaggcgcacactcgcgcgcgcacacacagcgcacacgtacactcattcaggacacacagtccgcgccagaccgagagcccccgcagctcggtctcagcaggcatcccctcgggctatatataaagcactcgccccaaatagacttccccacgcactcgcaagtgccctgccccgcaccctctgcgccgccagcgccctctccctagacacgcggccaccccattgacccgcagcctctggcagttctgtcaaaactttaagcctggttgattttacaaccactagtgtgtcaaaagctgggggaggtcggctcgccacaatttccacttaccccagttcatgcggactggtggctgtcactctactgaccccagttccatcggtgccaacgtgcggctgcggcccgcacaaacgcgcaaaagaccgcgcgctctgcgcgctgtgtccacgcgcacagctcgacctccccagtctctccagtcgcgctgccggggattcttccccgcgcaacagcagcagcctcggcagttcctgccgcagccaggcagatgatggcaaacagaaacacactagcaaaacttttatgactttaacaaaactgtctccggagtaaacccctccacgtacactactcgcgggccagagcagacgccagagtgtgatggttcgtctgtcgcccgcaactccctgccgccctcaccaacttccagacacacacacacacacacacacacacacacacacacacacacacacactagattgggttacaacaacccaccagcagaaaacaacttcttcgcaaggaggaggggagcacagccaagtcatccggaataaaaaattatccgtgtaaatatataagacagatcctcccgttttcataaacaactagagtcccagggttcaccctcaggccccctggcacaacaggaggaaaataaagccagactcccggagccccactccagtacctccgagcttcgcctctgatcagagagcgcgggttcgcgtctgcgctggggccaatggtgccggggcctccggcccgcgtggccccagcccggggtccccgccgccgcccgggctcagcagcagccgccgccgccaccgccactgtagcagctgctgctgccgctgccgccgccgccgccgctccctagccctcctcctcttcccatggctgcgccctgcttggcagctcgcgggctgtcaggcttggggaggagagagggggcggggtgaaacgggaagggaggatgggagggcaggggtgggaaaaggcggccaccgttcaccaggggtcacgccgcgcctggcccgcagtcccccagatccaggttgcagaagcgaaggcgaagcggacgttcaaggaggccagttcgagaactgctgcggagaggccgagtgccgcccgggccaagcattccgagttgctgggatgaagtcttcccggcgaggagctggagttggtgcgtgtcactctcaactgagctgcgcggctcctcctagaggaaaatattggtagttgcaatacacttccttcctctccgcctgcccgttccaaatgaaagcaggacctacaagagcgttaagtgcagtccacagactcaaagaaacacttacaaaaaggttagctatctccaggaatgagaggaagatcagcgagataccttggaaagcgtgtttagccatccaaatattgcctttccatcaacaatcaagttccaaactcctgctcactggggcacagtgaaaagatagttaaaactacgaaggactttattgtggaggttagaagacggagacagagagaatgagtaatttaccaaggacactcagcatgttagcagagaggtatctgctagaggacagggatgcagggagagcagacacaggccccagcctgaagttcctgagccaggaaaagggttttaa

SEQ ID NO: 318003 - DNA, 4001 bp, Homo sapiens
tgcgggcacaaggtgacctggctctttggccttccccagctggctggtcgcttgcccaccctccctgaatgagggtgagttccactttctactttctttgaagcaatacaagagccctggagtaattaaagaaagaaatttactccaaactagccctgacatctggactaaattgggcctaaatttctgaaaataatcctcgttagaatcttgcaaaaatgtattcttcacactgacaccacagtgattttcttaaactgccaatttatagcctctgtttcaaaccccccagtacttttagagaggtacatccagccatgtgtgatctgatgtggcctcttcctaccttatcttccaccatttccacaaacctcccctttcttccgtccacaaaggaatcttctcagaaggttctgggctattcacacctctggccctgctgcctcctatactcttctcacttaatccatctttgctactcattcccctaaacctcagctcaaggacatttcaacttagaaacaccttagcaacaaccccactcccaagtgaagtcaggtgcctctcctctctacttctatcacagccttaataaacccttattacagcactataaggaatcagtgatattgtcatctctctcctgtggctcatctttatattgcccactacctagcacaaccagttttaaacaaattgttgaagacatgaataaaggcccatggacacggttttcaaagaggtgtttggaagaggtgggagaatgtccttctgttgaaagctcatgtgaatactttccattgagatagaataagtggtggttcccatcacatcaggcattatgggatgggttttaatcaggcatgcagtaagaaacccaaagcatcagagttaatctgaaaagaggtatagcaagaagcagaaggagacaaagccctatttctctttccttcaaagtactgaccatctctcagactaaagatgcaaaataaacatgcaattgtggtatcacttctctttacaatacttttcttaatgtaaactgttgaaatgtaacacatggaacagaattaaaacccttaagtatttcctgagtgcaaattactatctctgttgactttctcaaaatgtatctgctctctaaatgctcagaaaactagtccttccttcagagaacaacctttgaaaaccaaaattatatcttgatggtgaccagacaaggaggaaggcagccaaaggctttctttgcctaaaagaatactttataaactccagcacagaaaaaaagaagtttcgcttagagtagaaaggaaaagggcagagaagtaaggggaagagagaacaatgagaaattaacccagaagagggaagaacgaagtgggaggagaaaggaaaacatctggccacagccatatattaaagatttatatctaaaaaatgcaaaagtaagaaaaaaaaaaccctgactatcagccttttaatcaaacaataagtaacagtaagggaatactaaccaatagtccggcagatattgctgaaatagaggctggattttcgtattgtttcctccaggctttatatcaagaactttttaaatttcctttttctttcactcatatatgcaagcagatcacatcacactgatttggttaaaatctgacagagagggaggggttggaggtgggatcccacagaagtttcttggttaccacttggcatgtattaatctctaaattcttggtctttctgctttgatatataaaccttcacaaaatccctcccaaatcagtcattctcaatctctctctctcatgcacacacacacatatctggtaccagaggagtaaattaaatcacatcagaccattgtctcatataataaatcccctgacctttgcccagtacatctctgggctctgcctgctgaactgaaggccaggcctaggctggagtctcatgaggcctattacaatggaggcagccaaatcagctgagaagagggctaagcgttagaactcagcaaaggctctgatctggatgggtagaaagcagtgatagggtatctgaatctggtcctttcccttctctaaggagtataagaacaaaggcagaagtgaccatttgtggtactcactgctacctcattaaagtaccccaaatgcccagaagatagcacattgtacatcttgtaaatgaagaaattaatgagtaaatgaattctaaaatttcattgctcattagaaatcctagcatacttagtttcattggaaacatttaaccatttgtcagcagtataaagtagtttacagaaaacccctagaaaactgaaattcctgcatcttaatttagtcccctcatctcatcccttcaaagtcctaatcaactaagtatattttggtcaattgggcagaagaacacagcatttagaaaacgtagtttagggtttttctgattaccttctagtagagggaaatagatctcctttagaaagggctcacaagtcaactaaaaggtataaaatactaaacatttagtgaattacatactcgggtgacataaaaaaaaaaccagctttctagctctggagctttgccataattcttgtagctgctcacacagttagaacaatcatgaccattcccatcattgagtgtggagtgagttgctgtacacacaagactgtgtgactcattttcctgtgtgtgaccaacagtcctgtccacactattaacacaagaagaccgttcatgatttatgactgcttcaagaattagctgggcctttagctggttacaagactccttctgcctggcttgctttcccatgtttatatgcaataaaccatactgtgacatgtaatacatacaaaccctttaagatgagaaacacttagaggggaaaattcattttaatagtttagttgacaatgactagatttgagaattttgctgattgtgaattgtggctaatatgttttgaaatcttattttgaatgtgtagaaaccacctatctgacaaatacctctaaatcacgtttctaaaactaaactcagtggtccataaacacctgatccccagaatttgcagtataaatcagaaacctaggagttatctggatgtcttttcttcctcctctgcccctgtttcatcttttgatgttatctcttctgtatcttttgagtccattccatccccctttatcctcactactgttactagccaccatttcccacttgggtttgagaatggcctcttaacactcagacaaattctctccaatccatttatctcactttctctttcagtctctctctctcacacacaaatatgctttgaaacataattatcatcatggcatccttctgcataaaacatttaaatgaccttcctagcacatggaattaataccacaatccatgacttggactaactaatatttactagttatccccaactttcactcttcccattttcagttagtaatagaacccagtgaaaggcatttctcagccaaccttgcagctaactgtggtcacatgactatgttctggcaagcaggacctgaatggaagtggcatatgcatccttcagggcaatgagcatcccctacacttcccctcctcaccctgctggcttggatgctgatgggctggaccactgaacacatggatgagggctatctagacttgtggaacatgtctgagactcactatgatgttggatcccagacaatgaggggttataaaaagacaaagggccaactagtcagtggtttggtgaccagccagcctagatccttctagttcatccttgaaagagaaagattttttcacctcatttttcaggctcaatcgaaagagtaatgggaaaaagtaatcacacaacacttgagtgaaaacataagctgagattttattcttgataccataaagaaaaggaaatatacctgaacacatggcattctgatatggctttttcatgagctttagaagatactgctc

SEQ ID NO: 318004 - DNA, 4001 bp, Homo sapiens
ctgtccccagtccaatgggctttttcagtattccttgttgtcttcagcctgccactattttcaagaagcacttcaagtagcaagaagacacacttaccccaggctcatacgtgctgtcatagctaatatcattgatcatcaggcagacaatacaaacaaatcataacaagtgcgggcacaaggtgacctggctctttggccttccccagctggctggtcgcttgcccaccctccctgaatgagggtgagttccactttctactttctttgaagcaatacaagagccctggagtaattaaagaaagaaatttactccaaactagccctgacatctggactaaattgggcctaaatttctgaaaataatcctcgttagaatcttgcaaaaatgtattcttcacactgacaccacagtgattttcttaaactgccaatttatagcctctgtttcaaaccccccagtacttttagagaggtacatccagccatgtgtgatctgatgtggcctcttcctaccttatcttccaccatttccacaaacctcccctttcttccgtccacaaaggaatcttctcagaaggttctgggctattcacacctctggccctgctgcctcctatactcttctcacttaatccatctttgctactcattcccctaaacctcagctcaaggacatttcaacttagaaacaccttagcaacaaccccactcccaagtgaagtcaggtgcctctcctctctacttctatcacagccttaataaacccttattacagcactataaggaatcagtgatattgtcatctctctcctgtggctcatctttatattgcccactacctagcacaaccagttttaaacaaattgttgaagacatgaataaaggcccatggacacggttttcaaagaggtgtttggaagaggtgggagaatgtccttctgttgaaagctcatgtgaatactttccattgagatagaataagtggtggttcccatcacatcaggcattatgggatgggttttaatcaggcatgcagtaagaaacccaaagcatcagagttaatctgaaaagaggtatagcaagaagcagaaggagacaaagccctatttctctttccttcaaagtactgaccatctctcagactaaagatgcaaaataaacatgcaattgtggtatcacttctctttacaatacttttcttaatgtaaactgttgaaatgtaacacatggaacagaattaaaacccttaagtatttcctgagtgcaaattactatctctgttgactttctcaaaatgtatctgctctctaaatgctcagaaaactagtccttccttcagagaacaacctttgaaaaccaaaattatatcttgatggtgaccagacaaggaggaaggcagccaaaggctttctttgcctaaaagaatactttataaactccagcacagaaaaaaagaagtttcgcttagagtagaaaggaaaagggcagagaagtaaggggaagagagaacaatgagaaattaacccagaagagggaagaacgaagtgggaggagaaaggaaaacatctggccacagccatatattaaagatttatatctaaaaaatgcaaaagtaagaaaaaaaaaaccctgactatcagccttttaatcaaacaataagtaacagtaagggaatactaaccaatagtccggcagatattgctgaaatagaggctggattttcgtattgtttcctccaggctttatatcaagaactttttaaatttcctttttctttcactcatatatgcaagcagatcacatcacactgatttggttaaaatctgacagagagggaggggttggaggtgggatcccacagaagtttcttggttaccacttggcatgtattaatctctaaattcttggtctttctgctttgatatataaaccttcacaaaatccctcccaaatcagtcattctcaatctctctctctcatgcacacacacacatatctggtaccagaggagtaaattaaatcacatcagaccattgtctcatataataaatcccctgacctttgcccagtacatctctgggctctgcctgctgaactgaaggccaggcctaggctggagtctcatgaggcctattacaatggaggcagccaaatcagctgagaagagggctaagcgttagaactcagcaaaggctctgatctggatgggtagaaagcagtgatagggtatctgaatctggtcctttcccttctctaaggagtataagaacaaaggcagaagtgaccatttgtggtactcactgctacctcattaaagtaccccaaatgcccagaagatagcacattgtacatcttgtaaatgaagaaattaatgagtaaatgaattctaaaatttcattgctcattagaaatcctagcatacttagtttcattggaaacatttaaccatttgtcagcagtataaagtagtttacagaaaacccctagaaaactgaaattcctgcatcttaatttagtcccctcatctcatcccttcaaagtcctaatcaactaagtatattttggtcaattgggcagaagaacacagcatttagaaaacgtagtttagggtttttctgattaccttctagtagagggaaatagatctcctttagaaagggctcacaagtcaactaaaaggtataaaatactaaacatttagtgaattacatactcgggtgacataaaaaaaaaaccagctttctagctctggagctttgccataattcttgtagctgctcacacagttagaacaatcatgaccattcccatcattgagtgtggagtgagttgctgtacacacaagactgtgtgactcattttcctgtgtgtgaccaacagtcctgtccacactattaacacaagaagaccgttcatgatttatgactgcttcaagaattagctgggcctttagctggttacaagactccttctgcctggcttgctttcccatgtttatatgcaataaaccatactgtgacatgtaatacatacaaaccctttaagatgagaaacacttagaggggaaaattcattttaatagtttagttgacaatgactagatttgagaattttgctgattgtgaattgtggctaatatgttttgaaatcttattttgaatgtgtagaaaccacctatctgacaaatacctctaaatcacgtttctaaaactaaactcagtggtccataaacacctgatccccagaatttgcagtataaatcagaaacctaggagttatctggatgtcttttcttcctcctctgcccctgtttcatcttttgatgttatctcttctgtatcttttgagtccattccatccccctttatcctcactactgttactagccaccatttcccacttgggtttgagaatggcctcttaacactcagacaaattctctccaatccatttatctcactttctctttcagtctctctctctcacacacaaatatgctttgaaacataattatcatcatggcatccttctgcataaaacatttaaatgaccttcctagcacatggaattaataccacaatccatgacttggactaactaatatttactagttatccccaactttcactcttcccattttcagttagtaatagaacccagtgaaaggcatttctcagccaaccttgcagctaactgtggtcacatgactatgttctggcaagcaggacctgaatggaagtggcatatgcatccttcagggcaatgagcatcccctacacttcccctcctcaccctgctggcttggatgctgatgggctggaccactgaacacatggatgagggctatctagacttgtggaacatgtctgagactcactatgatgttggatcccagacaatgaggggttataaaaagacaaagggccaactagtcagtggtttggtgaccagccagcctagatccttctagttcatccttgaaagagaaagattttttc

SEQ ID NO: 318005 - DNA, 4001 bp, Homo sapiens
gggaggattctacctctgcattctccctggaacgtagtaccttctcctagagtcttagtctcctaccttctcttttctccagactttcaacagccttcttcatggtcaagtttcctttactttcaaggctactgttagacaaatcaggactctacctacccttcaaagtcacgttcaaatatcaccacgtccatgaagccttccagactccccaccgcaacttagctgttaactcctctgtgcctacattgtttttttttaacctttactataaaacattccacaatatccaagtcacaagatgataaatccctgtgggtgtaacagatgagctcttggtgcctgtgttgctgtttgtaaacttctaagggcaagacacaggcctactgcatcaacttataatccccactctgctctcaatcaccaaagcatgggctgtatttgataaatgagcagaaacatgtgacatgtatgcgtgcgggaggggatctgtcagtggatataatgtcagccagaggcactagaggttctctttccacctcaggaacatccagaccaccatctacttgtcatttctggatttttagaagttagttccggtaaaagagaaaagagagggctagaagttgagcctcaggctttgggcagcagaacataacctgagggtgccgggtgttggtgcaagagaatttcagaaaggtatggaaggtcccaacgacatcaaaattctgcctgggctccacctgaacagctgctatgccaaataaacactaaacacgtgcccctttgtcaggtggcagaactcggcttcccacagtccagcttcccccatcggtggctaccctcagtctcctcagcatccccattcaaactcctctctacttttgaaagacaaacaggcagaaaaattcaagaggataaaaaggaaaaaacagagagattgagatgtgtgaagtggttctgcttcccttttgccatcagttcaggacagaacaccaatcacaatttttttccttagaaaattattttccatgttcactagattagattccttaagacacaactgtacttctggctgacattaacttaagataaatgggctttcctatttctctatgaatcagaatgtctagaagcctagggttagtagtgatggggcccaggggaaccttggggaggcaggatcacaatgacagaagccagaggctgaacatggccccgagaacagtgttagtctaaaggttgcattttacaaatggggtaagttaagcccagagaggtgaagtaatgtgtctaagcccccggagctggtgccggccaagctgggagcagcaccaggtctcctgtccccagtccaatgggctttttcagtattccttgttgtcttcagcctgccactattttcaagaagcacttcaagtagcaagaagacacacttaccccaggctcatacgtgctgtcatagctaatatcattgatcatcaggcagacaatacaaacaaatcataacaagtgcgggcacaaggtgacctggctctttggccttccccagctggctggtcgcttgcccaccctccctgaatgagggtgagttccactttctactttctttgaagcaatacaagagccctggagtaattaaagaaagaaatttactccaaactagccctgacatctggactaaattgggcctaaatttctgaaaataatcctcgttagaatcttgcaaaaatgtattcttcacactgacaccacagtgattttcttaaactgccaatttatagcctctgtttcaaaccccccagtacttttagagaggtacatccagccatgtgtgatctgatgtggcctcttcctaccttatcttccaccatttccacaaacctcccctttcttccgtccacaaaggaatcttctcagaaggttctgggctattcacacctctggccctgctgcctcctatactcttctcacttaatccatctttgctactcattcccctaaacctcagctcaaggacatttcaacttagaaacaccttagcaacaaccccactcccaagtgaagtcaggtgcctctcctctctacttctatcacagccttaataaacccttattacagcactataaggaatcagtgatattgtcatctctctcctgtggctcatctttatattgcccactacctagcacaaccagttttaaacaaattgttgaagacatgaataaaggcccatggacacggttttcaaagaggtgtttggaagaggtgggagaatgtccttctgttgaaagctcatgtgaatactttccattgagatagaataagtggtggttcccatcacatcaggcattatgggatgggttttaatcaggcatgcagtaagaaacccaaagcatcagagttaatctgaaaagaggtatagcaagaagcagaaggagacaaagccctatttctctttccttcaaagtactgaccatctctcagactaaagatgcaaaataaacatgcaattgtggtatcacttctctttacaatacttttcttaatgtaaactgttgaaatgtaacacatggaacagaattaaaacccttaagtatttcctgagtgcaaattactatctctgttgactttctcaaaatgtatctgctctctaaatgctcagaaaactagtccttccttcagagaacaacctttgaaaaccaaaattatatcttgatggtgaccagacaaggaggaaggcagccaaaggctttctttgcctaaaagaatactttataaactccagcacagaaaaaaagaagtttcgcttagagtagaaaggaaaagggcagagaagtaaggggaagagagaacaatgagaaattaacccagaagagggaagaacgaagtgggaggagaaaggaaaacatctggccacagccatatattaaagatttatatctaaaaaatgcaaaagtaagaaaaaaaaaaccctgactatcagccttttaatcaaacaataagtaacagtaagggaatactaaccaatagtccggcagatattgctgaaatagaggctggattttcgtattgtttcctccaggctttatatcaagaactttttaaatttcctttttctttcactcatatatgcaagcagatcacatcacactgatttggttaaaatctgacagagagggaggggttggaggtgggatcccacagaagtttcttggttaccacttggcatgtattaatctctaaattcttggtctttctgctttgatatataaaccttcacaaaatccctcccaaatcagtcattctcaatctctctctctcatgcacacacacacatatctggtaccagaggagtaaattaaatcacatcagaccattgtctcatataataaatcccctgacctttgcccagtacatctctgggctctgcctgctgaactgaaggccaggcctaggctggagtctcatgaggcctattacaatggaggcagccaaatcagctgagaagagggctaagcgttagaactcagcaaaggctctgatctggatgggtagaaagcagtgatagggtatctgaatctggtcctttcccttctctaaggagtataagaacaaaggcagaagtgaccatttgtggtactcactgctacctcattaaagtaccccaaatgcccagaagatagcacattgtacatcttgtaaatgaagaaattaatgagtaaatgaattctaaaatttcattgctcattagaaatcctagcatacttagtttcattggaaacatttaaccatttgtcagcagtataaagtagtttacagaaaacccctagaaaactgaaattcctgcatcttaatttagtcccctcatctcatcccttcaaagtcctaatcaactaagtatattttggtcaattgggcagaagaacacagcatttagaaaacgtagtttagggtttttctgattaccttctagtagagggaaatagatctcctttaga

SEQ ID NO: 318006 - DNA, 4001 bp, Homo sapiens
aatcagaagcctgagccactattgattcagagagactgtccacctaccaggaagccaaagggacagacacataaactttatgttacagtctacttaagtgaaatcagttttcacatcttgtaaaacagtaccaaaccattcatgctcccctcattggaaagctatatgaataacattttaacttttcaaccacttgtgatcatgttaccagttaaaactttactctcaaatgaggaagaaaacttatagaaaatcctagggggcagtttacatggagcatcatcatcaaaatgctaaagaaccaaaggacatgtgcttcagacatagggaaataatacacctggatgtccacaggtacctaaaataacctctgtctaaaataaagtcagcatttcctacctgcttctgatccctacattatgagcatgcagattcatttcttctatttcttattttgcttaatgagatcagggttcacccagttggttactccatcccttctcacatttaacttgtcaccatgagggaggattctacctctgcattctccctggaacgtagtaccttctcctagagtcttagtctcctaccttctcttttctccagactttcaacagccttcttcatggtcaagtttcctttactttcaaggctactgttagacaaatcaggactctacctacccttcaaagtcacgttcaaatatcaccacgtccatgaagccttccagactccccaccgcaacttagctgttaactcctctgtgcctacattgtttttttttaacctttactataaaacattccacaatatccaagtcacaagatgataaatccctgtgggtgtaacagatgagctcttggtgcctgtgttgctgtttgtaaacttctaagggcaagacacaggcctactgcatcaacttataatccccactctgctctcaatcaccaaagcatgggctgtatttgataaatgagcagaaacatgtgacatgtatgcgtgcgggaggggatctgtcagtggatataatgtcagccagaggcactagaggttctctttccacctcaggaacatccagaccaccatctacttgtcatttctggatttttagaagttagttccggtaaaagagaaaagagagggctagaagttgagcctcaggctttgggcagcagaacataacctgagggtgccgggtgttggtgcaagagaatttcagaaaggtatggaaggtcccaacgacatcaaaattctgcctgggctccacctgaacagctgctatgccaaataaacactaaacacgtgcccctttgtcaggtggcagaactcggcttcccacagtccagcttcccccatcggtggctaccctcagtctcctcagcatccccattcaaactcctctctacttttgaaagacaaacaggcagaaaaattcaagaggataaaaaggaaaaaacagagagattgagatgtgtgaagtggttctgcttcccttttgccatcagttcaggacagaacaccaatcacaatttttttccttagaaaattattttccatgttcactagattagattccttaagacacaactgtacttctggctgacattaacttaagataaatgggctttcctatttctctatgaatcagaatgtctagaagcctagggttagtagtgatggggcccaggggaaccttggggaggcaggatcacaatgacagaagccagaggctgaacatggccccgagaacagtgttagtctaaaggttgcattttacaaatggggtaagttaagcccagagaggtgaagtaatgtgtctaagcccccggagctggtgccggccaagctgggagcagcaccaggtctcctgtccccagtccaatgggctttttcagtattccttgttgtcttcagcctgccactattttcaagaagcacttcaagtagcaagaagacacacttaccccaggctcatacgtgctgtcatagctaatatcattgatcatcaggcagacaatacaaacaaatcataacaagtgcgggcacaaggtgacctggctctttggccttccccagctggctggtcgcttgcccaccctccctgaatgagggtgagttccactttctactttctttgaagcaatacaagagccctggagtaattaaagaaagaaatttactccaaactagccctgacatctggactaaattgggcctaaatttctgaaaataatcctcgttagaatcttgcaaaaatgtattcttcacactgacaccacagtgattttcttaaactgccaatttatagcctctgtttcaaaccccccagtacttttagagaggtacatccagccatgtgtgatctgatgtggcctcttcctaccttatcttccaccatttccacaaacctcccctttcttccgtccacaaaggaatcttctcagaaggttctgggctattcacacctctggccctgctgcctcctatactcttctcacttaatccatctttgctactcattcccctaaacctcagctcaaggacatttcaacttagaaacaccttagcaacaaccccactcccaagtgaagtcaggtgcctctcctctctacttctatcacagccttaataaacccttattacagcactataaggaatcagtgatattgtcatctctctcctgtggctcatctttatattgcccactacctagcacaaccagttttaaacaaattgttgaagacatgaataaaggcccatggacacggttttcaaagaggtgtttggaagaggtgggagaatgtccttctgttgaaagctcatgtgaatactttccattgagatagaataagtggtggttcccatcacatcaggcattatgggatgggttttaatcaggcatgcagtaagaaacccaaagcatcagagttaatctgaaaagaggtatagcaagaagcagaaggagacaaagccctatttctctttccttcaaagtactgaccatctctcagactaaagatgcaaaataaacatgcaattgtggtatcacttctctttacaatacttttcttaatgtaaactgttgaaatgtaacacatggaacagaattaaaacccttaagtatttcctgagtgcaaattactatctctgttgactttctcaaaatgtatctgctctctaaatgctcagaaaactagtccttccttcagagaacaacctttgaaaaccaaaattatatcttgatggtgaccagacaaggaggaaggcagccaaaggctttctttgcctaaaagaatactttataaactccagcacagaaaaaaagaagtttcgcttagagtagaaaggaaaagggcagagaagtaaggggaagagagaacaatgagaaattaacccagaagagggaagaacgaagtgggaggagaaaggaaaacatctggccacagccatatattaaagatttatatctaaaaaatgcaaaagtaagaaaaaaaaaaccctgactatcagccttttaatcaaacaataagtaacagtaagggaatactaaccaatagtccggcagatattgctgaaatagaggctggattttcgtattgtttcctccaggctttatatcaagaactttttaaatttcctttttctttcactcatatatgcaagcagatcacatcacactgatttggttaaaatctgacagagagggaggggttggaggtgggatcccacagaagtttcttggttaccacttggcatgtattaatctctaaattcttggtctttctgctttgatatataaaccttcacaaaatccctcccaaatcagtcattctcaatctctctctctcatgcacacacacacatatctggtaccagaggagtaaattaaatcacatcagaccattgtctcatataataaatcccctgacctttgcccagtacatctctgggctctgcctgctgaactgaaggccaggcctaggctggagtctcatgaggcc

SEQ ID NO: 318007 - DNA, 4001 bp, Homo sapiens
taaaaagaaaaacaaaaagcaaacattaaaagcaactagtgatgttttctcttcactcaggaactcaaagttttagtaaaatgtcgaagcagctgaaacagatgctccttgcagactttctagttctaaaatgtaatttgagctctaatctctcagctggggatgcatttttaattttctttaaagatttcctatgccatacttttcatttcacaagttttttaaattcctcaaatcttgcccagtggagtgaaagtcaccttaatgaagaaacgagagattaagccaccatgactttggaacagcagaggatctcagctgcaattctttggctcagaaccaaggtctaaaaccagccatgggaaaagctgctgaaatggagcctgcaattctctccatgtttgacttgcataatgttgacattataacgccagagagaccaaaaaatatttccaacaattatgactcttttctataaatatttttaaattgctttaagagataaaataacatattttactcttctcattttctaagtgactgtggtcaccctcagcagctcactactacggatttatttttggctagaaggtcagggaggacatcttaaggcgctaagtctgctgttaaactgtgttttccaacatgagctgaatggtgagaaggggagtctgacactcttaaagcaacaactaaattcagtgtcatagcatgggagaaatatattctttctttcttctgtagaagcccaggcaaggaaaaacatcaagtactcattaaaaaaaaaaaagtctcccacccgttagagagcacagttttctttctgacagaaaagttcctcttccctttcccttctattactcttccttgttttagttaggtctgctatgaaacatagtttaaacatattgagacttctctacaaggagagggatataaaaaagggagggagaattatagagatggggaaggaagctcataatttctgggtatatcattcaactatttcaggtgtctctttcctcaacttagccaaatggtaatcacccagagagtgagaagtgaaattcatttgaaacctgcaatttcttttctctgagaatatgattaacaagcctgaattctgagctctggaaatagattagatatccttagtcacagatgagctgagtgaacagtaagctaataacccttcagtgtaatttcaatatctctcccaaagcctgagaacaagagacctggcttgtcttcaacataaatgtcctcagcatgatttgtagtattaatttttgatatgaaaacatcagatgccaaagttgactgactactgcattcctcctaaacatccacagaaaagtcctactagtttctgattttaaagctaagtcaagtttcctttttgctgctatgtaaaacttgcatcttttaataaaatcatccaaaaaacttggatgtagcgaatacagttcagtgttgtttcaaaacactgagggtggaaatggaaaagcagaactcaccctcacttccagaaaaagcatcacttgatcctgccagtgccaaggtcaacagcagctgccagagatccatacctgtaggacctgcaatcacaaaaagggtaaggtaaagcccagcaattaaaagcagaccattatcatgaaatactgtttaaagactgggtaagacatgaatgagctgacgagtcagttccagaaggaatcctggtaagtctttcactgccccagagtctcatattgtcctacttttcatgaactcaaacagcaggttgtaataaattctacttcccgtgagtgctagtctcaggaaataacatgaacactagagatgttcataccctggctcaaagccatagaaacacctcacagcaaacgacccccatgcacagcttcagtaacagggccagtaaggtttgctttaatttgatctggaaatagaaaaccttatcagcagtatcagaaagcatggggccttgagctggacaggccataaaaggaaaaacataacaatcatggtaatagtaacatttcataaatctgtttcccagtgaacaaaagagctcaaaccactcaaaacgagttgctaatgagccatcctaaagaggtttaactagaagggaagcagaaagaaggagggaagcaaaaggaaacaaaaactccctagtaaaactaaaaacccacaaggacacagtgtgtcgtagagaggttttattttcatgaggaatacagatctgaaagacccaggaatgtgaacacctcagacaccaagagggatgcgtctgtggctttgctagccatttagaagcccagtgtggccacacctggagcccttcagtctaacggagagagtagatcaacacttctgtcagcacaacacctcagtgaccatacacctttatctggaggaaggaaataagcttttctagaaaaaatataccagggtgtccacatcccggatcttctgaggcaagtttgggctggttgaaaatgaactcagcgtattgccttttgtagagctgttgctgtgtctgacaactaatgccaactactttaaagcttagctgcaacatttccataaaattgcactatttacaagttactcagagacttatcatcataccaggagctccacgagatcctctactggcttcatttttattactgtgcaaacctgacctaatggaatagcccttcatggtatccctaatcaggctgaaataatgagcaaagatgtttttttccatgggcctacagatgtggcccccggcaatggctgtgtaattctacatagggataaaattcttgacgtactttaatttctagacagcagaggacctatcttttttgttccatataattttgtattcttaaaaatttctttaaaaaagcacatctctatgtaaactaaattgtcttcttgtatctgaatccccatgtgcaaatccacatgcatgaggaactctccttcatacactacttcatggagtcgttcataggattgagtgtaaacatgcagatgaacacactttgtgagatttcacgtgagaaacatgcagatgaacacactttgtgagatttcaaataaatctcacacattgtgagatttcaaataaatctcacacattgtgagatttcaaataaatctcacactttgtgagatttcaaataaatctcacactttgtgagatttcaaataaatctcacactttgtgagatttcaaataaatctcacactttgtgagatttcaaataaatctcacacattgtgagatttcaaataaatctcacactttgtgagatttcaaataaatctcacactttgtgagatttcaaataaatctcacactttgtgagatttcaaataaatatgagttgtggtttttacaacattcatgtttttaattcctaacctggaaggccttgagctgatggcctttcatcatcctcgtctactttgcaaatgagaaccactgagcatctctccctcccaatgtcctttactcctaggtgaacaggctatgtaatcaaagctggaaacctccagcagaaatatattaaaaggctgaaaaaaagttataggctaaaaatgccatcctgttggtaactaaatatttactttgcatttgattctgtctcttttctttttttgtttcactctgttgcccagcctggagtgcagtggcacgatctcagctcactgcaacttccgcctcccaggtttaagcgattctcctgcttgagccttccaagtagctgggactataggtgtgcaccaccatgcccagctaatttttgtattttttttttttttttttttttttttgagacggagtctcgctctgtcgcccaggcgggactgcggactgcagtggcgcaatctcggctcactgcaagctccgcttcccgggttcacgccattctcctgcctcagcctcccgagtagctgggactacaggcgcccgccaccgcgcccggctaatttttttt

SEQ ID NO: 318008 - DNA, 4001 bp, Homo sapiens
ctttggctgaacccatgaacccattcattagataagtggccagaactagaacacacacacacacacacacacacacacacacacacacacacacacagagccaagcatgcacacacacactggaacgtgcttacatatgccttcttacataaacatcatgccccatccttaatccttagaccattttaagaaaggattctggaatatgcacatattccaaaggaaaaagaaatattggttagttcaataagacaaaaaaaaaagagacaaaaatgttcttctttgttaaattacttcttatgcgtaagtactggtaggatatgtgatttgtgtttagtataaactattgcatttgcttatattctgctctccctgaacaaataaatgaatcaaacaaaactattaaaaagaaaaacaaaaagcaaacattaaaagcaactagtgatgttttctcttcactcaggaactcaaagttttagtaaaatgtcgaagcagctgaaacagatgctccttgcagactttctagttctaaaatgtaatttgagctctaatctctcagctggggatgcatttttaattttctttaaagatttcctatgccatacttttcatttcacaagttttttaaattcctcaaatcttgcccagtggagtgaaagtcaccttaatgaagaaacgagagattaagccaccatgactttggaacagcagaggatctcagctgcaattctttggctcagaaccaaggtctaaaaccagccatgggaaaagctgctgaaatggagcctgcaattctctccatgtttgacttgcataatgttgacattataacgccagagagaccaaaaaatatttccaacaattatgactcttttctataaatatttttaaattgctttaagagataaaataacatattttactcttctcattttctaagtgactgtggtcaccctcagcagctcactactacggatttatttttggctagaaggtcagggaggacatcttaaggcgctaagtctgctgttaaactgtgttttccaacatgagctgaatggtgagaaggggagtctgacactcttaaagcaacaactaaattcagtgtcatagcatgggagaaatatattctttctttcttctgtagaagcccaggcaaggaaaaacatcaagtactcattaaaaaaaaaaaagtctcccacccgttagagagcacagttttctttctgacagaaaagttcctcttccctttcccttctattactcttccttgttttagttaggtctgctatgaaacatagtttaaacatattgagacttctctacaaggagagggatataaaaaagggagggagaattatagagatggggaaggaagctcataatttctgggtatatcattcaactatttcaggtgtctctttcctcaacttagccaaatggtaatcacccagagagtgagaagtgaaattcatttgaaacctgcaatttcttttctctgagaatatgattaacaagcctgaattctgagctctggaaatagattagatatccttagtcacagatgagctgagtgaacagtaagctaataacccttcagtgtaatttcaatatctctcccaaagcctgagaacaagagacctggcttgtcttcaacataaatgtcctcagcatgatttgtagtattaatttttgatatgaaaacatcagatgccaaagttgactgactactgcattcctcctaaacatccacagaaaagtcctactagtttctgattttaaagctaagtcaagtttcctttttgctgctatgtaaaacttgcatcttttaataaaatcatccaaaaaacttggatgtagcgaatacagttcagtgttgtttcaaaacactgagggtggaaatggaaaagcagaactcaccctcacttccagaaaaagcatcacttgatcctgccagtgccaaggtcaacagcagctgccagagatccatacctgtaggacctgcaatcacaaaaagggtaaggtaaagcccagcaattaaaagcagaccattatcatgaaatactgtttaaagactgggtaagacatgaatgagctgacgagtcagttccagaaggaatcctggtaagtctttcactgccccagagtctcatattgtcctacttttcatgaactcaaacagcaggttgtaataaattctacttcccgtgagtgctagtctcaggaaataacatgaacactagagatgttcataccctggctcaaagccatagaaacacctcacagcaaacgacccccatgcacagcttcagtaacagggccagtaaggtttgctttaatttgatctggaaatagaaaaccttatcagcagtatcagaaagcatggggccttgagctggacaggccataaaaggaaaaacataacaatcatggtaatagtaacatttcataaatctgtttcccagtgaacaaaagagctcaaaccactcaaaacgagttgctaatgagccatcctaaagaggtttaactagaagggaagcagaaagaaggagggaagcaaaaggaaacaaaaactccctagtaaaactaaaaacccacaaggacacagtgtgtcgtagagaggttttattttcatgaggaatacagatctgaaagacccaggaatgtgaacacctcagacaccaagagggatgcgtctgtggctttgctagccatttagaagcccagtgtggccacacctggagcccttcagtctaacggagagagtagatcaacacttctgtcagcacaacacctcagtgaccatacacctttatctggaggaaggaaataagcttttctagaaaaaatataccagggtgtccacatcccggatcttctgaggcaagtttgggctggttgaaaatgaactcagcgtattgccttttgtagagctgttgctgtgtctgacaactaatgccaactactttaaagcttagctgcaacatttccataaaattgcactatttacaagttactcagagacttatcatcataccaggagctccacgagatcctctactggcttcatttttattactgtgcaaacctgacctaatggaatagcccttcatggtatccctaatcaggctgaaataatgagcaaagatgtttttttccatgggcctacagatgtggcccccggcaatggctgtgtaattctacatagggataaaattcttgacgtactttaatttctagacagcagaggacctatcttttttgttccatataattttgtattcttaaaaatttctttaaaaaagcacatctctatgtaaactaaattgtcttcttgtatctgaatccccatgtgcaaatccacatgcatgaggaactctccttcatacactacttcatggagtcgttcataggattgagtgtaaacatgcagatgaacacactttgtgagatttcacgtgagaaacatgcagatgaacacactttgtgagatttcaaataaatctcacacattgtgagatttcaaataaatctcacacattgtgagatttcaaataaatctcacactttgtgagatttcaaataaatctcacactttgtgagatttcaaataaatctcacactttgtgagatttcaaataaatctcacactttgtgagatttcaaataaatctcacacattgtgagatttcaaataaatctcacactttgtgagatttcaaataaatctcacactttgtgagatttcaaataaatctcacactttgtgagatttcaaataaatatgagttgtggtttttacaacattcatgtttttaattcctaacctggaaggccttgagctgatggcctttcatcatcctcgtctactttgcaaatgagaaccactgagcatctctccctcccaatgtcctttactcctaggtgaacaggctatgtaatcaaagctggaaacctccagcagaaatatattaaaaggctgaaaaaaagttataggctaa

SEQ ID NO: 318009 - DNA, 4001 bp, Homo sapiens
agaattaaaaattatagcaaatattccagaggtaaattatttcacttttgaaaacattacagttcactttcacatacatggcactataagtaaactgtgtctaagaaggtatagacttaagccttagtatctatgtttggaaaaggacataatatctatcccttttttgcaattacgaggatgattaaaagtcctttgtatatggtaatgtataattattatcatatctaagtattatcatccatatcaggctgtttaaagtaacataaaaccctttcttttcccaaaatcttcacctacatgaaaaaatattttaaaatctctttcctttcattaatggtgttaatgttttatagcaatgtttataaagcttcagtgctaagaagaaaataatcagaagactcacgaattgtatccttttataacgatataacagtctaatgcagttcacaaactgctggttctggaggtagagagacagatgacaaggagaaatagaaaatgcgtaagaaagaaaactcagttcacgaaaagcatagcctttgaagtagttaaaagttttactgctaataattggtattcatatacaaaagtaacgtaaatgaaagttgttttttttttttcaaagcccatacatatgagaaaatggcttgaaactgtaatattcgagacaaatataaatatcttcttatactctgattgctaagtaaaggtatcatttacaagggggattaagtggtttctactacataaagaaagactgtcctgggacttctttggatatgctcatattttcaagaatttctcttaaaatcattacttaatgtacttaaacatgtaggaataagaaaaaatgaaagtgattgattacaacttgtagttttgcaagaggaatgtcagggtcacatttggttaagctttatacactttgtcccctccataaaagcaaataaaatcaactcattgcttaattcctttaataattttgtgttcaataaagtaaggcagttaggtattatgtcaagattaggacttaactgtttcaccaagggttaaaaacaaagccaccaatttaagcccctaaaaggttataatacccgctggttccatcttaaaatctgcaattttcaatcaacatgttaacttggatcggaattctgacatttgaattattctattttaagctccaaaaaatggacacgcacaattttatgcaacgtcaaggacctgtaaatttaaatacacttctctgtaatctggttcacttcagagtacaaattcattgaacaaaaaaatgccttcatcgccatatgcattcacatgaagccacatgggataaatgcatttccactttaaaaagtatctactttggttcagaaatgcccatttaagaaaaacctacactgagataaagtggacatttttcttttaaaactacgtgacaggattccctcttgacctcacgtttctccccgccacgtatttaaatttggggcaaaatttctgattaaatgactgatcaaagtaatggggagaattcttcaacgccggccaaaagtgcttagtctcaaacgctgtgagggagcatttcctaagctttgggcgactcgttaacggaatcttaagggcaaggtccaaccacactcagaatcagcaggaaaatgaccgtttggtaaaactcaattacacccagtaggcacctccccaggcccgaaacagcactcgccctttctgctcagctagcgcgggacatcgcaacgcccaaggccctcctatctcaaaggcgcttgcgcaaaatctccccacagactcaattaaacccttccttaggccggtcgaggcgaatggttttgaaattactgtcgggttacgcctcactttaaaaaacagtaggtatgacacagcacaccagaacgaccactcaccgaggtggtcctaaattcaaacgacagatttaagcttcctctcgtgatttatctcgcgctgccggaagcggaactacccgggtcctttagagggcagtcctttggggaaccttggaaccacggtcagaaaggttaggactgatcatttggctcttgccggaaatcgttccgcccggtgaggtttcggcgtgagacccgaggagggcggggaagaggcgtgacggagattcctgaggtgtagtagcctgaggttcccttatgtggccctatagctgttactgaaggaagtagcctacgtccacgcctacaactgaagtctcttgacaaacacctcacccctgcctccgggatgaaagggggtaacctagacctgaatgggcttgaccatctcacaactgctcgcgtgacgaccgcattcgtggcaggtgagggcccaaaaccggaggagaaccggagatgcggaacctgatcatgccagggttgaggcggctgctgggcttctgctttgtctcctgtgctctgcagaccctaaacacatgctccaccgaggggcttgtgctggagagaatgacagcctgggcgtggagtgacagtacagctttgagggtcctttcgcgccttgatttctcctcctgctcccccatggcttccctttttcatttcttgggttcgagacgccagaaattgaagatcagctaaaagggaaccgctgagcttctaccccacgctgtgcctggctccactgaagtgattagcctcgagttatgggactgctgtgggtagaggtggctttttaaaaaattttctgccttagtctttatccctctctctgtcaaccccacacccactttaaaataacaaaagcctcatgtgttgcagcttttcatagtagggaccgaggctgcagggcactgccgcacctagtcatttggaggtcgttgcagccttctgcgccttgaagaagaaggggccagggtgatgatccctggatctcattcacgaggttcttgaccacttcctgggagattgcgactcttggtgtcctttggctagtagttgtcttgctggaaggcttaactgtggaagtgggaagcatagctgaccttagcacgtaaaatcctcgctctacactgggacaggattttgttttgctattgagaattcttaaatgaaatagataatttttttgtctcagatagataaaataataacgatagttgccattaactgagtcttatgtgtgccgagtgctttacatagtttgtcatttattcctctcaacaattccaggaggtatgttagattattatcaccattttacagagttagaaatggaggctttgaacagtcaagcaacttgctctattaaacatttgttataagtaaacgtttgaatctgtgttaaaaaccagatctgtctgccttcaaaatctgtattctattgtcctgtcctgttcttcctcgatttcaatttcttcactaacattttcagtgtctgaaagtatccattcatttaaaaaattttggtgtacctacttatatgtctgacaaaagttagacatgatctctgtctttatggagcattgtgatgcagaattaagtagtgcagaacccagaatactgtacttactgcagcacaggtttatttaaagcaaatgactaaactgatttgcagaaaattttaaaatcaaaggttgctgttttaaatgttaaattcatatgactttcagagtagttgttgtgagggtattaaactgaacaattggtagaacatctgttgattacccaaataagtgctatgaaccaagttaagtagtgggaatatatagattaggtcctcattctttaaaagctcccatgcaaccacaatatagacaatgttatggactattaattttctcacgtggaaaaggaattgtggttatgtaggaaggtgttcttatttttagcagatacatactaacgtacttagagttgaagtgtgttgatatctagtactttcaaatggtacagcaagtgtatgtgtgtgtatgtgtctgtgtgtataaatagcaaatatggcaaaatgttggcaat

SEQ ID NO: 318010 - DNA, 4001 bp, Homo sapiens
gtgcttggttctattaatttgctcttaaatctctctggttcagttctgtctcctgtagaccaagcagagaatcaatttgcatacaaatgttacaaagtacccaacctccatacatttgtagttctattaaatatgcaggggataaaggatctcatattataaatagaatacttcctgccctttcccccataaagtagccacattttgatacgtttcataaggccctggattgttgtactttttcattctatctgactctctgactatttgcagtctgatctgtggtcaggactctgtggcctacaaaataattgtttgaacaggagattagaagctttagcattgggtatctcagataaggggggatgccttttcttcatctcaagagacatgaaaagagactgaaatacagaaacttactatttgaggggaggtgtcatttaataaaccagccaacagattagtcaaatcagcaattcctatgaactgtaataaaacaaaaattatttgctgttttatgttgggagagggtaatatttggtgaccacttatttttaaaaacaatttggggtgggtttttcaaatgactgttaatccaatgccacagtaaaatatgagaggcaggcatctaaaatgaggaagattaatgatccctgcatgtcatggaagaagaataatgtttttcaattcatataagtggaatttatcatagccatctctgaagatggtatgattcacacacttactaaaggactatctatttcaatgcttcttaaagaggtgatttttcacttttcacttctactaacataagaaagacaagtcttcaggcagaaaattttaacctgagagacagtggatgggataactcagctgttgagtcaaatataagcataaatttaaaaacaaagcaaatgaagattgctcatgagttcaggatctgcagctaacagagtttggaaaggtgggttggggaaagaggcagtcaaagtttcaaaagggaaatgtttcccagtatgttcctaaatagatccactctgcacccaagttcagggctttacacactgaggttataatactattgtttccaagcactcagccttagtaatccccctccctcttcgcagaaaaagaaaacaacagcaaaaaaggacagaaaatgaaatgatctgtgtccagcgagtttgagtgcaaccttccccgtcaccgctagttgtcacttggctcccagacgggaaagctgaggttttcggcactgcggttagggagaatgcagtcctaattaaactgagtaactcctaaagcttccctttaaagtcctcagccgagtgaaagccaacatgcagtggggctggggaccaatagtggggggtgtagcagacagaaggacaaacaaaccgtaagaaacaggcaaacagctgccagaacagcgactgtctcagacctccacgcacaagccagacaccctgcgggcgggggtggggtgggtggcggggggtgggaggggggagaagggagacgggggatggaaggacccgattgcagtggaatacagcacccctcttccccaaaatgatgggaccacggacagaggtagcctccgtactctttccccccatttccatcagagcgatgtggtcagtagaaaattgcatacctgaagaatacaatggtctcccaaaggtagagtcgaagagtattgaagctgtacatttttcaggtccttgtgctttgtagtccacgagttatgggggcaaaaatgtttcaaattggcacttacaaaaccagaaagcgctattgcaaaaaataatccagatgttaaagggaggcggggaacaggggcgcggagggagagccccaggggaaattggagcgagggggtcgtagataccacggacagcggcggctgcgaggcgtttcagcaccacggagagcgtccagacctgcttttcaggagcgcgaagagtattgctgtttgttaaactccagcgtgtctgttggctccctgcggcgctggggaggcacgtttgggggtgggtatatttccttttttttttttttttttttaaacccctgtttttctgtttaaacggccagctccctgcaaggaaaaaaatcttctgtggagatcagagcgctggcctcggaccgttggattgggcgagcatcttgggtaaagagaacagagctttatggctctgggccggcctgagggggttaggggcgaggggaaagcggttgacggcgctgccttcagttaaatctcggagagtgtgccaggctggcgcatcgcaatccagtctcggaatctcgttctcctgcctctgtgcgggtctgctgtcgccttgctattcctgtttcccggtccccgccgaataagttgtgatcactgcagaaaaggtgtcccattgctcggggccgcaggcgtcagagagcccagggcaagtttcaggggctaccggggtccctggctaccccgcggggctctgaagcccaatgtctcagatgcatctcggttttctgagctcgctcatcttcccttggtcaagactccttcagatcttcagactttcttactgcattaatttaacaaactggaggcgtgggggatgggaggggtgatagccgatgggagggggttgagggggaaaaaaaaagggggaaaactccttagtatcttcaaaccctcccactcgaggtgttcattggcccgcggctacgaaaaccagatcttctcccggtattcggccaatagcctgttagactccgggttgaatttaacgcttagagtgctggacgagatctgcgcaatccccttcctacccccaagcttctttccgtgtaagcggtggggtgagagaggatatggaattaatctctctaggtctctcaaaaggttgccttgatttttaaagaatgcagttgtatgtgagtaaaacacatggttccttgttaagacgtgctctgggctcaatttatccttttaaaagggaagagttgaaccagatccctgattttttttaaaagagctctgaagttataatatttggccctagaaagaaaggaggaatatccaaaaagaagtctggtggataaagaccccctccagggtcaccgcagcagggaaatacgagagaaattctttgagcagtttccagcgttgagtgggaggtgttgtggctggcacccttttgagagggaataaaagcaccttcttccaactggacaggagacagttttattcgccttttatatgctggggaaactgagcctcacagagctgtggcttgctccaaattgatggcagagccaagttgtacacacagggatgtgttatgactcacatttcgttatttcttcctctgttttcccaccttatttgaatcttagaaaccagctatacatttcactgtaaagcccatctggtgagatggagttaatcagattttccccaagctgtgggactataggataaatactttaaaggattttctggctgatttgaactcattgggactctggggactctctcgcccaaggctactgagagaggacaacccctcctccttacccaataacgttagaaactcctttggctgatctcccaagaatactcatcagctcagctccctccaaggctaggccttctcccaagcagaaaggatctgaaaagtcttgtttactagcctcttaccagtaggatttcccctcccctccccctgtactacaatagcataccccacactaccggttctgttattggctcccacagtctagaatttccatgatattctgcatagtgactgaaaaggaaattttgttttgaaggtgtatattaatatgagttggatacaaatttaaatataatgtataatatatgtatttttatatatgtaatcaagagctaacctttattagcatggtttctatgtgtcagaaattactgtgaattcacataatctcatttacttttcacagtcaaaccttgaggtaagtattat

SEQ ID NO: 318011 - DNA, 4001 bp, Homo sapiens
gggaggccgaggtaggtggatcgcctgaggtcaggagttcgacaccagcctggccaacatggtgaaaccccgtctctactaaaaatacaaaaattagctgggcatggtggtgggcgcctgtaatcccagctacttgggaggttgaggagaacccaggaggcagaggttgcagtgagccaagattgcaccattgcactccagcctgggtgacaagaatgaaactgtctcaaaacaaacgaacaaacaaaactaatgcttggctcccacctctgacattgtgatttagttattgaggggcataatttgggcataaggattgttttaaaagctctctaggtgatcctaatgtgcagcaaagtttgggaaccaatggctaaaaggtcctcagggtggcagccacagtggggcccgtagtagtgtttgcactgccctttacacctctcagggcctgggcatcctatgcagctggtggtcccactaggcagcaagagcttctctcgtcattgtgtatactccaggacctcagcacacagcagtaggataacacactaagccccctttctgcaccaaaatgctgacttcttattagagagaaggggagagaaacaacctccaatgctttatactcagaacccagagacaaccttgtaagtcaaactaaaactgaaataggatatgtgcttggcctaacactgtgctgtagaattcgtgcatcgtaaaagagaacttagctgagctggtgggacatttctcatcccacctcacagcagaactgatacaggtgatgtggctggcatccctcctgaagcccaggacgcaaagccaaggatgctgaagagagggaagtctttcggatggaggagagcaatttttagagggtcccacagtctattcgtagcaaatgggactctgaggtcacctaatctggtcttgcagctgggatctttgaggactactggggtggtgacttgcccaggatcacacagccagccattataagagccaggccagaactccaggctatgattccctacaatgtggggcctggaaacatccataattaatttagaacaaggggcagataacggtacattagatttttccagtgggaggaattagataaggaagaatgagcaaattagaaaaagaaagcctagagaaaagaatgaagaacatgaatctcatgttaaataacaaacacatcacacccggccctccaccccagcttccacctccagccctgccaactgaaaactgtcatttcctggcagtgcttaaaacaaagactctagataattccccagggactcaccggcaagctgctggtcccacttaccctgccgcacagcagacatcagctgtactccctcttctgccccgtgaagacctttggctgcagtgccgccgctcattcaagtgaccgagatcctctctaaggcgccctcccccacaccccccgccccgcacagccctctggacgccttgaagtacggagccgcagccttatcctaaagaaaggcacagctctgacaagaaaaggcaatccgggagcctttccctagccgtttaaaatgaaactcaccgttcttgctcccgtgagctgttgcaaataatcttgaatctcgttagtgtggttggtggctgtgatatcgacaaattccagaagcccttgtttgatgggcaattgactgaggatctcttgggccctcctgcagtacgggcaggtgggcttgatgaacacaaccaccttcccaggctggattttgcagttcacaaactcttgagccatgccgatgggctgcggtctccccgggaagaatcctcagttgcaggtattgcttggggtattgagccccgacccagccagttggctcctatttaataaggaacctccctggaggcggagtttgcctggtagcttgctcgagttttaaagggacagcttcgaagacatttccatctggtatacttcactagttagcaatgcccaggaatgcaatacttgctatttaatcattggtagctatgaaagacactctgggtatctttgttgtccttggacatttggggagtgcctgcccattggcaatgatcagagtttagtcacctctggggaagcataaagtgcttactcacaaaggggctgaggaggcagtgacttcttagagcaaattcttgttttccctctaggagatacagttgtattttaaaatgcaaacagaatcacttaagaaacagaacacttggaaatctctttagaagaagtgaaattgaaactgtgactttgcactcctcatgaaggttgctctcacagcattttgcttggactgtatggtgggtgtttgttgttgtgatctttttaatggaattcattctcagtatttaaaaatctggaggtctcacaaaacaattcggacttaaaacttctctctgaaaagtcaggtcgggcaatacagagcttgcaccttttagtggaagctgctggggctgacagctgttgccccctttgtatagggcaagtagtggctttggtttgccacaggtcccaacgacaggcccatgcctgagacaccggcttcaccccataaccatttgagttggtaacccttgaacagcagtttaatatggaggcaaattccaacacaatccttgatacaaaactacagatgaaatgagaatctttttttctggttgagcctatgtttgtgaccctctgcttttaactgtttgtgaggggaagtagtgttgtaactcagacaccacattcacttcaagtgttataagacacgggttgtaacagtaggaaatctttcgctcttccccagggtgcccattctccttatcccgcaaagcaaagtcctctactcctgggtctagttccggccccctctagtgtatggtagcttaaataaacaaatcaaggaaaaactatgtcctttaaacgtgaatcatcctttccccaggaagttttatggtgaaaccagagtatcttcaaagaggcggggccaaggccagagctggacaccacgactgccacgtaagaggaatcccaagcatactgcgatcaagggaagggaagaaaatccactcccagaagcagctttttactgtgactctcatcgttactagaattaaaatggcaaaatgagaaagccagattctgagtcacggagggggagctaagtgacagctctgtccagagaaaaggatgtggcagggctgggaggcccctcacgtggtcagggctccggacttcccacttcccacttccctccaaagtaggctctgccacagagtctgagcctcctctcttttttcattcttttacctcagaaccctgtggccaggctccttccagaggcccctgccaggaggtccagggtctgtttcagggccctcaggctgttgccttaagttccctcagcctgaggtttatccacacgacttgcacctgctactcactcagagcctttctcttctccggtctgttgttggctcctcccttcctggtgcctcagcctgccactgtgttcaagttaaaagccaccaccaccaccaccactccccatttcctgctttcctgcctctgccctttcatgaaatttactgtctgtacctttctcacctccattctctcattttgttgttatctgaccttgtcaaccattctgctgaattgttggcagacactaatcatggcctctatgtcaccaaatgaccatttagctaggtatcctgaccttttgcaaattagtcacctgccccaagaggctgggatccagggagactattgtctgcctctcactcagtcccggggactgcctggtgtctgaagccttaggacagatggccataaggcacaagctaaaggcaatttttttgtgaggcaccatgtggaaaatgggagacaaagagatggcaaagaacgggtgtcctctccatttctcagaaaatgctgtggcttcaactcagtgaaaaatgacaagcatagaagcctctgc

SEQ ID NO: 318012 - DNA, 4001 bp, Homo sapiens
tgggattacaggtgtgcaccaccgcacctggtcttgggttttttttaaattgacaaaccatagttgtatacatttatggggtacactgcaatgtgaaatgtattctcttagttgttttgaaatgcacacagttcctgacttacaatggtttgacataccatttttcaactttacaatcgtgcctaagtgataaatattcagtagaaactgtacttttagtatccatactgtttttcactttcagtacagtcttcagtaaatcacatgagacattcaacactttattatgaaataggctttgtgttagatgatattgcccaactgtaggctaatgtaaatgttctgggcatgtttaaggtaggctaggcatgtttaaggtaggctaggctatgattctcaggttagctgtattaaatgcattttcaacttatgatgggtttatcagaacataacctcatggaaagttaaggagcttctgtatataatacattactgacgatagtcaccctggtgtgcaataaatctcaaagcctattccttagcagaacttggtggcccacacctgcagtcccagctactcaggagactgaggtgggaggactgcttgagcccaggagtttaaggctgcagtgagctacaatcgccccactgcactccagcctgggtgacagagtgagaccccacctctactctcaacttctgtaagttcaacttggttagaatccgcatataaatgagataataaaacagaactaccatatgagccattatcccacttctgggtatatatccaaaggaactgaaatcaacatttcgaagggctatctgcactcccatattcattgcagcattactcacaatagctaagatatggaaataacctaagtgtccatcaacagacacttgatggataaagaaattatccatcaacagacacttgatgaagaaattatccatcaaattgaatgcataaagaaaatgtggcatatatacacaacagaatactattcagcctttaaaagggggaacatcttgtcatttgcaacaacatagattgaatctgaaagacattgggctagctgcaataagccaggaacgaggctttttcaggtgaagggattacagaacttccctttcccagggatctgcagcacggtgtgaatgagaagtgaaggaagaagcggtgtcaatgagaagtgaaggaggaagcttggagggtacggggactgttgtctcagtggctcataaccaagggcagcggggtcacaggcctgggtatttgtcaccagatgggcaaatctggatcctctggcctggaaaagctctcaaaccctcccaactctcaggaagacctcagggcattcgagcaggggaagagatgaggcagcaggccttatcatgggggacataaggagtgggggtcaggagtaaggtgcagggttaacaggactgaatctctgggggcaatgccttagttttaaggctgtctgcattttcactccggcgcttggagggagggcaggagagtgcagacgtgagattaatctctccaaaaagggcctggagcagaacaagtctttagaggccaccctcattgtacagaccagaatcccataattagttactttggaaggctctagtgcagagaaccaattctagagaacggagtggccacccccatatctcagccagacccgcacacccgtagctgggccaggaggctgcaaacagactcttaaaagagggtgcactcacctttttcaggtgggcttgcgcaggggccgcgagaagcaagcccagggcgatcaggaggggagcctgcatcagggactgcatcgggaagggtgggtcagggcggagttaactgcaaggtctgtggcggcagaggtgcctttaaatgccttccagtattggttacgcaaagaagctgagtccagtcactggcaggttcgccctgccccgtcccggccagagacttcccggccgagaattggaccgattcctcccggctccgccccctcgctcttttcattggagcctgtctctctagcgtaggtgtcaaggccttccctctctggggcgtaggcggagttggaagagaaaggggcggaactgagcgcggcggggctgaaggcggctggaacggaagggagcttagcacgaggttggggcgggatcacgagggcggggcggagctgcgcgcgcgggaggggcgggggcgtggcgcgaggaggggccgagcggagtcgggggcggggcggagcagagctcctgggaagggcggggccgggcaggggatggggcggagctgtggtttgtgaactcgtgccggggccgtcacctttggaaggacctttgggaaaccgcggattcagtgttttcatccccaagtccttccggacaaaaatgtcagactctctgccatgttacgcttccccatatgtgtgtcttttttttttttttttttgctttgagacggactctcgctctgtcgcccgagctggagtgcagtggcgcgatctcggctcactgcaacctctgcctcccaggttcaagcgattcttccgcctcagcctctcgactagctgggactacaggcacgcgccacacgcccagctaatttttgtgtttttagtagaaacggggtttcaccgtgttgtccaggacggtcttgatctcttgacttcacgaatccgtatctttttaataattataaccgttataaaaactaacatttagtaactgcttgaaagcatgctaaggacgcacaagggaatgctttttttttttcttccccaattttagcactgaggaaactgatacacagtgaggttagctctgccaaggtcgcacagctaggaaggaatagagcaagacttctttttagacaccccatcagccaagattttgtcaggttaatatactagttggagatttgcttttagaaaaaacagggatgttgttaccaataccgccaatttaccacaggattgtaaactacacaaggggtggcatcatgatgcaggcactcatttatacccagtgcctgatgcataatagacaatctgttgagtacatgaatgcatgtgtagaatttaaaactcacctgatcatcttttttaaagtaaactttttattttggtttacagaaaagttgcaaaaatactacaaagttctgttcgtttcctctattgttgataagacacccgtggcctggccgggggttcagactgcagacccagagcttgtgcttgtgcataactggggggcactgccagcgacaaggaggtggcaaaagaataaaaaattaaaaaattttttttaaatctgagggcatgacattggtacactattattaactaagctccatactttacataatgatcctcccattctgatcaactcttccctttcacctagcccaactgaggtaggagaatagagtctgcaggcagggaacctaaggccatttcacgctgacttcctagaactaaatcgaaaggaaaaccctaactttccacacctaagtaacaagaggaccagaggctactctctttacaaccccccaccttttctgtgcagcagatgggaaattgaaagtacatttcgatttctatgctacatttcagtttatatgttaaaattgcatagaagtgcaactttgtaacttcacttcagcctgattggttgctttccacaaccaatcagatgtttgcacaggagcatgacctttgtaacttcacttcggcctctgattaaccagtcagactgattgcgggccaccacttcatttacatgaggtgagcaccaagtggccaatgggaaacctctagggggtatttggacccaagaagattctgtatctgggcccttgagctgctgcttggcccgctcccacactgttgagtgtactttcatttttaataaacccttgcttttgttctttcattgctccatttttcccttgcttttctgtgtgttttctccaattctttgttcaa

SEQ ID NO: 318013 - DNA, 4001 bp, Homo sapiens
gccaattacctgagctttcaaggtaaaacatgttcaaactgctgcccactcagaacttttgcacctggcaaaaatgttcagccacactcctcagcaatgctgagtaacttatttaaagtgagggaggccaaacatcttctgtaggtgtgctctgctttccagttcccaaatggactggatctcccctgggaaaccagccaattgcatccacctcacttctgcccagattcttcccaaggccccagagctaagtgagcagctacttgcgttgtgagatcccagaggcgcagggttccatcccaggagcctgagagggcaaactggccatctgaggagataaccacatcactaacaaagtgggagtgaccccgcagagcacgctgtggaattccatagttggtctcatccctggtcagtttccacatgatgatggtcttatctaaaggaggtaaaacagaagaaaaatcagtgaggaacccgcagcccgtttaacacactggataattcactaagtgtcaaggtcatgagtgggttaacaacaactaaggacgcttaaggagggatggaaacaacagacaagagcagttacagaccaggactgagtggctctattccagactaaaaacgcacgtagaggtaaactgtaccctgataacttttttttttcttgagatggagtctcgctctgtcgcccaggctggagtgcagtggcatgatctcggctcactccaaactccacctcccgtgttcaagcaattctcccgcctcagcctcccaagtagctgggattacttggccagctggcacctgccagcacgtctggctaattttttaactagagatgcggtttcaccattggccaggctagtctctaactcctgatctcaagtgatccactcgcctctgccttccaaagtgctgggattataggcgtgagccaccgcgcccagcctgtatcctgagaacttaatttaggtgccagaaatacagacaccctttcctgaaactcagacgaactcaacagccactttgtgtcttctctgcaaccaaatgcacagcagtttgtggctgtagagtagctggggcctcctatgcctacctctgagggccgacagaaatgtagtaatgaatgctggaaaagccacttcaggcgctacaggattggatgcttttactgaaacctgtcccactcaacaaattttacgattaacagccagacatgattcaaaagtcagacaattcttaacagtgtagcagcaaagcggaagcacaagaagcgtctaaacgcagtcaggaacacagggatagggacggggagaaccaggggcagaaaaagtaggccgacacttgagccacgaggtcctctggagtccacctgcctccccacgagccttgggccgggcggcagctcagaaacagcctctggatttcagcaccgacactcagatggcatgttggggtcatcaccgccccgcccggcccgtaggcccccggccacactacgaaggagaaggcaaaagatattttaaaagtttccaactctccaaccctcctagcagctgcgagctgatgtacacgtaggttctcatctgcaatgtggttcgcccgggttgaggcctaggctcgggtccgcacgccccaattcacaatggggcagagaagtctgtcagtccccgccaactcgcgcgccaccggcctgccacaccacacgcggaattccctacacgacacgcggaatcccccagccctgcaatctcgggtcctgaaatctaccttagtccgtacctcgagaggcggagaggatcatgtccgggaactgcggggtagtagcgatctgggttacccagccgttgtggcccttgagggtgccacgaagggtcatctgctcagtcatggcggcggcgagagcgtgtgtcgctgcagcgacgaggatggcactggatggcttagagaaactagcaccacaacctctcctgccgccgccttgcagtgaaagagagagagaaaagccccccgccggaaccggaaatacccgctcgaccatgcaaaatggcgagccccatgatacatttctgctcaagatggcggcgccatgtaatgcaaaaggcagagggaaattgcaaggcatcacagtcccgtcttccgtacaacaaaatctgactgcactttacaaatacactctgaaacaagcacattcaagtgtttaaaaaggcttctcagggatgatgtagagcgagaagcgaaagaggtgaagtgtacggcacattcccatgaggaccgccgggctgcttccccgcccctatgtggcatagctcgagctccgcctgttccacttggtgcggggagggttgacggggcaaccccaggggagcttaattttcatttcactatcgtgggtaacgatgggcaatttaaaaagtagagtattaaaatgttaaaaataaactttaaaactgtgcttccggagggtgttctcccctcacgaggtttttgttctgatgcacaccaactccggaaggacttagtccaggctggactaaggcaggagagggttactctggatgaactaagaattggtctctttttcccgggcgcggtggctcatgcctgtaatcctaccactttgagaggccgaggcgggtggatcacttaaggtcaggagttcaagactagcctggccaacatgatgcaacctctttccaaataaataaataaaaaaaattaaaattagccaggcgtggtggggggtgcctgtaatcccagttactcgggaggctgaggcaggagaatcccttgaacctgagaggcggaggttgcagtgaaccgagatcgcgccactgcactccagcctgggcagcagagcgagactccgactcaaataaataaatacatacatacaataaaataataaagtaaaaattgccctgtgtgttgctagactgccaatccgttcctgcctaggccagaacacgggaagctctcgcagaaacggaaatgcccaaaggaggaccttaaggttctgacttctggggacatctagtggaaagctctctctgggcccagccagcgtacacaaaagcccaggggtctgggggtccaactgtgccctgaaggacgtgcccagacagggaagcggtggaacacggatacctaactgtccttctgccttccgctcgaccgcaggaatttaaataagtaatggctcccattctcacccatctctgactataagagacagtgttggcaccatgtctattcaagtagttttaaacaggggcacagatcaggatgatagcagccaccaacatctatgcaaaataaagggggcattatacctaagtatatacttttctatttgtgacatctatcaactttcgtttctcatctgtgaaatgagattggaaataatattagtatctacattacatggtggtgtggaaagtgaagaagcaaatgtaaagcgccctgaacaaggcagagtaaatgttgtgaaacttagcacctcttgggtgccaggccttattttaggtcttggggacacagctgtgaacaagacagaggggggaccctggtttgttttatttgcagtttacttcctacggtatgcgaagaggggagaacattggaacagagacacggagagagccctgcgggtatatgggagaataatgttcctgtggagggaagtcaaatgggggaaaaatatttcaatcggagggaagagttagtgccaacgtactgagctggagtgtggaggggctgaggacagagcagggaaatggagggtgcagttaacctagggccttgaaggcctggagaagaaccttggcaatgtctgctagaaagcctgcgtaaaggcagaagacaggcgagggagggtggcagagctgccggaggctgtagacgcccaggtgtgcagggaaggccaggatccctccctgaaacagcttgctctcctggtcctctgcaggttcccctgccttccgccgcagtctcccttg

SEQ ID NO: 318014 - DNA, 4001 bp, Homo sapiens
cctacctcagcctcccaagaagctgggactacaggtgagcgccaccatgccaggctaattatagctgctttcaaacaacagaagggttaagttgttgcaacagagactatatggctagtgaagtctaacatatttactactggccatttacagaaaaagtctggactgcaaggaagaccaaaaaaaaaaaaaaaaaggaaaaagaacaagtttgaagacccctccaacacacacacacacacatagacacgctaatggatgggtcaggtagggccactagggcaaacccatccatctctgaaagaaataatcaggacatttgtcttgaggagctggggtcaaaatatctttctgaaaaagcaacattttgattttttccaaaagaaattagaactgttttttatttaggtcctgtgtttaattaagccttacagaaaattacctaagtgactatcttttcaattctcccaaggatggtacttagctggtacccctctagatgcagagaagagaaattaattcattacataaaatgaatgccttagggtatcaggacttaattctgttaagaaaccctggtggacagggctgacttaggatgtagcctaaaaatcaaattcttcctgccaaccaagatcccttctgctccaggattctgcagggacaggcagcgactaaaccaacccataagggaagctgggtcctttgtatgtggaaggggcaggaaggtgctctctcagcaccagtaccccagagcccccgtgaagtcccttggctgagtgagccggtgtacctggcccctgttgcctactctctccacccttatccacggcaccctctccatccaagaacgcaccagtggggagccccagggtgaagtacttctctggccctgggttaaactggatgatgcggttcctgatgtatttagccgcccactcgctcgcctgagaatagtgctccaggatgatgagcttcatcttgtcctgcagtgggggagaggggatgacagaaaggaatcaatggtaaggggcagagaaagagatggaggtggtgggagaagcttctcttacccagcaacaatccccttcccaagctgtctgagccaggaaaaaggcctttctattcacagaggagctaagaggctaggccagtcgtctccaccacccacagaccacgaggaggcgccactgggggcagatctgggttctaatctcagctccttcacttaccacctgcaggacctcggtcaaaggacctaagttctctctgagccgtttcctcctatgtaaaaattgggacaatagtacctacttcacagacttcacgacgggtaatatgaaatgagagaatgcatgtaaacaacttagtattttctacgttggctgttaccatccagatagatgctcggctcagccccgcctccctcatccctgcccctaccggaacgggataccctaccccctccccgccgtctaccccaagactcttcctccagaagtagagaggtcatgggatcatgctgggccactagagcaggtggggcaatgagctctgcctggggagctgtgtgctctctctggactagcggaggggtcttcctactggcccaccttgctttgcgaacccctctgggtcttcagtttcccccaaagcacaaaagggaaaaggtaatcgctccagaaggaggacattttgttcccccagcactgcggttagtgggagtgtgaaggaaagaggcgaaggtggcccgcgcggtcgtcggtggggtacagcgtgtcccccacccccattaccaccccatcgcccctccgatccctcctggaaaatgtgtgagggcggctccccggggtcccgaccccgagtgccgtagggctggggcagcgctccgcgctccggcccgcgaggaaggtccccgccagccctgctacccacttacacggacgcctcccgcggcggctgcagcgactgcgccggcggcccggccccgcgcgggtcacgtggctgcgggtcacgcggcgccgcgtgcgccgcccgccgggctgactcagcttggccgcagctacccggaccgactctcccaggtggaggagttccggccactcagtcccacctcggtccctggccccggcaggccctggaacagaccttaaaaaacactttcccttgggaggcggggattcgagtctggtttgtgtgtgtgtgtgtgcaagaggagggagacttgaggggcgccgggtcgcccccaggaatacaaccccctggaccttggggctggggccggggggttttagtgcaggggttgagctgggggcaggcaaagcagaatcgcttcctcagtctcctagggttgggcctggctctgccttcagtttctttctttgtttagatgccatttatttacccaagtattaaaacttgtgttgtttaaagtacaattgggctttttaatgtccttttttaaagatcaaactttgcagcattatataatagagaaaaaggcaggcccctggtttccccaactccccacaccaagataaccattgcttagtttaagagtacattctgaattgctttctttgaatatgcttacactgttattttacataaatgggaacacatacacatgaggcttatatatatcaaggctcggatatttgacctgcattatttcacttaatccttattaagctccagtgaggtaggtttgccgttactttttaacaggtggagaaactgacgcttggagagaaaaattaacttggccagaggcacaagtggtttcccttgtgccttcaattcagggggatctgtccaaatccaaaatccatgctttttaccgctagcgggcactgcctcccagctggtatgactggatttgggacgcttccatatcagaaaaagagatccatcttattctttccagtcaacattagagtgttccagacttctagggacacttgggaactttccatgcggaggctggaggaaggacttgagtgctggtcatcagtaacatcttccattacatagggttttgccagagctttgtgcgcattatttcatagaatcccgcccaatcgtcagatatgattaccgccattttattgatgtggaaactggggatcaaaggcgtacagagacttgtgatatatgacctcatagtctgacatcccggactttagtcagtgctagggagcagtggtgagaccttctgaatcagcctagttttcctccagcagcaaaaggccaaaggaatcctggctttatgcccacgggacagggccttcctcagtcagccgggtggccacgttctgcaattctgctgaatctgctcactgtggacagccccaggcgctcacccagcccttgggcccaactgcagctccagaccagcttgctaggggtaggcttcatctggtgaggccctgatgagaccagatggtggagctgatacctttacagtgtgggggacttgctctttgcctcagtgttattttgttttgttttgttttgttttccaaatcctgagaggctgtgaatggctcggtgttggtgtagtttttgtttatttttaaattcagtcagaaatctttttttttttttttttgagatggagtctcgctctgttgcccaggctggagtacagtggtgtgatctctgctcactgcaacctccgcctcccgggttcaagcagttctcctgcctcagcctcccgggtagctgggattacagatgcccaccaccatgcccagctaatttttgtacttttaatagagatggggtttcaccatgctggccaggctagtcgtgaactcctgacctcaggtgatctgcccgccttggcctcctaaagtgctgggattacaggcatgagccaccgcccccagccagaaatgttgtctcagcttgaggactgcagatgtttcacaatgaagctccaactccaatctccgatcacgtctgataacatgggccaggtctgcagcatctgcatccag

SEQ ID NO: 318015 - DNA, 4001 bp, Homo sapiens
aagtttcagtgaccaagaaagattacgttgttttgtaagactttttttttttttttgcccaccttcctgaatttggaaaactttcttaaaatcaggcctgggcgcggtggctcaagcttgtaatttcagcactttgggaggccgaggcaggcggatcactaggtcaagagatcgagaccatcctggccaacatggtgaaaccccgtctctactaaaggtatgaaaattagctgggcatggcggcgcacgtctgtagtcccggctactcgggaggctgaggcaggaaaatcgcttgaacccgggaggcggagtttgcagtgagtggagatcgcgccactgcactccagcctgggcgacaaactgaggctccgtctcaaaaacaaaacaaaacaaaaacacaaaattagccgggcatggtggcgcatgcctgcctcaggaggctgaggcaggagaatcgcttgaacccgggaggcggagatttcggtaagccgagatcgcggcattgcactccagcctgggcaacaagagcgaaactccgtctccacataaataaataatcatttttgtaggcaaatataacaaatacagcaaaacgtcatagaatctagaaagagtatatatgcatatgtatctatcactttttcaacttttctgtgtgtgaaaattttggacactgaagtgaaaataaacgctttcaaagtcagaatacaaagaattatctattgcaacttcaacccacctgaagctttgaggcctctgatcaactcacaaacctacatttcaagcactcgatgaaaaagccctttcttaagacggcaagactttgagattcatcaactgataaaatataaaagcgatactaaaaataatctctcacctaatgtaagttcacctagaaagtcatttaccaggaggtttcatgagaaacttaacttaactttactcagtaaaagagcttttccctctattaccacttcgcctacgtttttcgtaattcccaacagtaagctttaactgaagaagaagaaaaaaaaaacatccccagcaagcagatccgggcacccctcccaggtcctaaagcctgcaaaaacccaaagagttcgtggcgctggtggctccagctgttagtttcccgggcagtctccgggttggatttgcaccctggggtctacacgggttaaaaacgcggaaaaaaggcgacgaagaaatacaaactgccagggtgtcgaaatgaaaggagcgactgtgaaaggggtaaggaaaaatccaagccatctctacggggaggatccagaaagcaccagccgcgccagggggtcaaccaactccgacaccgctcggcgtcagctgggcgccaccaggcgcggacttcggagcgagggcaggtgcgcgggccggaagcctcgggcgctcacctggcacctacctggagctcacctggcgcccgggccccgcgccgccgccccccgcccagcccgccgcgcccgcacctcgcggtccttgaggcccagcaggagcacttcctccatcagggtcagccgcgtttccttggagtcgcccttgtcgtcgtcgtcctgctcgtcgcggcggctctgcgcgtcgtcctcgctgctgccggcgccgccgcccgccgcccgctccttgtcggcggcgttgcgggaggcctcggtgcgccgctgcaccaggccggagctgcgctgggtcagcgaggtcatggctcccgccgaggcgccgagccgggccgagagggtcgcaggaccgaccgggtcgccctcctcctccccgcgcggcctccgatccgggtttccgtgttaaatccggacgccggggcgacgtccgtcggcagcagggccgggggcagtcatgaggaaacaggtcagggcgaagcgggctggccgggcgtcggcggggcaggagaggagcgccttcctgcctgtggccgcagtccccgaaacaccccgagctccaaggcggaggcggcggcggcgcctttccaatatggcggccccggctgacgtcaccggaggatgtggcagagtcggcgcgggagagctgggccgggaggcgccggaagcggcggccggggatccgctgccactgcagcctacacccttcccggccctcggtgcttgtcttttctttggcgttcctgcgccccctgacccgcggtcctgcagtcctgctcccgtgacgtgccctccctccttccgttccccgtttccccttcactacccagggctggagcctgaacctggcggggccccccgtgaatggaagagcctgggccacgcgaaggtggaccccactcagcctccagccgtgccctccacgccccagacaccgccgtcttcggaggcgactccgcggtcgtgtggacggggtcccatttggactccggggtctgcaggatcggcaggaaggactttgctctctgctgctgggcggggaggggtacgctatctgccgggactccctaaccctttagaaggagcaagtgcgtccaaatggtttgaaagtggacctttattgttttccaggagtaagaagatagaacagttgaccagttttgtttgtaaaacttctttccttgcctcggacttgtgctataaagtgaccagggcgtagtgagtacagttagtaccgcacacgttagcacgctcgaccttaacgatctttttatagagacaataaacctgcagcgtttcatgccacgtctttgtacgcatcggatgtctctccgtgtagttactaggtgaaatcctcttggcgtgcgcaaattaggttaaaaaaatagctgtcaaacctgagacaggagttggaggagtagagggtggcgcttgttaagtgaaacatttaaccaggaatggtattgtgtgccatcctgtattaaacaatgtatggacagagtggaacaacagcaaagcaaaaaataaaaattttttaaaaaaagtgatcatgggctgtggctaaagagtgctttagatggattcttctcttccacaaatccattatccagaactgctgctgcctaccatcccatgccctggaaagtgacagtgctaaatgaagggaagagagggtccagggggcacaccaagtagaccttccctttttcccacctgtcttggtgaaggtcgatttcacctcaaccaatttctcccattcacaccctcttttttttttttttttttttttttttgagacggagtcttgctctgttgcccaggctggggtgcagtggcacaatctcggctcactgcaagctctgcctcccgggttcacgccattctcctgcctcagcctcctgagtagctggactacaggcgcccgccaccacgcctggctaattttttgtatttttagtggagacggggtttcaccgtgttagccaggatggtctcgatcacctgacctcgtgatccgccggccttggcctcccaaagtgctgggattacaggcgtgagccaccgcgccagcccacaccctctttggaccttttttcttcatcttttctgattttaccaaatgttgtagcttgaaatatttctttgtaaaataaatgtaattaatttattatgtgaaaaaagttaatcaggagtagtggcccacatctgtagtcccaggtcttcgggaggctgaggcaggagaaccgcttgagcccagaatttgaggctgccatgagggtgatcgtgccactgcacaccagcctgagagacagagcaagaccctgtctcaaaaaaaaaaaaaaaaaattggctgggcgcgttggctcacgcctgtaatcctagcactttggaaggccaaggcggacggatcaggaggtcaggagatcgagaccatcctggctaacacggtgaaaccccgtctctactaaaaatacaaaaaattagccgggcgtggtggcgggcccctgtagtcccagctactcgggaggctgaggcaggagaatggcgtgaaccccggaggcggagcttgcagtgagcagagattgcgccactgca

SEQ ID NO: 318016 - DNA, 4001 bp, Homo sapiens
aataccctctaattttagttatactcgtgttcactaatattaactgcctaaaaattaaattttgtcattagtcaaagagaaaaaaaaattaaattttagtgtatctctttaaaaaacattaaatgcctatgattcaccgaaaaattaaatgtagtaactaacggtaactaaaaacaccgtttaatcctgaaaaatacaaacattaaacgataactctctcacctgtcaaaacaatttctattatagcaattaattcacaactttttttaaaaaaaagctttgcttacaaacttaggccagcataacctcttgagtggaaaaaaaaatgtatactcatattttcttaagttattttaaaggttcttaattcagcttgctcagttcctctgagcttctggtcctggtaataccctctttttttgaaagtaaagaaataatttgaaatacaaaaccatttcaacaaaactatttcaaaaacttaatttctataacggattaatatgttaggaacaactatgccttaaaccaagctagttcatgaaatacattaagaactactacctgtaatataaccaaactatgtaactccaaatgcaacactaaactgcatttggaatgcagtctaaactcacatttgcaaagtcaactggctaccaaggcacacgcatttagaatacaaactggctaggaagacacgtggtgaattatttgttgcattttttcctacctttctaccactgtgaatgaatcttcaaagcctaaggcaatatataccggccatacgaatttagctttttacttaaaaagcgcaaaaacttgtagcttaggactgtttgaatctgaaaagttcctaagccttaaacgttttttctgaatttcagtttactcagacaatggttaatagttgttttcagactgtcaaggaaactgaaaccaagcaatgttactgcaagaaactgaaaggcttccgagaataacataggataaactcaactctgattacagtttacaaatgaacatttgatttgctcaccataatagtacttacaaattccaacaggactgcacaggaaggtgttggttttttctctgtaatctttattttccagtttgtatttttattttgtatcctctgaaataatatcgaagttctttgaagatacttaacctacgactatttgacatagagttacttcaagtcagctacccatacttctgttttaaagttttcatatggctatctcccgaattagccaagttctttagatttaagatcaaagtcttctttattattccatgtacttgccactgttgtacttgtccactccagatgaaatatccaatttacgagccaaaaagcaaaaacaaaaagaaaatttcacatctgaagagcattcctaaacatcagcatatacagagacacacatagctatctcaatactaccatgctgccggaaaactgcaacatcttaaatttccacgtaaataaaagataaaaggaaaaaaactctgtattctttcaatctcttcattcagaaaaagtgtcccattgtgacatgaaagagctgaagtcaaaaattcctaaaactttcaataaaggtaaaaataaactgccatgaaacttcagcaatactcagtcatttgaaactgctgaaactactcagtacacaaatcaacgtctctcagtttcggctgaagaaccccaacaacggggtgggggaaggggaggcaaaaattaccaccagctgaaatactgtaaccagttatataatccgtttgaaccaaaatactgaagaaatgctgcctgggtctctttttaagtagcttgctgaattgttcactactatcaattcacttcacagacgattcttgccaattttaataaacttctggggcaaaattatccaaaaacactgtaaatccaaaatggccacttaaaatatccagggccttttacacaaaacctagatgatgatcttcatatctgagtaattcaatcacctgtaaaagttataaaaaaaattatatactgagttttgattttgagctaaaaaaatcaatccccaacttaaaaagtcaacctctggagagaaaatcacttctatataaccctacaggagcctggaaaagggcttctttacccaagcaagcacccgataaaagtctactgaatgaacaagacatcggagtagagggagggaaaaacggtaggtgacggtattatggagggcaagggcagatttcacctgggaaggggtgcagatcccatactggggaattatataagcaaaccttcttatacttcttgaataaattttaaaactatgaaattgacacataatcttacaaaagatctccaaccctcttcgatggaccaaggaaagcgaagacaggtgtgctgccacggagtattagcgaatgtaactcagagataagtgtaaagagaaagaggctccctccaaatcagaacgtctactagaggaggcatattcccacccagtaaggccagaaaggtgaactagaagtagggcaaacccgcttcttaaattctcccgaggagacttccccacttctgagggagcaaagggctagaaggtgtaggtttccacttcctcgaattaagaaaacaggtttctcccaaaactgagggggtggaaggtacagggcccttttcgtaaaccaaagaatggttctctctcaaaaatgcacatgtcccctcagaccccacaggactcaaaggaacaaagtagccttcgccccagtccacggcaagtgccacggacctgggagaggcggggaaagctgaggcgctgctgaagaaaccgccgaaggccacaactcggcctcgactccctcagccctgagaagggtagtggtgcaaaaccaggcgggcgtgtgcaagaggccgggggaaggaaggccgagcactgagagcgtcggactcgctcccagcctccgccaaacgccaaacaccccccaaccaagccgccggggctaaaccacccaccccctcctcacaaccaccacctccgctccacccgggccgagtcaatacctagaggggcctatctgcgcctctcccccctctcactccttgcttctcgccgcccctccgtcggcgggcagcctcacacctcgcgccaccaacgccgctcccgacccctcaaaccccaacacggacacgggcactcccctcctcccccgggctcgggcgtggagcctagaggacggtgttaccttctgccccaccagaggtgcccctggcctgggggtgccgccgcgcctgatcccgggagaaggttttcggtactttgaataatccccttttgccgcttttccctcccccacaaccagtctcagtcccaaaatggcgccgacccgatccgcaatgttctgggccaagtctcgcgagatcgtgcacagtggcgaggcggggaaggaactagagggattgaggagggagggaaggcggggcgaggagaaggagggagaaagagtgtggaagaagcggtgcgaacgaacctactgggcgggacaccaggaagagcgcctccaccagagaaccttctggcccaagcaaccgctcacgccgcggtcaaagaagctccgccctctacgtcgggcgcctggggggagggggagaaggcgtggctaaggctgggggcggggcttcgaggaggccccggagcaggggcgcgcggggggcggtggctccacgcggtgacgtcaggagcagctggagtcggggattaccccctgctgctgacgtgaggacggtgaacaatcgggaacgttcggtggaagggggaattccccgccgctccctgaggagcccctcctcccgcacctccccccgtccggggctgcctcggagtccgggctggtggggctgcgcagagggcgagaggggggtgctgcgccgggaagcggccgcgcaggctcgagtggcgcgcgccgcagcgtcttccccagctctaagctcccgaagctgcgccgcagct

SEQ ID NO: 318017 - DNA, 4001 bp, Homo sapiens
tccagctatctaatagggcagtagtttcacactggaaaaactcagattcaggctattgctccacctagcgcgtggagtaatgactcaaagattttgccaagggtaagaagcagtctctcaaaggaaataactttattcaaacactaacagccctctcagaaacaatggagatactggtagtgagaaaataagaggctcctctccatgaagagcaataagctgaataagcaataagtagtttcacactggaaaaacttagaagattcaggctattgctccacctagcacgtggagtaatgactcaaagattttgccaagggtaagaagcagtctctcaaaggaactaactttattcaaacactaacagccctctcagaaacaatggagatactggtagtaagaaaataagtagctcctctgcatgaagagcaataagctgaatcacaggccagctagttctgaatgaacctgagaaagagatacgtaaggagagccctactagggtcagaaccaacctcaggagactgggcctcaaaactacacctgccataactaaattggatcagagcatggatcaaatttaggcccttcaggcattaatgaaaacaatagagcaatcagctgggaattaatggagcctaacggatgggtttgatatcaaatgaggcaaacagctttacagaaagatggggaaagacacagaaaactcagataaatcaccctcatcccaaagtgactgtgcacaaaccctttactctgcacctcaatcattttactttccctcataaaggagatcaatatttaaaatgagtacagcagggactaagaataattctaaatcaccacattcatggaattatgaacaaattagataatgttcagcaaagcactctgcaaactgaagtacatcatgtatggtggatatcattaacaagtcaatccatgtaagagtaaaaaacagtatagaaaaaggtaagatgctctgttcaaagtatatgactggtaagaattaaaatttgtgaaactctgattactacaaaagacaactttgaaataaatggcttagtgtacgctgatggtgtaataaaaactgacttgttaactaatagaacaggctgggcacggtggcgcatgcctgtaatcccagcactttgggagactgaggcgggcagatcacttaacgtcaggcgttagagaccagcctagccaacatggcaaaacctcacctctactattaataaaaatacaaaaattagtcaggcatggtgacccacacctgtaatcccaaatactcaggagaatgaggcagaagaatcgcttgaacccaggaggtgtaggctacaataagccaagatcatgccactgcaatccagcctaggcgacagagcaaagctctgtctcaaaaaaaaaattttaatagagccaacaaattaaataacttagatgttaatataaatgttttgggtttttgtttttgttttgttttgttttgagacagtttcgctcttgttgcccaggctggagtgcaatggcgcgacctcagctcaccacaacctctgcctcccagattcaagtgattctcccacctcagcctcttgaatagctgggaatacaggcatgcaccaccacgcctggctaattttgtatctgtagtagagacagggtttctccatgttggtcaggctggtcttcaactcctgacctcaggtgatccacccacctcagcctcccaaagtgctgagattacaggggtgagccaccgcgcccagccacaaatgtacttctctgcaaagatattattactcctccatgacttaattacatttgtgtaaaaaatgaatgcaagagaagcagacagaaagaaagatgcagaaagagtacctttgttgatgatggtggagtagggaaattaagccaggctggagcaaagtcatgctgcgccatttaggtccagtctctccaactcagtgaaacaaggcttcaacacctcatggcaagtccctgtcacataaaaatggaaggaattagacctgcagctcctggccaaaaattagcgcctttatattacaatgatcttactacttactactataggattctatttataatgaaaatctagaaaagacaaaactatagagatagaaaatagatcaacttggaagggggatgactgcaagaaagaagagggaattttctgggtaactgagtattatcttgattgcggtggttattacaactgtacacatttgtcaaacctcaaattataaacttaaaactggttttttcataaagtatacctcagtatagcttttattaaaaagtcaaatagacaactagacatcaaatgtttcctgatataacccaaaatgaaatacagagtaccatctatgatgtagtcttgtgcccacctaaaataaaatttgaaatctgatttaactaccaattagcagtacattcaagatggagaacaagttaaaggacatctgggggaagtgataatctaaaggttaaatgaactggtttctacgacaaatagtggcttttaatgggcagatgaactaagaatcctttatgtgaacaaatcaatcttaaaaaaaaaaaaagaaaattatgaaacaatcagaactttgaacataagctggatattattaaatggcactaaggaataatcactttagatgtgataatggtgtggtggttatgatgttttagaaggaagacaccggccaagtgcagtggctcatgcctgtcatcccagcactttgggaggccgaggagggcagatcacctgaagtcaggagttcgagaccagcctagccaacatggtgaaaccccatctctactaaaataaaaaattagctgggcatggtggtgggtgcctaaatcccagctacttgagaggctgaggcgggaaaatcacttgaacctgggagacagaggttgcagtaagccaagatcacgccactgcactccagcctgggcaaaagagcaaggctccctctgaaaaaaataataaaaaaaaagacatatactcaaatctttacaactaaattgatgatacatctggactgttctaaaataaaccagggaatggtcccggcattgtggctcacgcgtataatcccatcactttgagggagggggctgaggcagacaggtggatcacttgaggtcaggagtttaagaccagcctggccagcatagtgaaaccctgtctctaccaaaaatacaaaaaaaattagctaggtgtggtggtgtgcgcctgtaatcccagctactcaggaggctgaggcaagagaattgcttgaacccaggagatggagattgcagtgagccgaaatagagccactgcactccagcctgtgcaacaagagcaaaactccgtctcaaaaaaaaaaaaaagaaaaaaagaaaaagaaaagaaaggttaagagtaaccagatataaaaaacaaatacaactagttaaaactggcaatgtaagtgaaaatgtttaaatgctcaatatgggcttagggagaaaaactctgatacaacttgaaaaccttaagaggaattccaataaaacactcatgaaacaaaatacaggttttaagactatgtctaaccaaaatatactgcacatcacaaaaattcaggtattcagagtcctatttatttctattggcattaaatgtcaaagtcttgtggagtaacaatgaaaactaaggtgtctgaaaatttataaaagattttcatcttttaacatgaagttaaatactaaacggtgctttagtattttagtatttagtatttagtatttacacacttttccaacaacttcctggccagaaacttcagagaacttaaccaaaaatgggctggaatcatgtataatcccaacactttgggaggctggggtgggtggatcacaaggtcaggagttcgagatcggcctggccaaaatggtgaaaccccataaaaatacaaaaattagcagggcacggtggtgggcacctgtaa

SEQ ID NO: 318018 - DNA, 4001 bp, Homo sapiens
aaaaaaactctgtattctttcaatctcttcattcagaaaaagtgtcccattgtgacatgaaagagctgaagtcaaaaattcctaaaactttcaataaaggtaaaaataaactgccatgaaacttcagcaatactcagtcatttgaaactgctgaaactactcagtacacaaatcaacgtctctcagtttcggctgaagaaccccaacaacggggtgggggaaggggaggcaaaaattaccaccagctgaaatactgtaaccagttatataatccgtttgaaccaaaatactgaagaaatgctgcctgggtctctttttaagtagcttgctgaattgttcactactatcaattcacttcacagacgattcttgccaattttaataaacttctggggcaaaattatccaaaaacactgtaaatccaaaatggccacttaaaatatccagggccttttacacaaaacctagatgatgatcttcatatctgagtaattcaatcacctgtaaaagttataaaaaaaattatatactgagttttgattttgagctaaaaaaatcaatccccaacttaaaaagtcaacctctggagagaaaatcacttctatataaccctacaggagcctggaaaagggcttctttacccaagcaagcacccgataaaagtctactgaatgaacaagacatcggagtagagggagggaaaaacggtaggtgacggtattatggagggcaagggcagatttcacctgggaaggggtgcagatcccatactggggaattatataagcaaaccttcttatacttcttgaataaattttaaaactatgaaattgacacataatcttacaaaagatctccaaccctcttcgatggaccaaggaaagcgaagacaggtgtgctgccacggagtattagcgaatgtaactcagagataagtgtaaagagaaagaggctccctccaaatcagaacgtctactagaggaggcatattcccacccagtaaggccagaaaggtgaactagaagtagggcaaacccgcttcttaaattctcccgaggagacttccccacttctgagggagcaaagggctagaaggtgtaggtttccacttcctcgaattaagaaaacaggtttctcccaaaactgagggggtggaaggtacagggcccttttcgtaaaccaaagaatggttctctctcaaaaatgcacatgtcccctcagaccccacaggactcaaaggaacaaagtagccttcgccccagtccacggcaagtgccacggacctgggagaggcggggaaagctgaggcgctgctgaagaaaccgccgaaggccacaactcggcctcgactccctcagccctgagaagggtagtggtgcaaaaccaggcgggcgtgtgcaagaggccgggggaaggaaggccgagcactgagagcgtcggactcgctcccagcctccgccaaacgccaaacaccccccaaccaagccgccggggctaaaccacccaccccctcctcacaaccaccacctccgctccacccgggccgagtcaatacctagaggggcctatctgcgcctctcccccctctcactccttgcttctcgccgcccctccgtcggcgggcagcctcacacctcgcgccaccaacgccgctcccgacccctcaaaccccaacacggacacgggcactcccctcctcccccgggctcgggcgtggagcctagaggacggtgttaccttctgccccaccagaggtgcccctggcctgggggtgccgccgcgcctgatcccgggagaaggttttcggtactttgaataatccccttttgccgcttttccctcccccacaaccagtctcagtcccaaaatggcgccgacccgatccgcaatgttctgggccaagtctcgcgagatcgtgcacagtggcgaggcggggaaggaactagagggattgaggagggagggaaggcggggcgaggagaaggagggagaaagagtgtggaagaagcggtgcgaacgaacctactgggcgggacaccaggaagagcgcctccaccagagaaccttctggcccaagcaaccgctcacgccgcggtcaaagaagctccgccctctacgtcgggcgcctggggggagggggagaaggcgtggctaaggctgggggcggggcttcgaggaggccccggagcaggggcgcgcggggggcggtggctccacgcggtgacgtcaggagcagctggagtcggggattaccccctgctgctgacgtgaggacggtgaacaatcgggaacgttcggtggaagggggaattccccgccgctccctgaggagcccctcctcccgcacctccccccgtccggggctgcctcggagtccgggctggtggggctgcgcagagggcgagaggggggtgctgcgccgggaagcggccgcgcaggctcgagtggcgcgcgccgcagcgtcttccccagctctaagctcccgaagctgcgccgcagctcctccgagcttcaagctgcggaagacgctgcggcgcacgcccttcgccgggtaccccgcttgggcctcgcgctcgggcctgggtgaatcggcgctcacacggcgcctatgctcagctctgcgcaggcggaacatctgccgagccggcgccggagcggtagggcacgctgaggggatgctccaccgtggcatgcgaacgcggactgtgtcaggcatgagaacgcgggagccctgcggctgaggaaagcagacgtgcggggagccaagcccagactctcaagagggtagaaatggctactaggtataatcatgctaattatttttctttctactaaatctgcagtaggtgaattatttcaacagccagagtatcagaaccacagagcccattcgagatttttaaaaatcagtattaccgtgttcaaagttgtttctctaattgtgacaccttttcgccttataaccgtagcctcactttaacacctgggaagttggcattctatgaaaaagaaaaatcacatttgtttagagggaaggtggggagaggttgtctcaaagagggaaagtctggaaaataaagatatttggctgttcgccctcccctaagccacaaggacttcataacgtagaaattttatggtagttgtacatgcattatggggtttgtagtttaatggaatgtttctagaagatacctgaaaaacgggtggaacgtaaactcaccaaaatttaccgtccccaaccttctgttttaatctttatcgggagttggccactttaagcaattaataatgcccctctgcggggcagaggaaagggaattaacacttgctggatgccttgcccgtgccgggcattttaatgcttgtatcaccctctggggtgggtactattttgcagataaggaaacaggatgagattgacgtgtttaacgttacagaatatggaagttgggcgccacaacttggctgtaccacatttaaactcaagtctattaggggcttgatccactttcttttctctacaccacattgtttccgtataagcaacttatgtgtcgggagaggacctgctcgtgcttttatgtgtaagcatgatatcaaaccaagaaaaaataaaggaaacaaaaaaaaaaacccaaggataaaactgataacttagacacacaatttgtgcctttcatgtgacagaagacactataaagtcgaacaactggtagtgaaacagagaaacaattgtagtaaatcacaagcaagttaatatttatattcgattaccatccttagcgtatgttttatttgcataagaaaatataaagagctcttacaaattattaagaaaaagataacacccactcttttaaaaagtgaagggcggaccagtcgcggtgactcacgcctgtaatcccaacacttcagaaggctgaggctggaggatcacctgaggtcgggtgaccaacacagcggaaaccccctctctactaaaaatacaaatattagct

SEQ ID NO: 318019 - DNA, 4001 bp, Homo sapiens
ccaagtcaagcttttgtttccttcctacaacctcagcttctgttgaagtggaaactagactggaaataaaggccacgctgattttcttctgagaaaatacattactatgttaaaaaaaaaaaagtcccaattgctccgtgggaaaggtttttattttataaatactctgtggctctgaaatgacagcatgattacatttctgacagcactggtataattctcagactccccagggagagcaacgtggggattttcctcctggaaagaaaaggcaaacttgcaggtgctgaaggtacatttgatttaagcacgattcaaaataagtaaatacagatgataacacagcaaatactgaaagttgggtaatcagcaaaaataaatggcattatccagagcactataaatgcgtgaaagaaaactgcaaaaataactgtttttgtttttacaactttccagtggctcactgtctccaaatggggagatatgagaggaactgtagggaagaagagaaactggaagagcatagggaaatgtaaacatgagaagggaataggagagtggaggaaggggacaacttcagtgtcactctctcacagactctcctgccccttgtgatctggacagaccctggcaggcctcgagttccctggaggttgcgccttagcgacagatgacccgtctctgaccaccaagcacctagaaggcactttcgcaggagcaaggcaggggtctggggcgcggagggggtgggcgcaagccgccctcgtccagcggttcccgccgagcatggtgataatgagggtggggccagcgttggcggtagagcgcctggtggccccggggcccctcctcgtcctccgcgcctccctgcggcgcgcagcacagagagcccagccgcttccgcagctgtcgccggagccggcagtcgcccgcctggaagaagaggtagacgaagggattgagagcgctgttggccatcgccaccacgcgcagcgccgccgacaggccctctccctcccagtctcccgcgggcccggacgaccacgcggccgccagccgggcggcaaagtagggcagctcgcagcccacgaacagcagcgccagcagcaggctcatcttcaggctctgcaccttggcgcggggcagcgcgctgggcgcaggggctcgacctgggctcgccgaccagggcgctgcagccgcgggggcctgcggccggtgccgccaccagacggagagtaggtggccgcaagcgacgcccaggaccgtaacaggcgcgacgaagcccgcgacggcctcgtagaacgcgtagacctgcaggtgccagcgcggcaggggcgcgaagatcccgtggcagcgacgctcccccggccaggcgcgggcggccgggggcgcgcctggctgcagggacgttggcggcggcggcggcggcagcggcgagggggagtccccgcgcaccacgaaggccgggggcagcgccagcagcagtgccagcagccagcccagggcggcgagggcacgcgcgggcagcggccggccgtgcggaagacgcaccgcgcgccggcgctcgagggcgatgagcaccacgaggtgggccgaggcgccccgcccggatgcctgcagcagctgcaggaagcggcacgccaggtcccccgtggccgcgcggggctcgcccagcagttcccaggccagctgtgacagcgccgtgcccccgcacgcgtacaggtccgccagggccagctgcaccagcaggaagtccatcttgcgacgcttggggcccgcccagggcccgccgccgccgcacaggcggcacagcactgtggtgttgcctgccaccgccaccaccaggatgacccccaggaacaccaggcggacgcggcggctgggcggcccagaggcaggggctccttgccccaaggtcaggttgagaccccagcccagcaagatgggcacggaaatgttgggcgccggcggcagaattgaggggctaaagagatcctccatccttgtcccggaggaagaggaggcaccgaagagggcgggcaggacgcgggaaaccaaagtggaggcgaggcggcgcggggagcgacgctgggtctatacgagttcccaaagttagttgaaaaggcacacgcacagagagggagatggattcgggcggctttgcgcttagttgtttttgtcgattgtcctcgtgatttgtcactcaaatgtgggttgtacactcgaggaacacacatgattcctattctccaccttccccgcgtcttccctcccattcccggcgggtactcttccaatctctgcagcggcccccgacgctaccctcgcggaagccgcggacccctgggcgctgagaacctcatccattctctatttacgtgtaaagcacagcaggacagaatgtcgctttgcttggccattgtatacggccagtgttatgccagcacccacacaagagaggacctcttgactgagattgtaccacacgcccccaccaccccaatgtgattgccagtaggaaaaaaatagaaaagacattagtttttattttaaaggtttgaaatgccatggatctgcacgagcatgagaaaaacaggaacacaagaaacctaacagcgttttgagcaaagaggagacctattagctgaattttgatcaagatgtgtcttctctgtccaagaatgaaagtattttaattagagggtactaaagtcaatgatgttgcttttaggagtggcagtgttgcagatcgttccaaatactaggagcagtgggtcacagctgctttcttggtgatgtaaaattcatttcattagtctgaagagggcattaataggttttatgcaaatggtagtgcatttattgcttttctcctaatattttcatccagtgaaggatgcgtcatcacactcctcattctcttgattctgttttccagcagatgggaagttgctaggaggggctacgcctccaataagcctagagaaaaggtgactaagaaagtgataaggcggccaatttttttaaaaaagaaatccaagtcacaggaaatggtttagattaaatgttgctgctttcattttagccttgtctcctcacaaacacattttagtttccctgttggaagcatccatttgtctttttatgcaccctccacgttaatcatggtgaaagtagaatttcctgtacttcctggcctgggggccagggaggtatgagtgttgtctagggttcacattcccaatctgaggaaacatttggaactttaagattcatggcctaggaagatttggtgggttccatgatagtcctgccagctgctgtaggaatcccatttcccaagctgttgtcctttggccagaaaccttggttattttcatcatcatctctgtggtgcctcgctctggtctgacaggttgtagttatcagtgggtatgtgttgagttgatgaattagtggatatacgatgcttttcagataccttcgagcataaatgcctgccttgactataaatccatcacctaagaaaaaattccttttatactatgccagtattgtccagaggagcccaaggaagctctgtggagacataggaataagtgttcctggtgggacatttaagaaagctagagtgatagccttggaaaatctaaaatcctggtttgattttcatactctccctttagaactttttatccaaggcctttttctatgcacacacatcatcccagtttataatgcacttcttccagggagccttctctgagcaatgttcatcattcagtgattttcctagccagtatcatttcagtgtttctcaagatagtctatcatttgtctcaaatttgttgaaatgctcttatatattagcatttcaaaatgactatagtgaaatttcacagaactttagtaagatctgataaaacattgattttcaacaaattcttttttttttttttttttccctttttgagacagggtctcactctgttgcccaggct

SEQ ID NO: 318020 - DNA, 4001 bp, Homo sapiens
ggaaagctgctacaattcttagacttagaaactgaagactcattcaggtagctttaaaaagttcactgaagcaggctttagtttaagtttgaatttatttaaacttggccagaaccagccatggcttgaaatgagtccagaattggaataaggtgctgtttctttttctttgaccttcagtcatgaacattatgatacggacttttcatcaagtaaattaacacttattaagtaaatgaagaacgcattaaaatttatcattaatgtgttaaaaatctcaagtgaaagtagattttgagctttggttatgtgaaatacaatttagtaggtaaaattaggactagcaggtcctgggtgaaactgaaggtaaaggggctcagctttgacagaacctctactgcaggctccagccggtccactacagggctggtcctagggggtacccagtaaaaccactgtgaacaaatgacagaatagccaggctgtctaatcactttgacagcaacatctttacacaacacttaaattgtttgggaagccaagttctaattctgaaacaattattacttctaacatggttctctacttaccacattgcacatttggaaagtgtagattgtgaaatatttttataattcctaatggtaataattatatcagtttgtaaagtcagcaatattgataagcagcagtacaagtaaatacaataatcacagtttgttttgctttgaaacttaaatctatttaacaccttcccctgtctcttgatcttcatgttcccaggggatagggtcattgtcctgtacagaagggactgtgtccctctcatgccaaaactgctctacgtcaggaaggatgggaatctctgccttctcagttttccctttgccagaggagggagagctgggtttctctttttctggtatggatgctggggattctggagatggaaccttgtcaggaagaccctctgagttgccagctggtgtttcctgagactctgagacagttggaggttttttggttatcatccatttccatacacctttcaagccttccctgaactcttccgacatcacaagaaaaatgagaggatttgctgaagagatggaaaacatcaagacttgagacagggctatgaaaccttgtggtggggccgggcctgcagccttcagatgccatacccacagccaagctacccattcggggagccacaagagagcagagatgatggcaatgctcagcagcatcactgtgacttgctttgagcgtatctggtttctaagattttgagtcttagttcctcgttttttacattggtcataagctctccagaaataaaagctggcaaaaaataatggaaggccaaatgccaggagtgggtagagcttaccaaacatcgacataaactcttcagccacagctggtacatccacgaggcacatttccacaccttcatgatgcctgatggtgctaaagaaccattccggcaggggtaacaggctagccacagtccagatggccaccagcactgaccagatggtgtagttgtggatactcacttgcttggctgggtcacttgcatacatgaagcatactttggccaccacaacgattgtcaggctcttggctgccatgcatgtgtggataaaccagtcagaggacttgcagacaaaccagcctagatcccaaacacttttggagtacgccgtagctcggataggtgcagaaaacagcaggagggagagatcagccaggctgagattcagaatcagggagtggatcatggatggctttcctttccaagcattgtgaaggaggatgccaatcacacacaggtttcccacgaagcccaccaggcagacagccaccaagagagccgggatgatggttctccagtcctgggaatcagagggcaggtaccctccggcaaagtggaggtgagcaaaggacacattcatgctgctggagttagagtctgcaaaggcagctgccagcatcactcttcacagcttcttacagaagttagattcttatttaggtttgtctttctgcctgggctcttttgcataggaaataagtactctgtcgtcagtgtcaaatgacacttctggatcctccccttgcttatttcctgagagcagaatgtggaaggaggctggctgttaagctcttctctgctgcatacaatatacttgtgactgtaccgactgtcagatagcaggagcacatggctgctgctcattagcaagtctaataccaaatcgtcagccctgtggagtaatacaaatatacccataaatgatgaatgaagagaacatacatgtaagtggcatgtgttccttggggggtcactagagccagtcaaggcaattattttcaaccagctcttcctaaaatcttgactgctgtctgtaatttagtgaacactacatctgaaccaagttctttgaacttcacctgatggccggatccagtgggtctggagtagggcccaagaaatcatttctaacaagttcccatgagactctgatgctgcaggttgggagaccacactttgagaaccactgttttaaactgagaactaaagcttcccctacccactctgcagagatgagcttcctcttcttttccccaacccttacaaccacctcagttccatcaacagctggctgagttcaaacacagctggataatgaaaacaagttagaagtcctattaaaaaaatctaattatggatgactctcagtttattctattacgagtttttagaagcaattttacagctccaaattagaactgctttacatactaataagacttttcaacaagtgatggtgatgaaggcaactgcatgatgaattaagctgcttttcagagagcattcctagaggatttaccaagacaagagaaatgaaagaaaaatcaatatctatgtggaaggcatttaagagatttttttaaattatattttaaagttggtaaagattttgtgctgggcacactggctcatgcctgtaatcccagaatttggggaggtggaggcgggaggattgcttaaggccagaagttcgagaccagcctgggcaacaaagtgagacccctgcccccacctctaccaaacaaacaagaaaaaaaaaaaaaagaaaaaaaaaaaagtcagccatgatggtgtacacctgtagtcctagctacttaagagactgaggtgagagggttgcttaagcccaggagttcgaggttgcagtgagctatgactgtgctgctgcactccaacctgagtgacagagtgatcctctgtctctagaaataaaaaaattctcagataagatgatttggtagaactagccctgaaattttaaaataagcaatggatactctggggggattagaggagctcaaaatgttcagagaatggggtttgtggggttgatatgaagatacatgctacattgagtgtggctagtcagaaaagctaaagcatgatatacaggagagtatgctgctgcattcagatctctggattctggtactgtgctttcacgtttttcgcaagtaaagaagggtctgacgttttaaaattcttcagtgtcctagaaaataaataagtagtgatcagtatagctattgggacagtggtcagtggtgctgggttcctttgtttccatttctatttccttttgctttccttccttttacctctgggaagtagttgttcctatagaacagtaaattggggcaacaccttattccagcaaggcacagtaactcccagtaactacttaaggatgaaatatccttgagtctcaacaagcatcacttttgggtgtgaagaggcccgcaacgtcttacagggaagaaaatgggggagggagcagagtgatgttttgcagattgtagactacaaggaaggtagttcacttgatgtatgtggaagagattcattcagaaccaagaaacaaatatactgcttcacactgtggcttatatattcaagatta

SEQ ID NO: 318021 - DNA, 4001 bp, Homo sapiens
catatgatcactttctgagaatacaactggcattcaattaataaatatacagcataaatatgtaactttttaagatataataaatggagactgatacagcacttatatatttaatggtatgaagactcagtgttacataatttacctttgccccattatagactcttatagtagtccaagattacttcagtttataggcaattttagcttttaatcatcccattcagtatagtataggtcctaagagcatttggaaaaaatatttgacccagttcttataaactggaactctgggcaaggagcttaaacttttcattcttcagtatcattatctataaattgggatatactactattcaatttatggtggtattgtgttaaataagataacctatgtaaagggtttctaagaattcactacatagcaggcattcattaaggagtgactgctatatttattcatcatggaaatgagaaaatggagataggattcagtcgtacttcagttgtaaatttttaaagtctgtgtatcttggttacttcttctaaaagtaataatttgagagatataatatttttagctgaaataaacctttgcaatcacctagtccaattactttattttataaatgaagaaactaatgcctggaaggatgggtgaatgtccgaagtcattgtgtgttaatggcagagccagaaaattatacctaatcacatatatttaatatattttattataacacagttcagagtctatttgacatctccctgtaacctacatttttctcaaattatataggcggaatagttcgccacttactctatgaaattaacccagaataaattattggtgctcatttgtatcctgcctaagatatcattttttctcttccttatgatcttttgggggtttttgttgttgttgttgtttgatctaattattttgataaatgacacacaaagggagaaaaaacactttagtaatttaaagtaatcataacttcagtaagaatttctaatcatgctgtatgagttaaggtatatttttgactttcatcctaattctcagtaattatgcatctttaaaatttgatatcagtttctaaaagagtgtatagcatactagtaaatacattacacacattttaaaggctgtggatttcatgaagtgggaaaagttggtttaaaacaagttacataggataagttaacacaccttaaaatcaattttcccctgacgaacactgctataatttcttgattttaagaaaaaaatcaattttgagacagtttttaaaattaaaaatttgtaagtttttaaatatatatacatatacatattattctatagctccatgttaatcccaagctccctaaaatcaatatatttcactgaaattcttcgacgcagtggttattttggaacacaaacaagtctccttaagtttatctcacccttcccattatcaattattacctatggcgcaccgttcttggtctgttatttttcagcaagactttaaaatcaaagctaggtagggttccggtttcaaacaggcagaaaaagaagaaaataaactcttcactctgctcattcacttctcaccttctttgagatcagacatctttggaaagggcgggtagggggtgcaggaacctaacgctccctgcaaaaccgcagccttggacagaaccgacgcgggcagctatgccccattacccgcaggccgcggcgccgggtgcgcgcccagcctccctgggcccggctgtggcccgccctccgcgccgccctcgccgcccacctgcagcaacaggtgctgatgctgaggcgctcccctggggctcagcgatgctcgcagcaccacccctcagccatagcctacctggccccaggaacaccgacatccgcgcgctcccggcggtccccgccggccctccacacaccctcgctctgcctctgactcccgtccgtactccttgcccgcgctgctgattcttactaccactacaggatcaggaggagggctccatcctcctcccctttctccccctcccttgcctcctccctctgcatcctcgctctgctccaataggacccatggctcccggggcagcgctcacctgaccagcggagcgggggtggccgccccgggctgcgcactctgctctccgcagcgggcagccaggtccgcgctctggcgtcgggaacaccctgccttggccatccctaatggactcttccagcagccaggcgcctaggctgacctgcctcggcttaggagcgcgcgagtcttgcctctgcctgggcgtcccaatgtaagtgcgcggtcagtgctttctaatcgtctcctttggctaaactttctagttgcccccttcggcacaaggaactcaccatggacagtggtgcacactgccctgggtactccactgtaagcaattcctagttttctttcagggaaaaaaaacccatttactgagtcttttttcgttcctaagagaatgtttcgtttcacgtttaccgaagctctccctaagtttaccccataagaatttgagcataaattgatgaaatattagaaaggaaggatctaccctcaactgaacttacaaagcagggatttaggtcaacatctgggataaattgtctgtctcctcatttataaaataggattattaattactcataaggctgttaggagtagatgaatgagactgtgtgaagtgcaactctttacagtacacctggcacgtggtaaaccctcagcaaatgttgcttatctttcccagtacacaaaggtaaaggctcaatgtcagaccataccatcagcaatgtgcacatccccgcctgcaccagagatttttaaagcaaatgcagcattattagaatcacggaagtttcaaactgggagcaaagagaaagattagcactcccacagcaactcaccgctttttatagaaaaaaaaaatgggttctcagcctcctcattttaaatgcagctcacacaagtactcttcttaattggaataggaataactagatactttgtgttacatactgccgtccaggggcactcatttagcgttattatgagctgttgctgagcacctcctctgaaagctgcaatactcaacaaacagctgggtatcaaacggcaagtttgttgagactaaatgattcttatacagaaaccgtgtgggaatgcaaatgacacatcaaggcgctgcaaaaggtggggagaatagcaacctaggtgatccaggagattgaacagctttcctgtgaggctcaacaacaaaggtcggacctgggtctggaggctttaaatccacgagcatatcaacggagtagacacagacagacatgcttactaaatcctgccatatatgaacggtaacttcaaagcaacttaaagtgaaaactgtgaatcaattatccatgtagtcacatgtaaaacagaaaacaataacagaaaaatgttttcttcctgattatttaaaacgtcttactaaaatgtatattcaacccacagtgttgttttattagcgtttgtaaaggctttatttgtggctaaataccctggcaaagtcaacgtctaccaaccaaatattccatcttaatttttgtttcaccaagtcccatgattaaacacattccccacaactggacttcctcagcttgcatatttactttgtgtatgacattaccctaggcactgtgatgagtaaatgaaaatttacaccctcacccaatctacctcagggaactaggtaattaacaattattactaagtgtttaggaagcagaagactctgtaaggcactgtgggaaaaacagtgatctctaaaaccaccctaagtttattaatttgcactctttctggggtgaaagttaatcaaccgaaaagcagaatatgccatgcaaaaaacaagccactcaagtgctagaaatctctaggaagaagagagtgtatggattgctgaaggcttctccaaaaagc

SEQ ID NO: 318022 - DNA, 4001 bp, Homo sapiens
gcttgtctcaaattcctggcctcaagcaatcctcctgcctgggcttctcaaagtattgggattacaggtatgagccactgcacctggcctgacacttggttctcaaaaccccctttctggtttttgaggtcaggccaaggttcctcccaagcaacagtgccaaggagcatgcagtagaagaagcaagagctcccctccccctgcatacattcccccacctgtgggaacgcacacaccctatgagcagatgagcctgtacacttgggcacaaacaggttgagtgtggcctgactgaggcagaaggcagaaatgtctgctaggtatgtaggcgggctcacctggcatgcaaaggagtgaacagactgcttgtggatgtatgtaccagcttgggccactctggggccaggacctggctcctgtgttctgctcaagaagagcttgttgtgcgtatgtacaccctgcatgtgcagaatggcctgtgtgtttgtgcctcgtgggggctacttggaccctgtgggtatctcactcctaggagagcttatctgggtgttgcacaggtgcctgtgtcctgctcccagggagagcagcagcccctgtggctgcccattcaggccacagagacctggccagccattcctttccctctaggatttctttccagcatggagctatccttacacccataaacagggccagaactgccaagcacctgcaaatacctcttctgtgctgacaagaccaacaaaggcttgagggacttcgtcaggcatctgagtgtgtctgagaatctcagtctgctgcccctcgtccccttctctcgtagtgccctcagagcagcgaagtctcctgctcgggggtgtggggggagaaggaatctaaaggtgttagccagacctgcttccagaaacggccctcagaccatgcatacatacatacataggagggcaagaatggacgttcatggacgtgcaaacgtgggccagtgtgggtgggagtgggcagcacgctaagagacagagtgtgtgtgtaagagggagtgtgtgcacaagggtggcagtctactccagggtatctgggtacgcaagggaccccatgagcaggggtgagcaggccagggcagggtggccccgagtgtgttgtgatcagggagtattgttgagttgatgtccatgctgtgatccgcgatggctggtttgagtgcgtagctgtgcctgggtgtgtacgcaaggctcccacccagtaccctgggtgacaggtggccgtgtgtatgagtctaatggaatgaccaacagccattgtgtgtgtgcggtagacctgtggcctcactcgaggaaatgaggcgcccgtgcgtgaacgcggtgttgtgtgatcgcgccccggagtgtgtgccacactggttgtgtgacggcgagtgtgctcagtagtgcgagtggagccagtggagcgttgagctcgctccggggaagatgaatcaacgcgggaggacgccctccccccagtggcgggaagcaccccctcccgcgcggccatgccgaacaaagccagcgggcggcggcaaggccgggcgcggggccgaccccacagccaggtcagcctggcccgccgggcccctctgatgttcggcccagggctgcgggacccgcccccgccccgccccgccccgccccgccccggcgaggagcctggaaacagacacccaccgcccccagccgcgcgcacacacccgggctcatgccgcgcgaggtgtccgagccccgccgccggggggcttcgaggaccctggacagcggctccggggcggcagcgagcggatgaaggggctgccgccgcccgcccggaaagacagcgggtgtgggcgcggcgcttaccaggcagtgccgctgctccggctcctgggcgagatgcgctccggctcccgccgccgccgccgccgccgcccgagcggcctcggctgcctccggccgggctggcgggaggacccgcagactcggcgccgccgtccccagcgccggctccgcgctcccgccccgcgccccgccccgggcatgcgcagtagccgcccggccgcctcggaaccgcgagggggcggtgaccgcggggaaaccgcggccggagggagcgagggaggggcgcccctcgctggccaaccctaactgcggccgctgggctcccgggttccgcgccgtcctcgagcgggttcccacttcacagacagggagactgagggccggagaggctgcccctttgctgcgagcttgctgagggcggggcgcgccgtctagcagatcttagaccagcccctcgaaagccctcgcctggcttgaccaaggagggaactggggctcagagggggcagtcgccggcctgaggactcgaggcgcctggatggggacccaggtcggcgcgatctcccggctccgccagcgaggaaatttcccgcctccgccccccccacccccggccgcacttccggcctcctcttccccgcccccggccctttgtctcgccgctgcccacgctccagcgagtggcggggacgccggaggtagtggtgcgggagagatgccttccagtccctggctgcggcctccccgggggcccgcccgccctcccccctccccctggataccctcgagcaaatcatttcacctctctgcacttcagtttctcgatctgtaaaacgggactaacattatgcacctcacggtggtcttggaagggcaaagtaggtgttcaggggtttccagtggtatctgaatcaccaaggacacagagactcgctgcccaccccctccacatttccctgcagagaaggagttcccttccccttgacttcccagaggagaaaaaataattccgtaattgctctagatgtgacaaaaccctctcgcaccggtactatgaagccaccaccatctattaatcaatggtaacaaccattggcaatgatgcttatgtagggccagacacggcgctaagattctgtttacaggttttatctaatttcaatttccaatcgcttaggagcaagttaatattaatgtattatatctccatttttcagataagaaaagagaagcagataagtaacttgtttgtggtcacacatctagttagtagtggagctgggattacaaacccatgcagtctaactttgaaacctcacttcttattcttacattttactcccctctcttacttggtgaaccgtaagtcaccgtgatcctttaaaatatatatatatatatatatatatatatatatatatatatatatatatatatatatatatttaaaattctaggtgataaatgaagaaaatccgtgggactggcgtctccaggcagcacgccaggcaaggagaaaacctcagcgtgtcggaccggtttcagaaccacggacagcaccacaccagggctgcttcctcacatttccggtcctgaaaattgctcattcactgcccacaaggccatttcgcttcagagcttacaaacccttattccacattcatcatttcatttttttctccctacagcccttcaaagtaaacattactggctccatgacacagatgaaattaaggcttggagaagttcacagatgtgaaaagtggcaagaaccaacctgtgatcgaaaaaggtccccctgggacaggacaagggtggacaggagcagagactaggcaggagtgaggaggctatggcaggtgttcaggtgagcgatgatgatgcctgaaccacggcggcatttgtagggatggagaggaagagtcagattggatacctatctaggggtaaaatcaataggccttgaccatgaggtggatgtgggtggaggggagagagaactctgctgtctctctgagattctgccttggggagccaggtggatgaaggacagataatttatgagctctggggggaaagaggggtttataggatggccgtgctgatacatttgagtccagaactgagttctgccgtggccaaagctgaaggcag

SEQ ID NO: 318023 - DNA, 4001 bp, Homo sapiens
agcaagtcctgactggttgtatgtgatatgatcacacctcaccctaaaacttttctagaccatccccatcctattctctctgagtccatttatccttccccagagtgctgcagagaagacacagctatgatgagttattcatggagtccacgttctccccactagccttcttgaggcagggcccaattgtatcttctttgacctttccaaaactgaaggttgggactgactccacggtgctggcctgtctatggcccaccccaaacctcaatgttgaaaatcgatcccattcctgacctggaaaatgccttctgagttggggattatgaacagggatggataaaaaggaggggacttggacgaagtggcttcacatccatttagactgactccaaggagaggctgattaatcggatttaggctgaggaccgaaaaggggtgagtaacatggaaggaaccctgtgcttccaatgggcttcctgagaagtggacagaattttggaaacggaatcctagactcataagaacttaattaaagtgaagacccagaggattttagaaacaaaagctcagagcttgcaaaaatgtgagttatgcatgttgggaagttggagacagaaatcgctcgctttgagtctatccctacacctggcttctgcctccttccccacccactcccactccctgggtagaggagaggtctacagagcccaccccagtacatactgtcaaaggagataagcatgctgggtcatcccactcctggcctcagtatccccactccaggtgtgggccacacacctgctggaaatagactgaggctctagagaattctacctcttcttctgaattagcagtccccagctttctccaactaccaggtttcctcaggctaatgaggacagtgggtcctgggtagtgaggctgccccaggggaggaaatttcagagaacagcttgtggatttttcagcttctccaagcatcccctctgaggccctcagcttcattgtgccccatgcactcccacccccaaactctcccctgcagatggagaaacgggggtccaggagcaggtaaggactcagggtcctgagtgttctgcactgtcactccagagctctttctagcacagatctctgcctcttctaccaatgccctgaatccaagtggccatttctacctgcctgtatcattcttggggtagaagagccccccacagcagttcttcaggaccaggaccacccagctgcctctctcctttctccttgtctctctccctgggaacttgcacagcccacccagacgctgggcatttttttctgtgacgccctccctcttaggccctactgaaggggagcagctcaggcacggaggtgacatagatgtagcaaggcgaccctcgaggtggcagtggggagaaagtgcgagctcggggagagagaccttcctcccttagtcattctgcccgcctgaagcaccaggtctcggctctccaacagatggaactacgagacgacgacggtcgggggcggggtcccggcggcggagggggcggcaaaaggggttcaggaggtctctcgcacctggggattgcccatctggcggggagcctgggaaaaggggtgcattgcactgagcgctggacaccgaggggctaggttttttctcccggcccccggcccggaggctcactcaccttcgacttctcttgtccccggctctgcgagacgaagccggccaggagcagggaaagcaggcaggacgcctgcagcagccgggccatggcggggtgggggcacactcagggtcgcctgagccgctgcctgatccctggccaccgtccgtctgaggtgtccggcgctcccagccacctttcaagccctcgggtgtgaccaatccgcggccaagccgagacccttgcagccaatcgctaggcggctgggatttcaggggcgggcgcgacttgccctcagctccccacctccccgtcccggggcgacagtgacataagcaaatctgggcagagaggtggaagtcaggtccctgtggacgtgggaggcggtcccttcctcttttggctccaaagtgcgaaaggaggcagacacagcggtctccattacagccagggcaagggggctaatagctccctagaactgatggaagtctccattctgggaagcatttcttattcctatcgaggttttaaaaacacctggcgatggtcctctggaaattgagggtttaaaatttcagcaagagctgaagttaaacttccagaaacatttactatatataggtttagtgcttaagaaacaaagagtgggtgtcctgggattttgaaaaccccattctgggtagggcattaggactgtagggacagagaaggtggggtgcctttcctccccatcataaggatcacagctgacatgcctgtagaaaaaggttagcaagagaaaagcataacgatttatttaattaaagttttctgtgacatgagagtcttcagaaatgaagacccaaagactcaaggaaaactctatttttaggcttagattctatgaagaccatggaaatgcgcagaaatgtgagtggggaaaaagggaatggtctaatagtaataaactgagtgggaaacccagcaaggcttgtctgttcgtattcttcttggcctatctgtggccaaaccacctggcttagaagcagaaaataaatttgctccctgtgtagtctttaacatgttgcagttactctctgggcctcagtttcctcagctatgtaatgatgggattgattagtgatctccagtgcccttctggctctggctagatgacttgtttctaaagtaagtgacagacggagaccaggagtcctttgagaatagggcccataatcaccacctggcacagggcctagcacacaagagatgtaaagtatttgctgacttaatcattcattacattaaaaaaacaaaatctccatggaacacttaggatcagaccaggcagttctagggctgggctgtctaggtatgatcccgttcacagatggggaatgtgatggaatcagtctcaaatctctctgaccaccagagtcaactgggaagcctttaatacagattcctggaccccactttggaatcactgcattagaatctctaggggcagaagctgaaaatctgtcttcagacatgttctaaggttattgtgaggcagttggcctggctgtagccttggtagtgtgagtcctaggattaagtgccttctggaactttcttctgaccaagaaatgccttgagaaaccatacctttactatgattaaaggtattaacatccccctgggaatttggaagatgtctctcaagttttgcattctctacgaagtcttcccacctcaaaccacagcctgttgaagtggaaggaaccacagaggccaggaagtctttagctgagttaaagcctgggagcatatgaacaatggctgacacacagtaagtgctcaatacgttttattcaaccacctcatttccctgaagcctagagatgaggagcaatttatccaagttcccataaccaactgatggcagggagggaaccagaatccaggtctctagactcagtctcaggccctctccatgttgttctgttgtcttttaaggttcgtatttaccctaaaatataaacatctgtgtgcacatcagtttgtcagaaatccattgttcattagtatcagtaggcatctagtgaccctcaaaataggcacctagcaacatgttaacaccatgagagatgctaaagagttgtctaaaagccaaagtccctgctctcaaaggtgtttccagcagataccagcagggtgagggaagggaaggcacctagggtcacacaagtgcaggctggcacctggcagcgggcatctctctacattttgcaccctctatgtctcacttgtctcaccttaatcccagccctggtggtctatttctttaggggagacaagaag

SEQ ID NO: 318024 - DNA, 4001 bp, Homo sapiens
cctaaagtgctgggattacaggcgtgagccaccgcgcccggcctttttttttttttttttttttttgactaatatggtttagaacagtgtctggcacagagcaagcagtgtataagtactttatttttactattaacagacttaattccaaacaatcttaagaaggcggtactattgatagcccattttacaaatgagaaacaggcacagagaagttaagaagccacatagcaaaaacaaaagagcaggggtttgaacccaggtagcttgaggccaaagcctatgctgtctgtatgcctcatgacctttgtgctaagtgaccttggcaagtctttaaacagatttctgtagctagcttaattggagaaatagcctaacactactgccctctgaaaaaaccaagttatatgtttttggattttagcaaaaatctggtaagctgacatattcatctttgagaatattgtttcagataagaaagacaacataaaattagccacaaacatatgttaactaataatgcccagcactattcatgagagctgtgtggctataatgacgggaagggacatttctccagatgctagttacaagagaggagaattaagatattttgtgaaaatagccatgggcacactttaagtaaattcttcaggaagatggtaataaggaataaaatatattggaatagaattcttttaccatctaagaagctaaaacattgatttcaggggagcataactcctagaagttacaaaggatgagattctggctctttgatgatagttttatgaagctttcccgatacaacgtttcaaatgaaataggaaagtattgtcctggtataattgtttaaaaatgaaaagcaatttaaaacagcatatgcaaggcagatatttaccaacaagaaatctaaatgcaggttctccttcagatcctagaatcttaatcttgtggaagatggggaaagttactccgtagttttttcttgcaaaagattctacttccttgcttgggcggggctccgattctccaaactgattgcagggaaaagccaacacgctgaagtgggatggtccaaactctttgtgcagttccttcagccctaagtaatttctgtctgtgagttggcagtcactggccacgtttacaactagtgaaacctcccggaaaaagaaaaaaatccaaccggaaagtgaagcaaaagattttaaaaaattctgcaagtagttaaaatcctaaacaatttgggggggactataacctctgattgatgtttttttcatatttttggacatacacagttctattgaaaactgtaacctagatgcctgggttaaggccctgaaatagtactgccattaaaaaagcattagatactcatgaaagtttatttttaaattaaagataaaactatgatccttgataagttctttttaaagttattagattatagaaccaatacttttattaataaatgtcatcatgttcacattactaactataagtattttccaaacaactttacatgtcaattcagcacaaaattaaagcattttaaagaaaacgagataatcggaatttattatttagaagcaaactatcagaactgtaataactaaagtgatgtactaataccattactctgaagactaaattccaacttatgaccatgtaacagcaaaaaattgattttattaagaggaataaacagagacaaggaaaaatgataacaataaaaatcagatgatgcaacttactttgcctttatacttttccagagaaacagttcttccttttgcatccttcacttcaaaggcataaaagctgttgattttaggtttgaggaattttagttgtagaagaaatagcgttactgtgcatagaactatagacagcaaaactgcaaatacctttgctctgggcccggaacattttagcgggtaagctgcaagaggctccatgttggaggattctagagggaagtctcagcagcctggaattcaaggaggagctgaaacttgaaaccggcttagtttaacggaaaaccaggaaggacaggctgactgctttcactgctaaggaacagaaagaccacttctcagaggggaaatgaagcgaaactcctgaatgaagcaaggagctctacagaatttcaaagtatttgtgatgtaattataatttttgctagaaaaatcaggacatttttggtaggtctttgacattctccctacaaagaaaatatttcgccagaagatggtgctcttgtaactcgaaagctacggagggctcattccccatgctaagctgtgtatttattgagcaactgtttggatgcagaggatggagtacgatgctcagcaatagtttagaatgtagattaaatgtgacctactcatatggtgtataccctgaaggacgttactattacatgtatgggttaaacatgctatatgagttcaggaaatttatagtggaaagagcagggaaatatctgaaaaaggctatttaccctgattcatctagctaaggcaatcaaataccaagtgaatacagtcaaaataaatatgttaaaaacagtgaaggtgttaaaagaaacccttctctatcatagagcaaactatagtccagtgtttttcaaatttctactcatgacccccagtcagcagtgcactttacaacataactgggtacaaacaacacacaactgagaaacaacacttctcctttgaactgtgatgcacccccacctgttgcatttttaaacaacccagttctgacctatcaaaatgatttcatcattcaccgatgcactacaacctgtagatggaaaaaactgaggccgggcatggtggctcacgcctgtaatcccagcactttgggaggcctagatgggaggatcacttgagcccatgagttcaagaccaacttgggcaagaaagcgatacccctgtctctaaaaaagaattttaattagctggttgtggtggtgcatggctgtggtcccagttatacaggtggcaaaggtgggaggatcgcttgatcccaggaggttgaggctgcagtgagtcgtgtttgtagactgcagcctgggtgacagagtgagactatcttaaaatcagaacaaaagaagaagagggaaaaaagcaaaaattgaactcgataataaagtagtaatttaacagttaaataaggcaattctaccaaaaaaaatccctgaaaacaaacaaaccctgcaaaacccacctctacttgggcacgtcatctaattgcttcgttttttctctttatttccctcccctggctgttgcctggcacagggggcctaactttgctgttgctaacggtcatgaattttaggggtaggtatggggaggcaattgagggctgtatatcctaaaagccattcactttcaattctgctctgtttaagactcatggcaagatctggatgaaggggcattatgccatttgatcatgatgtgtttccagaaagtgcagggaatgagctgagatgtttgtggagtgcccttcctgtcactgttagcttgtggagcttcagagagggtgctcagggtgctgcctgctcttctggttcccgctctgtggcatgtgtgttttcgggtggctgagcaaagcccatagcctactgtgtaaaacttgtgagaggaaccgctcgactcctactctcatggctcagtaagaatggatacagtagaaaaagcaatgattatgcagaaagtattcccttttaaacataattcctagtaaagaacaaaaatgtatgtaagatgtgttgtatcacttcctgataattttactttggtgttctctggctgaattgtttaaaaagtcaaagtccctgtgtttatatgacatgaacactgctatgttgcttaagctctctggccttgctctctaagtgggatctgggaccttccacagtaccatcacctgggcatttgttagaaacacagcattttgggccccaccccagactt

SEQ ID NO: 318025 - DNA, 4001 bp, Homo sapiens
tattctccactagtaataaaaaacaaaggaggagacccaactgggtaacaaactggcaaggagtttttgaaaggtcaccacatttggggtgatggtggtaggcttaacatgcttgtgtgcattgctgggaatgcttctgggaggtaggtattacactgattttgcagaggaagaactgaggctcagagtgcctatcgaactggtctcatgtcccacagtttgtgacactcaaacacagatatagaggcttaccaactcctccacagccacagtgagcaattaacccagacaggaaagacatcattttgagatttttggtaaattagagttagaatgggacctctgcccaaagcacctgtgaaaactctatagcgtgaggtagggtttggtgactgggctgggccatcacgagaactgcagagccctgggcagtttatctgagataccgtgtttcagtgtttcttgttagattttcagaaatggaagatgaggagcagagggaatttattcattgtgtaatttctatatgcctggcattttacatatagaaacttactcaatcctcttagcaatgctaggaaacagaattttttttttttttttttttaccatttcggaattaagaaaactgaaacttgagaaactgtctcttttcctagtcaacacattcagttaaatggcagcagagttgggattcaaatgcaggtttgtagaatccaaagcccagtctgaaaggaaactagagatcctaatcttcccacccatttatattttatgttatgttttcagttcccatcatgcctcacagacagtgtttttcttcacagtgtttatgtgtacccttcacatgtctttctgaagacattctatttattgccctagctctgggctaagcctaacaacccttcaatacaattatttattctttgaagataggattatttgagggattttaaagcaattatagtcagaataatagaggaatttttaaacaaattaaatatctctacatatacttgttactctgctagcagttgtacaaaatttaaagtaaaaagcaaagcaaaacctaaaaaaccaaaaagctaacccatagtgcctgcttacaaggagctcataaaacctaacccaaacccaaacctacctttctaggttaaaaggaacctaaaaccaaaatgtagagagttgacatggcaagtgtgacttcatgcaaatatcttataatcctagttttcctgagctgaaatggcaaatactgagttctcccgaacacatagagtcttagattgcaactgtatctttcaagccactcctagcattgctcactgctgtctccacttgaattcccctttcagcttgagtgacatgacaaacctcaaacttccagttttgtgcaatacacctataagcaaaatgtacttgtatcaggggtttctgaggacattacagtatgtgggataattcttgcttttactcaagaccctgatgataaacaaggaaaactcccccagtgggcaatcaaagacattctccatgtggagacactctgtccttaagataccaaaaaggccttttaaaccacagaagccacactccactcccaaatggtttttccaggtctgagacctgtcacttacagttccaggtccggacccactggcttcacttctctcccgtggaacatactcttccagggcataagctgtgcttggaatgtttgctgaatgctcctttttgcttgtaggacttgctgtctccttgtcatcttctagaggccaggtgatcttcaagaaactctgggaaatgtcgggaaggaactttgtatttacaccagatctgcccaaccacagctctttgagccagttggtgtgcttttcgctcacaagtgctatctcagaagttttctctttcagcgtctgctcagagggatggcaccagccgcacttgaaacccacatgtgtgagaaagcaaatgaccacagaaacattcaatgtgacctttaagataatgttacgtctttgccttaagagcttcatcttatcttgatgttgacttggagtcacatcactgaccctttactcatgatgacgtatgtctttccgcaatcctgatgcctttcttcactttagaagacagtgattgtgtgttacctcaaaggctctaccataattcaccccaaatggtcctcagttgtcctacaagttcatgcctattcattacataaattaaacaaacctaacacaactttgatattcactattgaatggcatgatcaatgtcttatcacccgtgtctcatatgtgcattctgtaatcggaatatatatttctctttagaatatgttttgtgtcatactcatcatgattcttttctcactgtggggactcaatgaatatttactgatgataaacctgtcatgctggaaagcaaattcacagagaagctgaacttactcaaacttccttctttttagctgttctaccgtgtcactaatgcagacagtaaagttgctcattaattagaataataatgaaatggcattaaagtttttctttcttttttttcactctgtatcagacaaaaatctgattggctgaactcaaataattaaatagttttaggtacttaattcactttaatctaagaccattgcaaaacaaagtgtacatttggagatgatttacttgcataggatatactaagataaagatttacaaatgagaaagaagagtacaatttgcttgagttcaaaactaggtaatagaacaagagagatctatgcaagagattatttagaatgcaaacaacttatattctctatcctttcctttccttccttttttttttctttgagacggagtcctgttctgtcacctagctggagtgcagtggcacaatctcggctcactgcaacctctgcctcagactcccgagtagctgaaattacaggcatggaccaccacacctggctaatttttgtatttttagtagagatggggttttgccatgttggccaggctggtctcgaactcctgacctcaagaaatctgcccacctcagcctcccaaagtgctgggattacaggtgtgaaccactacgtccagcccctttcctattctttcaattaaaatttgccctcaggttgtgttagattgaatgcattgataatcccagctacattaatggcctctatatatccatagcctttgccttatagctttgtaatttctacctactctaacttggactggtcttgttacttgctttggctaataaaatgtggcagaagtgatactgtgacagttctgagtctagacctcaagaagcttcgtgggtttctactccttccctgtggtcactatgactacacgactgaattagaggtatcctccacatgagaccacatggcacagagctgagtcattcaggctgtcgtagaccacccggctccccagtgacctgccaagtccccacagacacagtagtgagcccagccaaaatctaactgatgtagatcaacagaactacctgaacacctgtagactcataaaaaataataaataattgtttccaactgaggttttgagatggatttctacacagcaatagctaactgcttcagatcctatattcatatcactaatgcagtaagatgataatagctccaggggcaattatgttttaactgttgccaaccacttgagctaaatgagggtaattttgagagggtcttcaggttcagtaggtcagcaggatgaacttaggcaatacagtggatcttcctgggatcaaagtctgatatgctttagaggtctgctatcatgagaataggaaaggtagctttagggtagggtagatgacatctattaaagatctaaaaattgtattgttagtcctacaaactgttgccactacaatcccacttcatctcccacttccccttccgtacttccacttccctccatggtcaccaggcaaagttgagagtagtactcaccacc

SEQ ID NO: 318026 - DNA, 4001 bp, Homo sapiens
gggagtgctgcatatcactcctttaagtatagggctgctagtatgattgtttggctataaaagatgtgcatgctgactagtattaggaagtgaggttgcaatggtctgtgtgggtccagatcatgaaggatcttaaaatcttggcagagaagcctatttttaagagtaggccatggaaggccatcatagattctggaacagaggaaccagtgtacagcatagtggttctaagttcatgctgtaaagttaggagacctgggcttgaatcctggctgctcttttattaactttgtgactctgcctagctgcttagcttctcagagcttcagtgcttttatctgcaacatggaaataatagcacctgcctcattctttgtgagaatgcatttaaagtattgagcacactccctgtcacatagtaagcattctcagtaagtgccagctactattatttaggaggctaaggctctaggtgatgaggtctacatgggtgcagttacagacgcagggaaattgtgaggagcaagtcattctaatcctcttagaagaaatgtccatggggacacccagacttcaacaagactttgagcctagtgataattaatgtaagttatgaagttcaaaacagaagttagaccgggtttctaagcacaaaaatttggcaacttaaaatgatttcaaagtggaattatcacatcagtataaccttatgataatacatatccctccttcctaaattactcatatcctgataccagaacaagagttttagagctcagaagggttagtgtctaaaatcatagactgaattagaagtgacttcagtaggcttagaaaataccactttgtaggaaaaaaacaacctctcctcccaaaccaattttaccaaagactgcaaaatagataaatattttaaaagtagagaagactcaattataggctaaactctttatcataccttgtctgtgtgtttaatgtggcaatggtcaccaaagtcccttgaagtacagtaatattcatttgtgcctcccccatccccactctgctcttgaagttccagaagggcagatccaaaataacatttatccttgtattgcccatcgttattgaacaagtagatactcaattatttgctgaactaaaatgaatttgtgaaaatggtcattctaaacgaagggctgtgttgggactttgagcttcaatgtggttaggcttattttctacaaaattattttcccaacatccagtgagttttgaattaagagaatttgtttaaatcctacagtagacttttcaatcaatctaaaccatctccttaactgaatatctagacagagagagagagtgagagacagagagagcgcgccacaagattgtccatataggagctccagaaatccgcatccacccaaaatgcgtcccggggcagagaagtttaggctgcgctcctcccacctccttggatgggtcccagctgagaatactcactgggctgagccaagtttgctctccctcttcccgagcactttcgcaggctttgtgtcttccacatcttgctgtagttcagtcatcggggccgtgtctggagggcaccttcagacttccgcgcgcctggctctgccccggctcgtcccggcttctaggtccgggtgcgcaggccaagcaagcggcgccgtgccctcccctgcaccctccgcccagcgcatccaggccgggccgcgccaagctcccggggccgcggacctggacacgtcggagcgggcgcgattggtccgacccactgtggaaaagccgagagggagggaaggggagggtcgaagcgaagtgacagcctctttccccaacccaggaggcagagaagagaaaaaggaaacctgttgaacgagtctttcgggagaggaagctaattggccaagcaggtggaacatttgcctaagaaggcacaatctgtttagcctcctggtaaattaagctttttgttttctatcccgactgtaacagggggatttttagagggcagccggctctagataccggaaatggagacgtctgagtgggacgccctgtcacacaaatgcgctgtgtgggctggcctatgccccatcctaaattattcaaacaggatattgcttcattgagggactgcctcttctgcttaaacaataggtctgctcaattttttatgtgggaataacaaaggtaataagtagttgcctttggtggtgttttggttaacccttcatcgttctggggtggggggggtggttagaggggcaaagaagaagcaaccatcaaaatcttcaaatattgggttatgactgttctcatcaaaatcaaaattggtgtttgataattcccaagccgtctctttgttgcccatagttgtgcaagtaccttatttactatgcactcaaccagtaccgtgaatgcctcttcttcccaccttttggtgacattttgacttgcctgttctaaggttttgtattggaagcattcactcattcattcattgaacaaacttttgagagctacaaagttccaggcattgttctcaatcaggggtgtccaatcttttggcttccctgggtcacattggaagaagacgaactgtcttgggccacacataaaatatactaacactaaggatagatgatgagctttaaaaaaggtctgtgcaggggccaggcacggtggcttacgcctgtaatcccagcagtttgggaggccgaggcgggtggatcatttgaggtcaggagttcgagactagcatggccaacctagtgaaaccccatctctactaaaaatacaaaaattagctgggtgaggtggcgcaggcgcttgtaatcccagctatttgggaggctgaggcaggagaatcacttgagcctgggagatggaggttgtggtgggccaagatgcaccactgcactccagtctgggcaacagagtgagaccctgtctcaaaaaaaaaaaaaaaatccgtgcataaatgtcaccatgttataagacagtttatgaatttgtattgggctatattcacagctgttctgggctgcaggttgggcaagcttgtataaacattgacttgttatagcaaatgacatttgtattggtggttttctaatttgcaatggagtagttgacaattagaataattaatataaacgttattattggaagcctgacttgacttcaaaacaattacaagtggcaacagtagagcatgacatgcctgggaaaaaacgactaactatgttctggggctgcaagtccttcatttttctcttaaaataaagtttagatttaagagtattacaaagactatacaaccatagtatgtacatgtatgtatgtagtttgtagggtgtatgtgtgtgtaaaacacctaaccttctaaataacttcaaacattttggaggtgcaagttctttccaaagttttcttattccttctctttttacatatatatcattaggctgagagaacaaaagcatctttttgtagcctgcttgctccaaaattgatgtttgtgacatttgaaaaataagtaaaagaaaaagcttacataaattccagaagagttggcttagtcaggcctctctctctttttctttcctgaccactgactgctttgctataggagctgtgctaggtgggatggggaaaactctgggtgacctgaaagcttgaaggctgtctccttggtgcccatagttgcctcttcctggggacattcctgatgccttcacctctagatccccaccctcctcagaatagggataggtttggaacagagatgaggttgtcaatttcccaaactctggatgaggactctcagatctcaggtgcactccaacttctcattacagagctcagatcagactgacttttccccgctaagtaatttatttattgtggtaaaatatacataacattactatttatcattttaataagtgtataattcagtggcattcaacactttcacaatgttatttaac

SEQ ID NO: 318027 - DNA, 4001 bp, Homo sapiens
ctggtctcgaactcctgacctcaagttatccacccacctcagtctctcaaagtgctaggattacaggtgtgagccaccgtgcctggcccccttacataaaaattattaagcatttctggatagcaagaggggaacattaaaccaagtgtgggccctttccaactgcaggaaccgcatgcccatgaagtttagcaagcatgccctgtgagagtgtattattattacggaagcctggggaagttggagtaaaaccaacagtgtttttaaggtgcctgctgtagtcagccaacagtggtaaaagacatgagaaataatgtgccttgtgcctttgtgaagagaagcattaggtgaggctttgaggggaaacaactagaggaaaaaaaattgttaaagtgagatgctggccctttgggaggccaaggccggtggatcacctgaggtcaggagttcaagaccaacctggtcaacatggtgaaaccctgtctctgctaaaagtacaaaaattaggtgggcatggtggtgcatgcctgtaggcccagctaccagggtggctgagggaggagaatcgcttgaacctgggaggcggaggttgctgtgagctgagaatgtgccactgcactccagcctggatgacagagcgagactccgactggaaaaaaaaaaaaggtgagatgccacaaaacagcatgcaggaaagatggagagataattgggaattagagtcagaagaggaaaatttcgggaggagttaagacttactcttggtcctgaatgaagcatagatttggagagaagatatgggctgggaagccaggaaggaagcaaaaagcggagttaataatcttttagcaaagaccaaaagaagtagaaggtagcagttctcaaagttctaataatggtgaaggaccacaatgatttctgtactcagtttagataaactgcactcacccatcacacactgttggtttaaccgctatcttttaagtgccccaaagcaactttagtctctaccaactttagtctctaccaaatggtagttggtgcctctgagaaagatgaggctacagctacacatctcaaaaccacctctcccctccggccccacaaccaaaccaaccctccctcttagtctgtcacaggaaactggtggcctggtgggtccccgggatggggattcttttcctcggctttttttcacggcccctaggaaagtgagacaccaggtgtgcacacccaaggccgggcagacactccaacctggccagccttcccagctttctaaacatatgccagagaggggtccaccctggcctcatcacttagcaaaatcagcgctttcagaaaggtgcagatgctctgctgaaggctggggcaggagggagaaaaagatgctacctgggtatcagggaaaaatgctcattctttctcaggagtattatttgtctatagtattaatacatcctcactcttaacaaaaaacccctgctcctcctgtaacgccttctccccaaaagacaaaagagaacaaagagagtcaacggaggacttaccataggctaatgattttcttctggtctggggagtccgcctccacagatggggtaggggattgggctgttggcgacctgcaggctttctttttctcctccacaccattctcagcctctgagctgaagaagaaaggaaaccgcttcactttagacattcagagagaggtagctggaaggaaaacgatgaagtaacatggttttctagagaatggaatgattttcattcctcactgataggctagttaactttgacagcgaggccctttcccaatctccattctaaccccttgcctggtgtcccaacggcagtagctgcaggtcgcacctgtttcacttgtaaatgccagactgtgtggacttgctggctcccaggtctgtgctgcccagctctgctctgcatgggctgtgctggggcagcagatcacctggaggctgggagcgccctgcacaagcacacacgcacatgtacacacgctcacgtgtggcctcctgcaggtgtgagccttcctgctgggaacccccaccccttttgtttgcatttctcttatgtcacttacatgttgtttaaccaagcagttccctaagcaatttacagtctctaatctttacaaccacccagactaggtaggaattactaccctcattttacagatgaggaatctgaggctcttgctatcttgcctaagttcagagagctagcatctatcttacttgagattcaaacttagtatgtctgtctgcaaaacctttgtgttctctctctccattcatccccccaaccacctactcatccatttatcctcataattaactcttcagtgtgagagctccagggcagagtgggaatcttactcatctttgtcttaaccacggggtctaggatagtgttgacttacagtcatgatcaataggcgttggaaaaactaggtctgaccttggtaaaagagaaggtggaagggagtagaggggaaggtgagtcaagaaggtttgtgcatagaaccaacaaacagaggacaaccagcttgggggatgcagaggtgagttccctcagtcggccggtgaagatctcttgggaagcaggggaaaccacttccaatgggaaagtgggaaaggaagggatgttgaaggaagaatacaaaatgttatttatggatcagaacttctttggtgtgtcagctcagtaaaacacaaacgatacttctgaggatgtgaggactccatggagactgagcctaaagaaagacatgttaagatggcattgctatgagagattagctaatcttcactttcatttaccacctatttggtagtctcacctgcatatgactgtgcaggcaggaaatgccactggatagtttaagctgtgtggttgctttgctgatcacttttcacagcatatgaaaattgcagcctaggcgaggagtcctattgtagtgtcagaatcaaggccagtatatctgacaagggtatctaactaataacacccacagatggttgatgctcttttttttttttttgagatggagtttcactctggttgcccaggctggagtgcagtggcacgatctcggctcactgcaaccactgcctcctagagattctccttcctcaagattctcctgcctcagcctcccaagtagctgggattacaggcgcacgccaccatgcctggctaatttttgtatttttagtagagacggggttttgccatgttggccaggctggtctcgaactcctgacctcaggtgatctgcccaccttggcctcccaaagtgctgggattacaggcgtgagccactgcacccggccaaatggttgacgctcttaattttgtggtaagcatttctcttttcctagtagatacatatctgaggacagaggtccaaccttctatttcttcaatttttctccaagtacttaaaacagttacatacattaaaagggctcagtccataacagaattgcattatgtgacaaaggtacatggaaggctgaggcattgaaatattattaggaaaaccctgttttggtttaaaataataattggactttattaaacttagcaccaagtttaatttgtggactcaaagaattttagaatagttaagaggccttaaagcacatctctgccttttttcgcttcccccaagacacaaacacattatctcttttcttcaacagattcaggcagaaatctacttgagaagccctctttaagtagagactgggtatagaacttcaataatccatctcaacatttattcagatatttactggattttatgcaggatcagatgaagacttagagggagagctggagctgtcctatacagcatctttgtgtacagagagccactctgcaaaaggtgctcctggcagagataaggtgcttcttgctcttggcagaaacagcccagcaccaaggtcagaaggcagcaaaactgaggctag

SEQ ID NO: 318028 - DNA, 4001 bp, Homo sapiens
aaaacaaaaaaaattcttgattatgatgctcccccttccccccagatgaccacaccccaaacacttccctgtcccctttctcctcctctgcaatgaatgaaagagaaaggatgggaggttgaggagtagaaggctacgggctgggctacaagggaagtgtctcccctgaaggcaggaagttttgcgtgttaggcactaacacacagatacgtacacacttcaggatgtagcttaacaggtgtcaggaaacaaagcaagttactccatggccactccaagccgccagctagctggagaggctgaaagagatgggtactgcagcacatgtatgcccgacaaaatatcaattgcaccacatcccccctcaaacacacactcacaaaagagcacaaactcccagcaatgcgaactttccctagtggagctatctccctaccaggggagagagactagaaaccaaaccaacgaagatgcttccaaacacagcagcttgcttcattccgggacacaaacgacactgacatgctggtcacacggaagccccaagcccttgtggacatgctttgtgattggtgttattgcttctgtttgttttgctttccctcatgattatcaggagtagcaatatctgtcagtcccctcagaaatacagggagggtggcggggcctttgagaagtgtaacaactaagaaggggaaatggggaacaaaaaaagcatgcagcatgttgaaacctgcctccaagttgagaggatggagcccagtaacaaggataatggagagccaacaggaggagaaaggagcatgtgtacgtgtgtgtgtttgtgtgtgtaaaaggtagacctctgtggataggaaatctaagaggagggggcaaggaaggaacggagaaaaggcaggcgaggaagttccaggatcgggggagtggagaccaccagcgcagcatggcagacagcaaagagaaggcagctggaggagtccagaacaggagagggagcctacccgccttggagtgggggccttctggcattatttcagtggctgcaatatacccagcacccctcactccttcttctcgagggtctcttttctgtcccccagcagagaaagcactgcctccttcaattacatatatatgtgcatatgtaatatataatcacacacgtgaaaacacacacaccatacatacttacattaaaaatggaatcaagcaccatctaccaagcaatagagttaactccttaaacacccaccaccctttccagcctgattttttttttcctccaaagcgatggttcctccatttcacatgctcttgcctggagtgcgagtagggtatgtgtgcgtgtgtgaacacttcccctctgcccctcatccgatcaggagaagccccctcctctggctgtaagcccaagtctcccttctgttaccgcagcacagctttagggagccaagcaaaacagtcagtaccggggagggggtacacaacccctatccccaaaaaaatccctggccagacccagaaagtccctccccaggctgccccctcactcaccgatctggatattgttggggaaattggcacctactaccgcgcctaggaaaccggtgcagaagaaggcaaaaatgtgctgcatattcctttttgcattggcgaaaaagaagcccaggtccaatcatagatttggtgtttccccccctttccctttattcttctcgctgttctgcctgttcttttcctcctgcagttccttccttgcttgcttgcttccttcctttcgtgaggtttgtctgtttcccttggaatccgaacacttaaactgcagcgttaacaccaactgacagccagattaactgagcacgggaaaagaagcccgtcctcatgctagctggagcgctggctcccccactccctctcctctcccctcgcagcctgcctctctctccctcccttgctctctctcgctctccccctcacactcacacaggcagcaagctctatgctaatacccaccgagctagcttggagttccacagccgacctccctacctgttcccccttcctcccatcctcaccttatcctcctttctgtgtgtgcagaaaggtggaggtgggggtgtgtgacacgtggcacttggtcctgaaaggggcaaccccacagtcctctttaccctcccctgcctttctgagctcggtctgcccgctcccccagcccccaggctgaagctgctgggaatgtgggttcagctgtaagtcagtaggtggcagggggtccccacaatagtcctcaatccaccagctgcttgatctaggtcactttttctaggagtgcatgggctgcgctggatatatctcctgcactccactggcccaattattcctacaactaattcctgagggaaagaccctagaaatccctcctaggaaatttaaaggaaaaaaaaaaaaaagctttctctctcctaatggaaggaatgacagatagacaaacaagggaggatctggagtgactggcaggtattttgaccaggtatttgacagtccctgtctacctttacaagtgaaacggtggtctcttttcaatcctaggcatttaaaatgggcccccttctctctttccctgcattccacaggagtctatagcatcagaatcgtgtgggtgtacaataaagactaaggatacttacacagagcaattacatgagtcattttgcagggattctagtgagaggattcaagcttctttcaggtctttctggatgctggtcatgtctggtgtaagctggaacttcatagactctcctagaccagggcttctgctgaaataacctgtagagagatcagctgtgttcaggatagtagtgttaaatgcaaagcagcagccactagccgccacagaatacagtttttgaaggaactttacagatttttatccatctatcttcactccaaacctgtaaagtggccatgagccctgttttacagatgaaaaagataagacttctgggattaagtcataaagacacagacctactaagatgtacagtacaacctacaaacttgagtgctttggccgttaccagttgacttactgccctggccaggactcctgtccaacaggagatgatccaggaaaaggaaagtcaactttgtctttagtaagaaagaaataatagactttggactccattttgctttgccatatgaataggccattttatccacagactcttcacttccctcaccaggactgtatatcatgtggacttgagtgacagctacaaggactgggatttgtaaaaaatatctgaccatgtacaatgaagccccaaaataggaacaacttggaggtcaaatgctttgtgatttcctatgcactttcacatatattaattaattagctaaaataatttttaaggctaatgtttattcactattttgaatgtgccaggtaccatgctaagaaatgcacctgcatcatttatttgtacaatacctgtgtaggtagcctcatgcccattttatagatgaagaaacagaggtctaaaaactcaccccaagttttcactgctaatgaaagagattgggcatttaaacacagtaaatgccaccatcaggccccagctcttaactcttaggctctaataacagcaagcactgggtaggaaccttctaaaggaagaataagcatcagcataggaagatgagagaacagaatcaggaaagatcacttctaaggtctctgccaacattaagagtctctgatttaatgattccatcttttaatttctccattttcagtttttgtatcttactactttgaatagtacctggggatcttttaggttccctaagctttgtgcctggtaataataataattaggctgtcattaaaggcttcacaccttgcaatcaccttttagaggaagctctttagaccctttacaagcaaaacctcaatgtccccctgcattaggtaagatttgttttgcatactttgt

SEQ ID NO: 318029 - DNA, 4001 bp, Homo sapiens
acgaatggcaactgaagtcatttttgcaacaccaccacctacccacaggccctcctttcattggtctagcgcagaaagacatctcagaaatagaagcaattacttacatctataggtcatctcaaagctgtcgctgatgttcacaatatcaatctgggggagcagcttcgggggctctgtgagttgcgacaaagcaaatctaaaagcagcatgttcctgtgactgctggtttggaaataatccccctatgagaaaagaaaatgcaacatggtatatgggctagagacaggttttagttcctcacgactcactccagatgagtccttttcttctccccatgccaaactcactagctgtagccttgagtggtagagatgagagttcaaataggcttaactggacactgaaacttaaactcctacagatgagcttttttgtgacatgggcctctaatatctattactttgctcaaacatttgattgtgtacccctcaactcagctaaagtcagagaaaacaggagacttgtgccatttctcttcttcctcccttgtgcaaaccacctaggagctgctattctcttatataaacatacacataagccccctcaccctctagtcatgtctaatttttcttacatcagcctcatctctcaccagagagccttacgggaagtaggtactaatcagtgctgcagggtgattgaaatctagctctgggaccctgtgggcttctccactactataactgtttacatggacagtttttagtctttggcctagcaagacctgcatgcaatttaactattctattgcccctaaggtttattattcattttctctaaaaactcttgcttttctgcaaacaatgttttgcttactctttcaccacacatgatcccagttacctaggaatgacttgttacataagggattgccattgtgtgtttgcatggtggaaccttgtgcttcaaagatgtgggatcttaggcatctcaagaggatacaaacattctattctagtaaaaggtatagtaaaggtgcctgatgggatgcctgttccgagaaacaagagtccatggcttacctttgtatttactgtcaacatgtaaatcaattacatttctgtgaattaaaatcagccatttctagagactgaactataatgatgtttacatagaagtttatctcaaatctgacagtaatcacagtccaaacataatgcacttctaacttcttgtagagtgggtgtctgtttttaagaaccaataaatggattgcaagccttttgttacagatcacacaaatagaatcaagtactacctgatggcagtgatattttcagcattttgttctacaatttaatgcttcaatctcttttttttttgaaaacagtagcaatggctttatcagttgaacaaccaagttagggctaaatataattttaaaaatatgcagagatacatgagaaaacatagcacatacatgaaacatcctcatgcatttataccatttactatatacacaaatatactagacaaacacttccaagccacaaaggataggtagtatataagcacaaatgtaaacaatgccacatgtaagagccagtgatttccacatgtacaagtgctcccattttaaagaatgaaaacaaaaaaaattcttgattatgatgctcccccttccccccagatgaccacaccccaaacacttccctgtcccctttctcctcctctgcaatgaatgaaagagaaaggatgggaggttgaggagtagaaggctacgggctgggctacaagggaagtgtctcccctgaaggcaggaagttttgcgtgttaggcactaacacacagatacgtacacacttcaggatgtagcttaacaggtgtcaggaaacaaagcaagttactccatggccactccaagccgccagctagctggagaggctgaaagagatgggtactgcagcacatgtatgcccgacaaaatatcaattgcaccacatcccccctcaaacacacactcacaaaagagcacaaactcccagcaatgcgaactttccctagtggagctatctccctaccaggggagagagactagaaaccaaaccaacgaagatgcttccaaacacagcagcttgcttcattccgggacacaaacgacactgacatgctggtcacacggaagccccaagcccttgtggacatgctttgtgattggtgttattgcttctgtttgttttgctttccctcatgattatcaggagtagcaatatctgtcagtcccctcagaaatacagggagggtggcggggcctttgagaagtgtaacaactaagaaggggaaatggggaacaaaaaaagcatgcagcatgttgaaacctgcctccaagttgagaggatggagcccagtaacaaggataatggagagccaacaggaggagaaaggagcatgtgtacgtgtgtgtgtttgtgtgtgtaaaaggtagacctctgtggataggaaatctaagaggagggggcaaggaaggaacggagaaaaggcaggcgaggaagttccaggatcgggggagtggagaccaccagcgcagcatggcagacagcaaagagaaggcagctggaggagtccagaacaggagagggagcctacccgccttggagtgggggccttctggcattatttcagtggctgcaatatacccagcacccctcactccttcttctcgagggtctcttttctgtcccccagcagagaaagcactgcctccttcaattacatatatatgtgcatatgtaatatataatcacacacgtgaaaacacacacaccatacatacttacattaaaaatggaatcaagcaccatctaccaagcaatagagttaactccttaaacacccaccaccctttccagcctgattttttttttcctccaaagcgatggttcctccatttcacatgctcttgcctggagtgcgagtagggtatgtgtgcgtgtgtgaacacttcccctctgcccctcatccgatcaggagaagccccctcctctggctgtaagcccaagtctcccttctgttaccgcagcacagctttagggagccaagcaaaacagtcagtaccggggagggggtacacaacccctatccccaaaaaaatccctggccagacccagaaagtccctccccaggctgccccctcactcaccgatctggatattgttggggaaattggcacctactaccgcgcctaggaaaccggtgcagaagaaggcaaaaatgtgctgcatattcctttttgcattggcgaaaaagaagcccaggtccaatcatagatttggtgtttccccccctttccctttattcttctcgctgttctgcctgttcttttcctcctgcagttccttccttgcttgcttgcttccttcctttcgtgaggtttgtctgtttcccttggaatccgaacacttaaactgcagcgttaacaccaactgacagccagattaactgagcacgggaaaagaagcccgtcctcatgctagctggagcgctggctcccccactccctctcctctcccctcgcagcctgcctctctctccctcccttgctctctctcgctctccccctcacactcacacaggcagcaagctctatgctaatacccaccgagctagcttggagttccacagccgacctccctacctgttcccccttcctcccatcctcaccttatcctcctttctgtgtgtgcagaaaggtggaggtgggggtgtgtgacacgtggcacttggtcctgaaaggggcaaccccacagtcctctttaccctcccctgcctttctgagctcggtctgcccgctcccccagcccccaggctgaagctgctgggaatgtgggttcagctgtaagtcagtaggtggcagggggtccccacaatagtcctcaatccaccagctgcttgatctaggtcactttttctaggagtgcatgggctgcgctggatatatc

SEQ ID NO: 318030 - DNA, 4001 bp, Homo sapiens
ttactctttcaccacacatgatcccagttacctaggaatgacttgttacataagggattgccattgtgtgtttgcatggtggaaccttgtgcttcaaagatgtgggatcttaggcatctcaagaggatacaaacattctattctagtaaaaggtatagtaaaggtgcctgatgggatgcctgttccgagaaacaagagtccatggcttacctttgtatttactgtcaacatgtaaatcaattacatttctgtgaattaaaatcagccatttctagagactgaactataatgatgtttacatagaagtttatctcaaatctgacagtaatcacagtccaaacataatgcacttctaacttcttgtagagtgggtgtctgtttttaagaaccaataaatggattgcaagccttttgttacagatcacacaaatagaatcaagtactacctgatggcagtgatattttcagcattttgttctacaatttaatgcttcaatctcttttttttttgaaaacagtagcaatggctttatcagttgaacaaccaagttagggctaaatataattttaaaaatatgcagagatacatgagaaaacatagcacatacatgaaacatcctcatgcatttataccatttactatatacacaaatatactagacaaacacttccaagccacaaaggataggtagtatataagcacaaatgtaaacaatgccacatgtaagagccagtgatttccacatgtacaagtgctcccattttaaagaatgaaaacaaaaaaaattcttgattatgatgctcccccttccccccagatgaccacaccccaaacacttccctgtcccctttctcctcctctgcaatgaatgaaagagaaaggatgggaggttgaggagtagaaggctacgggctgggctacaagggaagtgtctcccctgaaggcaggaagttttgcgtgttaggcactaacacacagatacgtacacacttcaggatgtagcttaacaggtgtcaggaaacaaagcaagttactccatggccactccaagccgccagctagctggagaggctgaaagagatgggtactgcagcacatgtatgcccgacaaaatatcaattgcaccacatcccccctcaaacacacactcacaaaagagcacaaactcccagcaatgcgaactttccctagtggagctatctccctaccaggggagagagactagaaaccaaaccaacgaagatgcttccaaacacagcagcttgcttcattccgggacacaaacgacactgacatgctggtcacacggaagccccaagcccttgtggacatgctttgtgattggtgttattgcttctgtttgttttgctttccctcatgattatcaggagtagcaatatctgtcagtcccctcagaaatacagggagggtggcggggcctttgagaagtgtaacaactaagaaggggaaatggggaacaaaaaaagcatgcagcatgttgaaacctgcctccaagttgagaggatggagcccagtaacaaggataatggagagccaacaggaggagaaaggagcatgtgtacgtgtgtgtgtttgtgtgtgtaaaaggtagacctctgtggataggaaatctaagaggagggggcaaggaaggaacggagaaaaggcaggcgaggaagttccaggatcgggggagtggagaccaccagcgcagcatggcagacagcaaagagaaggcagctggaggagtccagaacaggagagggagcctacccgccttggagtgggggccttctggcattatttcagtggctgcaatatacccagcacccctcactccttcttctcgagggtctcttttctgtcccccagcagagaaagcactgcctccttcaattacatatatatgtgcatatgtaatatataatcacacacgtgaaaacacacacaccatacatacttacattaaaaatggaatcaagcaccatctaccaagcaatagagttaactccttaaacacccaccaccctttccagcctgattttttttttcctccaaagcgatggttcctccatttcacatgctcttgcctggagtgcgagtagggtatgtgtgcgtgtgtgaacacttcccctctgcccctcatccgatcaggagaagccccctcctctggctgtaagcccaagtctcccttctgttaccgcagcacagctttagggagccaagcaaaacagtcagtaccggggagggggtacacaacccctatccccaaaaaaatccctggccagacccagaaagtccctccccaggctgccccctcactcaccgatctggatattgttggggaaattggcacctactaccgcgcctaggaaaccggtgcagaagaaggcaaaaatgtgctgcatattcctttttgcattggcgaaaaagaagcccaggtccaatcatagatttggtgtttccccccctttccctttattcttctcgctgttctgcctgttcttttcctcctgcagttccttccttgcttgcttgcttccttcctttcgtgaggtttgtctgtttcccttggaatccgaacacttaaactgcagcgttaacaccaactgacagccagattaactgagcacgggaaaagaagcccgtcctcatgctagctggagcgctggctcccccactccctctcctctcccctcgcagcctgcctctctctccctcccttgctctctctcgctctccccctcacactcacacaggcagcaagctctatgctaatacccaccgagctagcttggagttccacagccgacctccctacctgttcccccttcctcccatcctcaccttatcctcctttctgtgtgtgcagaaaggtggaggtgggggtgtgtgacacgtggcacttggtcctgaaaggggcaaccccacagtcctctttaccctcccctgcctttctgagctcggtctgcccgctcccccagcccccaggctgaagctgctgggaatgtgggttcagctgtaagtcagtaggtggcagggggtccccacaatagtcctcaatccaccagctgcttgatctaggtcactttttctaggagtgcatgggctgcgctggatatatctcctgcactccactggcccaattattcctacaactaattcctgagggaaagaccctagaaatccctcctaggaaatttaaaggaaaaaaaaaaaaaagctttctctctcctaatggaaggaatgacagatagacaaacaagggaggatctggagtgactggcaggtattttgaccaggtatttgacagtccctgtctacctttacaagtgaaacggtggtctcttttcaatcctaggcatttaaaatgggcccccttctctctttccctgcattccacaggagtctatagcatcagaatcgtgtgggtgtacaataaagactaaggatacttacacagagcaattacatgagtcattttgcagggattctagtgagaggattcaagcttctttcaggtctttctggatgctggtcatgtctggtgtaagctggaacttcatagactctcctagaccagggcttctgctgaaataacctgtagagagatcagctgtgttcaggatagtagtgttaaatgcaaagcagcagccactagccgccacagaatacagtttttgaaggaactttacagatttttatccatctatcttcactccaaacctgtaaagtggccatgagccctgttttacagatgaaaaagataagacttctgggattaagtcataaagacacagacctactaagatgtacagtacaacctacaaacttgagtgctttggccgttaccagttgacttactgccctggccaggactcctgtccaacaggagatgatccaggaaaaggaaagtcaactttgtctttagtaagaaagaaataatagactttggactccattttgctttgccatatgaataggccattttatccacaga

SEQ ID NO: 318031 - DNA, 4001 bp, Homo sapiens
cagcaattagggaggccagaggcaggcggatcacttgaggtcaggagttcaagaccagccaggccaacatggtgaaacccatctgtgctataaatacaaaaattagctgggtgtggtggcatgcacctgtagtcccagctacttgggaggctgagggaggagagtcacttgaacccaggaggcggaggttgcagtgagccctgcactccagcctgggtgacacagtgagactctgtctcaaaaaaaagccatgcaggtgggaggggcagagccaggttgtcgtaagggttctctagtggaggtaccagtccccagtctggccataccaccctgtgccttgcccatggcctgacaaagcttgtccaaaggtacccacactctccggccaggcagtgccatcagcaggcctgaggccttaactggctacagccctagggaagaaggcctgtttcggccctccccacccctcctccctggctggttggatgacgaggcagaacagaatcggcagatgcccccagaggctgggaggaaggcctagcccatgggctcgataagggacaggggataagacaggctccccaggcaatgaggacccagcctgccatgccatttctgggctgcacctcgccagagcacttggtgggcacggggtgccaggtgtagcacccagctgaaagttcctctgggcttcctatagactgtgccggtcatcctgtgtcttaggcccgagtcaatcacaatcttgctgtgtgactgatgctaatccctggtttgagcctcagcttcccacatgtaaaatatggtagaaaggtgaagcagatgactttttaagcctggaagcccagcaaagggtggaaaaactgtcacaatctccctccttgccctggagttccaaaaagatgggtcttgtttactgctgcttccccagcaccctggaaaaggtggggcagagtgggtggtcagtgatcatgttactgaggtggagtgtggcaggtgggggcagactgaccacaaggcagtgaggacccgatctggtccttctgtgtctcccaggacctgcacagagcaagtgcctgataacatctggggtgggagccacgaggagctacacacacactcggtccaccagactggtttccccagccagacctctgagcttacaatactgacagagcagcatgctctgctcccacttctttctgtgtccgctagccccactagaccatgggctccctgagggcaaatatccattcacctctgccctcagtgtcctgaggcacggagcaagtggcagtcctataagtagcatttgtggccaggagtttccccaagtcaggtgggctgtgctacgcagagggtccgtttattcattctccagctttacctatcgccaactttgcgcgggattaggctagggtgctggggtctgggcccctggcacgtggggcatctttacacctctcccctggaggaggcttgcctctcagacaggctctcctggggctccggtcccacccttccctcttcgtctcaccttctttcactccttcacccccacccgccgcgagggcggcggcctgacccccgccccttcctgggccccgaatcccgggggcaggtgcggaggaggaagacgacgggccggaaaggctcgtgtctgggcggggtgtaaggcgcagggcccgcgggcctaggggatccgacggctgggtagccctgcggagctcagacgcagcgcactcgcgctccacgcacccgggcccggccgcccacccggccgcctcaccttcccgggccttgagtagcaccgtgttcgctacgatgttctcgagctccatgggctgtggcgccgcctggcccgccgggccgcgccgccggccgggatcgcgcgcgagtgccgaggccggatggcgatcggcgcggctcggcgcggctcggctcggctcgcagtgaccgcgccgcggcctccccggcctccccggccgccgcagccagccgcgcactctccgccccctcccgggggccaccccggcgctggcccgccctgccccgccctctgtttacctcatttgaccaatcaccgggcagaagctccccgcgccgtcttcccattagtcttcctcttcattttttcccccgcccccccagctggggactcgctcaaagaagtacgggggcgggaccaatcacgtcacctcttcctggttggtctgagggcggggttcagcccctaggttcgaatttctaggctttcgtaggataccaaactgccaattagggccgagccctcagccgggacaatggaggtgggtactctggggcacgcccaggaggccgaatatgtgattgggtgaagaagacgtccgtcatctcaagtactgcattttgattgggtcgtcgcctgaaggtgtggcccggcggcctttggctcgcagacggcttttctagggttttgtcggggacgcgctccgtatcctgggcctcctgcgggctggcagcgagtttgtttggtccacttgtgtggccgtattcccttgggtcggccccaatcaggagggcgcacatcgaaagagggagagacagggaggaggctgcggcctcgcagccgttccccgacctcttgcccggtcgccgcaggcgccccgcccagcccccgcagccggatgttgtgatttctctccacccactcggcctcgccttccctcggcctctgccgccttataaggcagcgctaccacccctagacctcgggatgagttcacacccattatacaggtggggagctgaggcgccggacgtcaagtggctggctccagcccgaagactacggagaaaacaaggctgaaatcttacagctaatcaacaccttgtagcttaacaccccgcttcctccaccccctacttcacgcagcaggaaacaggcttgcccaaactccgcgagtaaggcagagccggatccatctaggcttctctagttcctatgcattcattcatccgaaaatacagagcaacacctctgtgccaggcaccaagccaggtgctggagaacacagtgatggcagcaagatagccaggctccctgcttacttgctagaagtggagggagcaagtgagggcagggtgagataaaggtaattattctgtaaataaacaaatagatggtttcagagagtgacaactgctcttcggacgttaagagagtgtgtgacactctcagggtgtgacatttgagcggatccagtagaagcaacagcaaacgcagaggctctaagccagactaagtggtgtgttcagggaataggagaaggcgtccgcagcttctgggcccagtggtctgagatgagacagaaggagcaaaggcactagctaggtcatggaggactgtgaacacgtccaggaggctgaagtgtttttgctaagtgaaatgtgaaacatttgaaagaatgatttatattttaaaaatatcactctggtggattcctagggggccaagagtggaagcagagcagtcaggagtttacagaattccagtaaagagatggtggtggcctggacctacaaggtggcaatagagacggagaaaagtggatggatctaggatctagggagttaagtaccttaaaagagggaaaccctcctggctaatgcggtgaaaccccgtctctactaaaaatacaaaaaattagccgggcatggtggcgggcacctgtagtcccagctacttgggaggctgaggcaggagaatggtgtgaacctgggaggtggagcttgcagtgggccgagatcgtgccaatacactccagcctgggcaacagagtgagactccgtctcaaaaaaaaaaaaaaaaaagggaaacccagggcccagtggaacatagggcaggtacctcacttagtgaaggctgttgtgtccaagtgaaatctgaagattcagtgaaaatgtgcaggttactggagtagggagggaaagagccttctggacagaggggtatcacatgt

SEQ ID NO: 318032 - DNA, 4001 bp, Homo sapiens
tagaccaggaattgcagcatcttgcctgtggctgtgttttgcacagtttttattaatgtttgcatttctagccgggcagcacaacctcaatctgggctgagctggcagcagcgggccctgggctcacagagtcctgcccacctgagtccccaactgggcccctgaaggccttggggtctggaatctctgcattcgacctagaggacagagacagaaactagagctctaggcagggccggggacacatacaggtgggtgaaaaacccctgggcggccgcacagcctgtctggtgccagcgtggagatgtcacatcaacactgccaatccgaggaaacagggatgggggctttcatgtgcgcagacgatagggagcggccccgcacgcctggaacaaacacagacgctgcgcccgggagtcggagaagctctcaggaaacagaagttcctctcctaggtagatggaagccaggccttcctccttcacagagagccggatgcacacaggcccctcccgccacagaaccccagaaaaactgtcccacaacccccagtgaatgaccaaatcgaaaacccccaaacttgtatgccaaagccctcctaatcccgattctgctggcccctaggactgcaaggaacacgctgcccctcacgggacagttccctacatttgaggacagagcagggccagcccgggcacctgcgcagggcagggtgcaggagaccagagctcagaagggaacgccccgccctgctctcagatgccccttgagggagagttcaaggcattttgaaaataaatttaaatgatcaaaaaagagaaagaccagacctttcaggcctatccatcccccatagcagcccagggacacgccccagttgctgctctggaagaagggcccgggttccaaacaaaactcaaagttgcaatatcactcgagcgctccgcaggcccagggggcaggagcaccttgtatggttgcaggggtgtgcccagaacaagggcacccgagcaggctggcaaatgggggctgaagtcaggccgccctccccagccaaccggccagaggcgtaggtggcacccgcccgggaaggggcgccctcgcggggcggggtagacatgggcggctggagtgtttgggtggagccgattcaggcctgcgtcgggctcaactgacagggcttctttgacgctgtgtgaattcgagtgattaaaacggagactctttcagaagaagtaaaggaaggagacttgggccaccccagggcgaggacgggagagggacgctggacaccgagcccggccccgcggccctcaccgcaaacaggcgcagcacgttggcgaccatgatggagacggagctggccgaggcgcccacgacggccacgacgcgctcggggggcgcggggcgcagcggagggacgcctcccgggcagcgcacgcccacctcgtcgccgtcgccgcggccgcggatcagcgcctgcacgaagctcagcgcctgctccagcgcgtaggtgtcccgcgagcaggtgtccagcagccgcgcgcccaggcgcacgccgggcagcagctcggggtcggcgttgacgcggtccagcgcgtacagcatggcctccagccggtgcacgccctgctccttcttcagctgcccgcacgcccggcccgccgcgccccgcgcgtgcaccgggaacaggccgcccagcgtcaggccgcccgccaggcgcacagagcccgccgcgcgcgccaggcccgcctgcgccagccacgccagcggcagcagcgccacgagcagcggctcccgggctctccggggccgcgccatcggctcgtctagcgggctgcggggagacagaggggcggggagcgctctgagggcgggggaaggagagcgcgggctcggggcgcggggagggacaccggggtcctggggagaaggcgctcggggcgcgccttccacttcggctctggggagttagctcagccggcctgcccgggcctccgtctcgctcttacaagcgccgaaccctgtcgcccggggtcccgcccgaccactgcctccacccctccagccctgccgcttcccgacagcttggcccctcttcctcggggtccatccccagcgcacacccaggctcccgccccaagccagtcacctgcgccagccgctgtcggttcaggacaagtctgtgacagatgcggccgaggccctgagcgagagaggatttaaggattctagggagggatgagagaccgctccgagggtggagacccctcctgagtgtggggggtggcggtgctggctctccccgcatctccttcccctccctctcccaatctctgggtctgttttcctgttttcttgtctttggtttgcgtctgactcagactgtctggctgtctctggggctgtgtctgacacaatctctgtccatctctatctcagtcttcttctgcctctaggtctctgtttctcagtctctgtccctggctttctgcctctgtcctcttcttggaaatcttttctgtctctgtcccttcctgtctctccctgcggttatctctctctgtccctgaccccttttctgtctctctgtctctgtcctggccaccagtgctcctgactgcagttgcctaaggtattccccagctttctccttgcagaaccctgcagggggcaggggctgcctgagctgggagggcctaaggaagaggaggaagagcgaggggcaggaaggggccaggagggagaagcctttagtattagcgaacttacaacaccctgcagtcgagaaacagccctcgaggagtgagttgagttgcccaagtgcatgcagctggcatgtgtgggcatcaggattcacacccagaatggcatgaaacaaacagcccacactgccttggatggagggaggggaggggccggctttcctcgcagctcccactcccgcctattgcttgggaggatggaaccccgcggggtcgttctggctccgtataaagtctcctcgggctctgggtctgaggcagccactcgagctgcggtgctcactgtgccaacgctctctgcacctaactccccatctcatcgtggaggccaaggtgagggggcttggccaaaagatgcttttatcatccccccatccgaggcccaggatttggctctctgatgccaagagagcaaagggcgtcctggagacaggtggtgagctcctagccacagggattagcaggctcctcgtccgagggcctgagccggcttgggctccattagacaggctggattagggtggctgcggggatttggacaaggctggtagagggagcaagcaagaaacatgccacctttctctcttcccccgcctctcccaggccccgatagtttctactgccagaaccacttctcctggtggaagcccagagtcaacaggctgggcctagccctgctcctatccattttaacagtgggaagggtggggagcttggctggtgccaggccctgagcctgacattgcgaaggactgcataaactgggtttgggaggtggatgggcccttccctgttcaggacgagcctgacagctcccagcacacagcagcctcctgcttggcatgaccaaggcagccactgcccctgtctggaggacagaccatcaggaagcgggggcagcagctgggggactggcagggggtcctcgccgtgtaggagggaggcatgcacacctgtgagcagggggctggaggagaaggggaggggggtggcaggattttagacctgatggagatttggctcttggaggggtggaggatggcatagctgctggggcattccctgagaatatgaggaccagagacacagctgagcaggtcaaggagggcagaagccaagagttcgggtttgggcaggaaagtggaggcttcgtggttcatgagcctggaactgagggaagaggccagggcgggagagaaagctgaggtgggatcgccacggaggcgtttaaagccg

SEQ ID NO: 318033 - DNA, 4001 bp, Homo sapiens
attatcttgaaaatcaatctgtgagtacatgagttctttaaaacaatttttatggactggcatatactgtagagtggtcctcacggagacagctgagcaaaggcttaaagagggtaaaggagtcagctttagaaaagggaagagcatcctgggcagagcaaatagctagtttaaaggtgtaagcaagaggacttttatctctcctactttccaagctgatcttaaattcaattattataatccggtgtgtgattttatagacagttccacattttggggtcagaaaatatggtcaccgtagatctggggctaattacacacggtgaaacatcttctccctaaaaaaaccacatttatccacttgaaaaagcaggtcaaaatattctcaggggccgggcgcggtggctcacgcctgtaatcccagcactttgggaggccgaggcgtgcggatcacgaggtcaggagatcgagaccacggtgaaaccccgtctctactaaaaatacaaaaaattagctgggcgtagtggcgggcgcctgtagtcccagctactcgggaggctgaggcaggagaatggcgtgaacccgggaggcggagcttgcagtgagccgagattgtgccactgcactccagcctgggcgacagagtgagactccgtctcaaaaaaaaaaaaaaaaaaaaaaaaaaaaaaaaaaaaaaaattctcagggccagttcaaagggaaaatggccaaagcttagaccaagaaatagggttggggagttgtggccaatctcaattcctactgcttcagaactggagtagggagacagcttaccagaaggaaccatttttcttctggtcatttccttacatcaccaacaagctgccaaaaagacttgagaacggtaagcaaaaccaagtcccgaaaccctgaatgcaacctctcacttaggtgctagggtaggatgttgggtcaggtgtgttaaggtaaaaagggtgacatatgtagttaagcacatttaccagattctcccgtagcttactttactattcagaggtccaaccctacctcgtactcaactatttttattctctatcccaggaagaaacagtgtaggggcaacagtctctgagaaaattaattaacatcgctcattaaataagagcgccgattccaacgccctgactggtttccagcccgggttccaccacttcccaaatatttaagtttggaagttactcaacttttctaaacctcactttccttaactactaaatgggtaataataaaaagaaccacccataattctgcagtcggcctcgtaagcgaccaataaaagctgccgatggaacttgtcttccgaaggctgatgcaatggccgtttggagaaacaagttcagcggcctccttttactgacaggtacaacagtgcccggataacggagaaaggactggccttaggtcacacggagtgaggggagagaacccaaatttacccacaggtaccacaggctgggagaagaggccgggagagtggtacatccctcccttgggggcttaagagacttctcaccttccaggccatgcatgacctcggatctccttaccttcctcggcctaagaaagaggcacggctgatggcctcagtttccccgtctgtaaaatggggccgtgagtgcacggtcgtagaggccgagaagcttggtcccctggcctacgctcagatagctctcgccttccagcccacaaccaccccggctggctcgctagcccctcagagtcctcacgctcccgactccccgcctgcaatgcttacttgctctcccacgcggcactccaggccagtaggcgctgcacccgcagccggcccgcccacagcgaccgtacggccatgtttccaatttgggctgagaggcagcgcacgcgcacttgctgcgagtgaagagatgctcccgcttaaaaaccagcctttgcgggcgtttccctctcaggacttccggacaggaacgctatgcttccggttgcccgatgggccgcgccgttccccatccggtcgtccggagctaaggcaacacttccggctctcagtgtgttccgcgggtaggcgaggtcctagtagtaactacagtctccgtgctgggcgcagggtcggcagcaaagaaagcagatcatagctgtgcccgcatggagcttacttgatattatgagcgataaacagatacaagcgggatgtaaagtcagaatatgagcggtgtttgaaggtgaggggcaggtgtcgcggaagcctagaatagaaatctagccttgtggaaagttttcccagaggaagggggtatttgagctgagctgaagaaagggttcaggcagagggaaacatctgcagaagcctaataaagagagaagagtattgcatgtaagggactgaaatatactgaggcgggagggcaacaggactggtggttaggaagggctagatcacgtgagcggtttaaaacatcgcagcctgaaccattgcccatcactcctcccagtctttttctctaatgcccttcttatcgactgaattgtttttttaaatagtgtgtattttctcatttcctctcactaaaatataagctcttttaaggcagagatattgtctattcattcccattgagcagtgccctaatgtaggtgttcaaaattattttttttgagatggagtctcactctgtcacccaggctggagtgcagtggcacgatctcggctcactgcaacctctgcctcccaggttcaagtgattctcctgcctcagcctcctcagtagctgggattacaggcgcccactacacccggctaatttttgtatttttagtagagacagggtttcaccatgttggttaggctgggcttgaactcctgacctcaggtgatctgccttcctcagccttccaaagtgctgggattacaggcatgagccaccgcccccggcttcaaaaaacttttttgctgaatgcaatttagtctgattctgattgcaatggaatgtgaaaataaataaaacctaaaagctgttggaacctcccaaatacttgaagctttgagagagatgtggctgtggtctgagtccatgtagcatgttttgtagttctgcttcttagaattatagcttaattctcttcctcattgttcttgttctgtaatgactaggaaagagcagagaccagatttcttccctctcaattactgatgtttgtaatagacagcctcctttattgtcctgcacctaactcagactagatggtgccctgaactgaactgaccccatgacagttacatctgcaggatgtgatgttaaatgtacctttcttgaaggaaaaagaccaccttaactactcagatcattgtaactgtgcattaagccttgcatagaaagatgttgaaattctgttaaacctcactgaacccaacctttcacactttggaacactgacttccatcttttttaagacagacatatttttccattctgtgcttcctgggcaggccatcctcaacctttgtgcttgaataaactctctttaaactagattctgaccttttaaattattttagattgacagggaacatgtgacaaaggctttcatgtttaaagagtcactttgactgctgtgtgaagcagattgcaaggtgtaagaaaagaggtagggaaggcaatatgttgcagtagcccaggcaagatggggctatattctgtcctggaagaacagagagagaccttcctaaccactgtaaagtaactgtgtccagcacccttttagtttcttagtattttatttcttttgcttccttgttaaggttttttcctccaactagaatgtgagcttcatgaggtgtctgtcttgttcaccactgatttctgacatctagtatagtaggtactcaagtatttgttgaatgacttaattaagttggatagtgtcagtgaagataggaagatatggatgaattttagagatttaggatggaaagctgacag

SEQ ID NO: 318034 - DNA, 4001 bp, Homo sapiens
gctgaggcaggaggatcccttgagcccaggagtttgagattgctgtgagttatgatcataccactgcactccagcctggttgacagatgagaccctgtctctaaaaaagaaaaaaaaaattatacattttcataaatgctaaatttagcacatgacttatgaagatcaagcaacccaaaatttatctactgtggccttgcataaggtttgcatgaactgtgactttgtaaattctaaatctacaaataagacatagttaaaaagaaatagtataagtacaagactagccaagtgcctaggacctaataagcactcaacaaatggtagctattattattatgtaataatatggttctctaaaaaaaggaacatgccctaaagcaaaacatttgtagcatcagaagatctggattcttattctgactctgtacccaatgaccctgtagtatcagatggatcccttaacaacttggcactcaatttttctcttctgcaaaatgggaatgaccatactttggcctttctccccaaggttatagtaaagacccaatgccatagatatagacagagatagtacatgatgacactttgtactgcatacgtcaccccattaagataagaggtcattcatttcagccccttttaatatcaaaaacaagcctagtgttatcttcggtaattgtgaacatgcccataattatacttttaccaatgccagtaaagccagtaatacatttgtctgcaatagatgtgttatctattcccttaggaaactaacaataaaaataattcaagagtaattatctggctttcacactttaaagatgagaacacatcctggtgtgctattcattaataacgtggatacattatataattgtattttatcttttttaagaagtcattcatggtcccactgacagcatatatacatctcctatgaatttttggataccagtgtatgttttccaggttctaccttaaaagaaaatcatgtatggacttttgattatccatggtactgggaagtaattgaaattcatagattaaacacattcttcaatcgaaccattagctcaaacttcttcctcacataacatatcctctggctgatttgcgtttcaccatcccttcccaggactccaactacccagagcttatgctaaggagcaatggaaaggaaaaataaatagacaaagcaggcagtatgaggaaggcaataggggtaaaaaacaagacatggataaactgcaagctgagtaattggctggagtaaaatgagcactttcaaatactcagctctttcaggaaacaaaatgactgcataattgtctaaaaccgcagtctgacaacctgaaaaccactgcacctctatttaatttacattccaggaaaactcagtcaaagatccaattacaatgtattaccttggatggaatttgaatactatatatgctcattgcactttccaattagtagtcaacaagcatgttatttttaccccagaaatattcgtctaataacaacttcccatttggtgcaccaacagttctggttggtaccggagggggagcaagacacaaatctgaaccatttaggagtttctctaaacacgttttaggaagccctacccttaaagcctatatgccatgcacaataccaaccttatggtcattcgccttgtaatcgttgaaccgaggctggccgcctgccaaggtgtaggcattaccctctctaaacacactgatcctctgagcagtcagcttaggggagcacatctggggcctggggacttccccagacccataaacaccatccattgtttcaagagactcttgcagaaaactgtgagggtattcctcctttggtgactctaattcctgcccatcctcaaagacctgcttcaatactcgaccgctgtaggaggaggagattttaaatcgtactttccggggtttgccatcactcttctgattcagctttttctcagggtcctccatcagcagaaagttgaccctgtggtctccagccttccgtgcagccggtgaaacttgggcctctgagaaaaaggcattttattttctctcctcctgcatataattaattcaagttgttgctggggtatggtcagtttacagcaactgacacccatacattaaatattgatagaccctcatgaaaaggcaggtgattctggtttgatggagtggatggaatataagacaagattgattcttctcataatcccaagctcaccatgacttcaccccaaccctaacctttcttaacctgaggatgaagaagtttatttagactgaacatgtgccaattcaataaggatcagacactcaattagttaacaagtgtcttcttattgttagcaatgacaattaaaatctagtgagcatttcataagtaccagagattgttacatgcattattttatttcatcctcacgataaccctacaaagaaaatcttacctttgttttacacaggggaaagtgaggcttagagccacttgtcatttatcttcatcatttgtctgctctattacacctaagtaagtgacagagcagggatttgaacccagatctatctgactccaaaacccaagatcagcccacacaaccagaagttttccagttctggttctagaagagggaatgacgtcctagatacagtggaggttcttggaggctgctgctaagaacaggagaaggccgagggtcctggattctgggccttctccccctacgctaaccagagcacctccacttggtatgtattttacatttaagatttcatttgcaatcacagcacaagtccccattgcctgttggacttcgtaaatgcctgacactgaactagtggctggagtgaatagcacagaagcatgtgacctgggcctgagaacagtcctacaatcccatacagacctcacacaggtgaaataataacctcatgcttagagagcaaactgcccacagctgaatcccagaatagccactctgggaaggaagtggtctctaaggagacaaggatggaagaaggtttgtaaagaaaagggcccttgggctgggtagaaaatggtaggttggatgtgaggagctgaaagtggagtaaagcctttctccctgtctttgctaccagcatcaccatttactgagttacccaaattgacccctcctattcccctacagccattcgcttggattctttttttttattattttattttatttttttttttttgagacggagtctcactctgttgccaggctggagtgcagtggtacgatctcggctcactgcaacctccacctcctgagttcgagcaattctcatgcctcagcctcccgagtagctgggactacaggcacacgccaccatgcccagctaatttttgtatttttagtagagatggagtttcaccatgttggccaggatggtctcaatctcttgacctcgtgatccgcctgccttgacctcccaaagtgctgggactacaggcatgagccaccgcacccagcccattcacatggattctttcaccactgccttctttcatctacccctatcaccctggccctagggcaaaccctcatcactttgatttttaaagttgcagctgtctcccaaggacttccctactcacccccaattccattctccatattgatgtgagagcaatagtccaaaacaacaaatccacaggtgtcagtctcttgctgaaaaatcttttctagtgcatcagggcttaagtcttaactgttccatgtgacaagcaaagcccctcaaaaaccagcctcaccttccttcctttccagccttgccctctgtcactcttccaggggctgcctgggattggtgttccagttacaccaacaagcttacccatttctcaaacccacaagtttctgtctcttatccagtactctgtctcctgatttagagtgtcaaatttccattcctccttcaagtcacacctcaaatgtcact

SEQ ID NO: 318035 - DNA, 4001 bp, Homo sapiens
tgcctcagcctcccgagtagctgggattacaagagcccgccaccacacctggctaacttttgtgtttttagtagaaatggggttttgccatggtggccaggctggtctcgaactcctgacctcaggtgacccactcacctcggcctcccaaagtgctgggattacaggcgtgagtcaccacacccagcctcaactgaacattttgctcctccctgttttctgttacgtattgtgaactttaaaaatgaaaaactcgcataacgttctcaacgtttttaaactcaaattcttggcagggcacacagtggctcaaacctgtaatcccagcactttgagaggccaaggcaaaaggattgcttgagttcaggcgctcagatcagcctgggcaataaccttgtctctacaaaacatcaaaaaattagctgggcgaggtggcgagtacttgagtcccagctacttgggaagcaaaagtgggaggatgacttgagcccaggagagtcgaggctactatgttcactactgcactacagactgggtgacagagtgagaccctatctcaaaataaataaaataattacaaatatataataaatattataaatataaaagtaaatagcaactgagagacttttggctgaccatatcaaaggaattcttttttttcttttttttttgagacaagagtcttgctctgtcgcccaagcttggagtgcagtgacgcaatctcggctcactgcaacctccgcctccagggttcaagcgattctactgtctcttctgtctcccgaatagctgagattaaggcacacgccaccacagctaacctttttatttttagtagagacggggtttcaccagcctgttggccaggcctggtctcgaattcctgaccacaactggtccgcccacctcggtcctccaaagtgttgggattacaggcatgagtcaccacgcccggctaaaaggacttcttaattagagctgcctgcaacgggaaatccgactggacaggaggtattaaggtccctaaaactgcagacgttcaatgggaagtctgattgtaaacatgcatgctgtttaaaggattcatgcatcctgaagatggactttgtaaagatctccaatggcctgtcacttcccgtcagtccattttcttcttaaaaatatcagcgaggccaggtgggtggctcacacctgtaatcccagcactgtgggaggccgaggcgggaggatcacggggtcaagaaatcaagaccatcctagccaacatggtgaaaccccgtctctactgaaaatacaaaaattagctgggcgtggtggcacgcgcctgtagttccagctactcgggaggctgaggaaggagaatcgcttgaacccgggaggtggaggttgcagtgagccgagatcgcgccgctgcgctccagcctggcgacagggcgagactccgtctcgaagaaaaaaaaaaatttttaagtgatctgtttcctggaatccaaccccaaacaatccacgttcctcagcataagcctactggtgtgattcccgttacatgagctcggaatgctatctgccaacaaatgagagcaccaaacatcccaatttaagaagcttttcttcacaccttaccaagctatgtgaaactggcaagggtgattactgtccttgtttttcaggtatgggattcaggctcagaggttggtcactttctcaagcgggtcacaaactcgaaccctgaaccatcatttctaaaagtcgcgcttttacttagggagagacggcctgcagcttccctccctactctgcggctccccagacgaaagttaccttcctctgccttcacaagctccttcacatcctccttccctatgagcccaggcagggcaattcaacctccgttccccgccacgaaaacgctcccagccgcctagctagccagacggcctgccccacctctgcgcctcacagacttccacacgcggactcaccggcgccgctagaaggactctcagccggaaactccgcccgacactcctctccgccgctttaggggcgccccggaagtcattccgccgcgccctgcggccacgccgaaacgttccggatgctgcagagtgcagctgccggagcggggcgctcaggtgcagggcatggcctccgctgagttggggcgcggaaagggacggtgttccagctggaattcacagagaaccggaaagagtgatcgccattcgctctcggaaggtcgaaggctctgcagccatcgacctgggttctgaggagctcgatctggtttttctacttctaaaaggttgggatgaaggaccctggccacagaagtaaagccagaattatccttgcttcttgctgtgtatttcaggactcctccattgctcttgctgttcattcaacaaacattgagcatctactttgagcctgatgcatgtctaagcactgaagaaataacaatgaaaaactgtcaaaaatccttgctctcgtggagttttccttctccaaggggagtcagtatgaagaaaaacatatactatatgaaatggtgataatgctgtggagaaaaactaagcactgaaggggaaaagtttgcagtttaaaatagggtggccaggccgggtgcgatggttcacacctgtaatcccaggcatggtgatttgggaggccgagcgggggtggatcatcggagggcaggagttcgagaccagcctggccaacatagtgaattccgtctctactaaaaatacaaaaacattagccgggcgtgctggcaggcgcctgtaatcccagctactcgggaggctgaggcaggagaatcgcttgaatccaggaggcacaggttgcagtgagccaaccttgcactccagcctgggtgacagagacttcatctcaaaaaataaaatagggtggccagaggagtcctcgctgggaagacagttaagccatgacctgaatgaggaagggtgttaaccctactgatacctaggggaaaagctcttcagacaaagagagctgcaagtgcaaaggccctgaggtagaagtgcattggggtctttgacgactgcaggagtgagcaggggatgagtggtggcagctgcaatcagaagggtaaggtggggaggagaggctgtgagcactgttaagaactttgggggaattgtgatggcttggaccagcagctggtgagaagtgactgaattctaaatcttaccaatacactggatgtgtgttatgagaaaagaatcaaggatacctccatagtctttagctgagcaactgaaaggttggggttgcaattattaaaatgttggcggggtgggtaagatcaattcagttttggacaagttgtctgactgccaattaacacaagtggaattactggcatttcccatacttgagaaatggagaggcagtgcacccccagatgagaaaagggttaggaataacacaaaggaactgcagaagctagggcctctttccttccccatcagcatactcatcccctccactgcctttattttattgttaaaaatttttcccatctctgttgtctccctcaaaaatataaacagaaggtatcttgcatagcagtggaaagaacagccctggatttaaaatcaggctctgacacactggctgggtgacctcaagcaagtcacaacccaagtctatgaactaatgtgtaaaatggggttgtctccaccaaccctgcagggcttagtgggaactccataatcagtctcatttcctcccagaagacaggattttaaaagggagaggaggggaaattagtatcgcagtgccaggaagcttccatgcttgcctccctcccacctttgacctcattagaggactcacacacaaattccacacttttccttttgtgcccttccttcctatccacacttttgcttccttccatcttaattgaccatcctatttgcaagacgggatgcattcctctaggacaaacagcctagaggaatcccaag

SEQ ID NO: 318036 - DNA, 4001 bp, Homo sapiens
gcctcagcctcccgagtagctgggattacaagagcccgccaccacacctggctaacttttgtgtttttagtagaaatggggttttgccatggtggccaggctggtctcgaactcctgacctcaggtgacccactcacctcggcctcccaaagtgctgggattacaggcgtgagtcaccacacccagcctcaactgaacattttgctcctccctgttttctgttacgtattgtgaactttaaaaatgaaaaactcgcataacgttctcaacgtttttaaactcaaattcttggcagggcacacagtggctcaaacctgtaatcccagcactttgagaggccaaggcaaaaggattgcttgagttcaggcgctcagatcagcctgggcaataaccttgtctctacaaaacatcaaaaaattagctgggcgaggtggcgagtacttgagtcccagctacttgggaagcaaaagtgggaggatgacttgagcccaggagagtcgaggctactatgttcactactgcactacagactgggtgacagagtgagaccctatctcaaaataaataaaataattacaaatatataataaatattataaatataaaagtaaatagcaactgagagacttttggctgaccatatcaaaggaattcttttttttcttttttttttgagacaagagtcttgctctgtcgcccaagcttggagtgcagtgacgcaatctcggctcactgcaacctccgcctccagggttcaagcgattctactgtctcttctgtctcccgaatagctgagattaaggcacacgccaccacagctaacctttttatttttagtagagacggggtttcaccagcctgttggccaggcctggtctcgaattcctgaccacaactggtccgcccacctcggtcctccaaagtgttgggattacaggcatgagtcaccacgcccggctaaaaggacttcttaattagagctgcctgcaacgggaaatccgactggacaggaggtattaaggtccctaaaactgcagacgttcaatgggaagtctgattgtaaacatgcatgctgtttaaaggattcatgcatcctgaagatggactttgtaaagatctccaatggcctgtcacttcccgtcagtccattttcttcttaaaaatatcagcgaggccaggtgggtggctcacacctgtaatcccagcactgtgggaggccgaggcgggaggatcacggggtcaagaaatcaagaccatcctagccaacatggtgaaaccccgtctctactgaaaatacaaaaattagctgggcgtggtggcacgcgcctgtagttccagctactcgggaggctgaggaaggagaatcgcttgaacccgggaggtggaggttgcagtgagccgagatcgcgccgctgcgctccagcctggcgacagggcgagactccgtctcgaagaaaaaaaaaaatttttaagtgatctgtttcctggaatccaaccccaaacaatccacgttcctcagcataagcctactggtgtgattcccgttacatgagctcggaatgctatctgccaacaaatgagagcaccaaacatcccaatttaagaagcttttcttcacaccttaccaagctatgtgaaactggcaagggtgattactgtccttgtttttcaggtatgggattcaggctcagaggttggtcactttctcaagcgggtcacaaactcgaaccctgaaccatcatttctaaaagtcgcgcttttacttagggagagacggcctgcagcttccctccctactctgcggctccccagacgaaagttaccttcctctgccttcacaagctccttcacatcctccttccctatgagcccaggcagggcaattcaacctccgttccccgccacgaaaacgctcccagccgcctagctagccagacggcctgccccacctctgcgcctcacagacttccacacgcggactcaccggcgccgctagaaggactctcagccggaaactccgcccgacactcctctccgccgctttaggggcgccccggaagtcattccgccgcgccctgcggccacgccgaaacgttccggatgctgcagagtgcagctgccggagcggggcgctcaggtgcagggcatggcctccgctgagttggggcgcggaaagggacggtgttccagctggaattcacagagaaccggaaagagtgatcgccattcgctctcggaaggtcgaaggctctgcagccatcgacctgggttctgaggagctcgatctggtttttctacttctaaaaggttgggatgaaggaccctggccacagaagtaaagccagaattatccttgcttcttgctgtgtatttcaggactcctccattgctcttgctgttcattcaacaaacattgagcatctactttgagcctgatgcatgtctaagcactgaagaaataacaatgaaaaactgtcaaaaatccttgctctcgtggagttttccttctccaaggggagtcagtatgaagaaaaacatatactatatgaaatggtgataatgctgtggagaaaaactaagcactgaaggggaaaagtttgcagtttaaaatagggtggccaggccgggtgcgatggttcacacctgtaatcccaggcatggtgatttgggaggccgagcgggggtggatcatcggagggcaggagttcgagaccagcctggccaacatagtgaattccgtctctactaaaaatacaaaaacattagccgggcgtgctggcaggcgcctgtaatcccagctactcgggaggctgaggcaggagaatcgcttgaatccaggaggcacaggttgcagtgagccaaccttgcactccagcctgggtgacagagacttcatctcaaaaaataaaatagggtggccagaggagtcctcgctgggaagacagttaagccatgacctgaatgaggaagggtgttaaccctactgatacctaggggaaaagctcttcagacaaagagagctgcaagtgcaaaggccctgaggtagaagtgcattggggtctttgacgactgcaggagtgagcaggggatgagtggtggcagctgcaatcagaagggtaaggtggggaggagaggctgtgagcactgttaagaactttgggggaattgtgatggcttggaccagcagctggtgagaagtgactgaattctaaatcttaccaatacactggatgtgtgttatgagaaaagaatcaaggatacctccatagtctttagctgagcaactgaaaggttggggttgcaattattaaaatgttggcggggtgggtaagatcaattcagttttggacaagttgtctgactgccaattaacacaagtggaattactggcatttcccatacttgagaaatggagaggcagtgcacccccagatgagaaaagggttaggaataacacaaaggaactgcagaagctagggcctctttccttccccatcagcatactcatcccctccattgcctttattttattgttaaaaatttttcccatctctgttgtctccctcaaaaatataaacagaaggtatcttgcatagcagtggaaagaacagccctggatttaaaatcaggctctgacacactggctgggtgacctcaagcaagtcacaacccaagtctatgaactaatgtgtaaaatggggttgtctccaccaaccctgcagggcttagtgggaactccataatcagtctcatttcctcccagaagacaggattttaaaagggagaggaggggaaattagtatcgcagtgccaggaagcttccatgcttgcctccctcccacctttgacctcattagaggactcacacacaaattccacacttttccttttgtgcccttccttcctatccacacttttgcttccttccatcttaattgaccatcctatttgcaagacgggatgcattcctctaggacaaacagcctagaggaatcccaagc

SEQ ID NO: 318037 - DNA, 4001 bp, Homo sapiens
gcctcagcctcccgagtagctgggattacaagagcccaccaccacacctggctaacttttgtgtttttagtagaaatggggttttgccatggtggccaggctggtctcgaactcctgacctcaggtgacccactcacctcggcctcccaaagtgctgggattacaggcgtgagtcaccacacccagcctcaactgaacattttgctcctccctgttttctgttacgtattgtgaactttaaaaatgaaaaactcgcataacgttctcaacgtttttaaactcaaattcttcgcagggcacagtggctcaaacctgtaatcccagcactttgagaggccaaggcaaaaggattgcttgagttcaggcgctcagatcagcctgggcaataaccttgtctctacaaaacatcaaaaaattagctgggcgaggtggcgagtacttgagtcccagctacttgggaagcaaaagtgggaggatggcttgagcccaggagagtcgaggctactatgttcactactgcactccagactgggtgacagagtgagaccctatctcaaaataaataaaataattacaaatatataataaatattataaatataaaagtaaatagcaactgagagacttttggctgaccatatcaaaggaattcttttttttcttttttttctgagacaagagtcttgctctgtcgcccaagcttggagtgcagtgacgcaatctcggctcactgcaacctccgcctccagggttcaagcgattctactgtctcttctgtctcccgaatagctgagattaaggcacacgccaccacagctaacctttttatttttagtagagacggggtttcaccagcctgttggccaggcctggtctcgaattcctgaccacaactggtccgcccacctcggtcctccaaagtgttgggattacaggcatgagtcaccacgcccggctaaaaggacttcttaattagagctgcctgcaatgggaaatccgactggacaggaggtattaaggtccctaaaactgcagacgttcaatgggaagtctgattgtaaacatgcatgctgtttaaaggattcatgcatcctgaagatggactttgtaaagatctccaatggcctgtcacttcccaacagtccattttcttcttaaaaatatcaccgaggccaggtgggtggctcacacctgtaatcccagcactgtgggaggccgaggcgggaggatcacgaggtcaagaaatcaagaccatcctagccaacatggtgaaaccccgtctctactgaaaatacaaaaattagctgggcgtggtggcacgcgcctgtagttccagctactcgggaggctgaggaaggagaatcgcttgaacccgggaggtggaggttgcagtgagccgagatcgcgccgctgcactccagcctggcgacagggcgagactccgtctcgaagaaaaaaaaatttttttaagtgatctgtttcctggaatccaaccccaaacaatccacgttcctcagcataagcctactggtgtgattcccgttacatgagctcggaatgctatctgccaacaaatgagagcaccaaacatcccaatttaagaagcttttcttcacaccttaccaagctatgtgaaactggcaagggtgattactgtccttgtttttcaggtatgggattcaggctcagaggttggtcactttctcaagcgggtcacaaactcgaaccctgaaccatcatttctaaaagtcgcgcttttacttagggagagacggcctgcagcttccctccctactctgcggctccccagacgaaagttaccttcctctgccttcacaagctccttcacatcctccttccctatgagcccaggcagggcaattcaacctccgttccccgccacgaaaacgctcccagccgcctagctagtcagacggcctgccccacctctgcgcctcacagacttccacacgcggactcaccggcgccgctagaaggactctcagccggaaactcagcccgacactcctctccgccgctttaggggcgccccggaagtcattccgccgcgccctgcggccacgccgaaacgttccggatgctgcagagtgcagctgccggagcggggcgctcaggtgcagggcatggcctccgctgagttggggcgcggaaagggacggtgttccagctggaattcgcagagaaccggaaagagtgatcgccattcgctctcggaaggtcgaaggctctgcagccatcgacctgggttctgaggagctcgatcttgtctttctacttctaaaaggttgggatgaaggaccctggccacagaagtaaagccagaattatccttgcttcttgctgtgtatttcaggactcctccattgctcttgctgttcattcaacaaacattgagcatctactttgagcctgatgcatgtctaagcactgaggaaataacaatgaaaaactgacaaaaatccttgctctcgtggagttttccttctccaaggggagtcagtatgaagaaaaacatatactatatgaaatggtgataatgctgtggagaaaaactaagcactgaaggggagaagtttgcagtttaaaatagggtggccaggccgggtgcgatggttcacgcctgtaatcccaggcatggtgatttgggaggccgagcgggggtggatcatcggagggcaggacttcgagaccagcctggccaacatagtgaattccgtctctactaaaaatacaaaaacattagccgggcgtgctggcaggcgcctgtaatcccagctactcgggaggctgaggcaggagaatcgcttgaatccaggaggcacaggttgcagtgagccaaccttgcactccagcctgggtgacagagacttcatctcaaaaaataaaatagggtggccagaggagtcctcgctgggaagacagttaagccatgacctgaatgaggaagggtgttaaccctgctgatacctaggggaaaagctcttcagacaaagagagctgcaagtgcaaaggccctgaggtagaagtgcattggggtctttgacgactgcaggagtgagcaggggatgagtggtggaagctgcaatcagaagggtaaggtggggaggagaggctgtgagcactgttaagaactttgggggaattgtgatggcttggaccagcagctggtgagaagtgactgaattctaaatcttaccaatacactggatgtgtgttatgagaaaagaatcaaggatacctccatagtctttagctgagcaactgaaaggttggggttgcaattattaaaatgttggcggggtgggtaagatcaattcagttttggacaagttgtatgactgccaattaacacaagtggaattactggcatttcccatacttgagaaatggagaggcagtgcacccccagatgagaaaagggttaggaataacacaaaggaactgcagaagctagggcctctttccttccccatcagcatactcatcccctccattgcctttattttattgttaaaaatttttcccatctctgttgtctccctcaaaaatataaacagaaggtatcttgcatagcagtggaaagaacagccctggatttaaaatcaggctctgacacactggctgggtgacctcaagcaagtcacaacccaagtctatgaactaatgtgtaaaatggggttgtctccaccaaccctgcagggcttagtgggaactccataatcagtctcatttcctcccagaagacaggattttaaaagggagaggaggggaaattagtatcgcagtgccaggaagcttccatgcttgcctccctcccacctttgacctcattagaggactcacacacaaattccacacttttccttttgtgcccttccttcctatccacacttttgcttccttccatcttaattgaccatcctatttgcaagacgggatgcattcctctaggacaaacagcctagaggaatcccaagccc

SEQ ID NO: 318038 - DNA, 4001 bp, Homo sapiens
tcagcctcccgagtagctgggattacaagagcccgccaccacacctggctaacttttgtgtttttagtagaaatggggttttgccatggtggccaggctggtctcgaactcctgacctcaggtgacccactcacctcggcctcccaaagtgctgggattacaggcgtgagtcaccacacccagcctcaactgaacattttgctcctccctgttttctgttacgtattgtgaactttaaaaatgaaaaactcgcataacgttctcaacgtttttaaactcaaattcttggcagggcacacagtggctcaaacctgtaatcccagcactttgagaggccaaggcaaaaggattgcttgagttcaggcgctcagatcagcctgggcaataaccttgtctctacaaaacatcaaaaaattagctgggcgaggtggcgagtacttgagtcccagctacttgggaagcaaaagtgggaggatgacttgagcccaggagagtcgaggctactatgttcactactgcactacagactgggtgacagagtgagaccctatctcaaaataaataaaataattacaaatatataataaatattataaatataaaagtaaatagcaactgagagacttttggctgaccatatcaaaggaattcttttttttcttttttttttgagacaagagtcttgctctgtcgcccaagcttggagtgcagtgacgcaatctcggctcactgcaacctccgcctccagggttcaagcgattctactgtctcttctgtctcccgaatagctgagattaaggcacacgccaccacagctaacctttttatttttagtagagacggggtttcaccagcctgttggccaggcctggtctcgaattcctgaccacaactggtccgcccacctcggtcctccaaagtgttgggattacaggcatgagtcaccacgcccggctaaaaggacttcttaattagagctgcctgcaacgggaaatccgactggacaggaggtattaaggtccctaaaactgcagacgttcaatgggaagtctgattgtaaacatgcatgctgtttaaaggattcatgcatcctgaagatggactttgtaaagatctccaatggcctgtcacttcccgtcagtccattttcttcttaaaaatatcagcgaggccaggtgggtggctcacacctgtaatcccagcactgtgggaggccgaggcgggaggatcacggggtcaagaaatcaagaccatcctagccaacatggtgaaaccccgtctctactgaaaatacaaaaattagctgggcgtggtggcacgcgcctgtagttccagctactcgggaggctgaggaaggagaatcgcttgaacccgggaggtggaggttgcagtgagccgagatcgcgccgctgcgctccagcctggcgacagggcgagactccgtctcgaagaaaaaaaaaaatttttaagtgatctgtttcctggaatccaaccccaaacaatccacgttcctcagcataagcctactggtgtgattcccgttacatgagctcggaatgctatctgccaacaaatgagagcaccaaacatcccaatttaagaagcttttcttcacaccttaccaagctatgtgaaactggcaagggtgattactgtccttgtttttcaggtatgggattcaggctcagaggttggtcactttctcaagcgggtcacaaactcgaaccctgaaccatcatttctaaaagtcgcgcttttacttagggagagacggcctgcagcttccctccctactctgcggctccccagacgaaagttaccttcctctgccttcacaagctccttcacatcctccttccctatgagcccaggcagggcaattcaacctccgttccccgccacgaaaacgctcccagccgcctagctagccagacggcctgccccacctctgcgcctcacagacttccacacgcggactcaccggcgccgctagaaggactctcagccggaaactccgcccgacactcctctccgccgctttaggggcgccccggaagtcattccgccgcgccctgcggccacgccgaaacgttccggatgctgcagagtgcagctgccggagcggggcgctcaggtgcagggcatggcctccgctgagttggggcgcggaaagggacggtgttccagctggaattcacagagaaccggaaagagtgatcgccattcgctctcggaaggtcgaaggctctgcagccatcgacctgggttctgaggagctcgatctggtttttctacttctaaaaggttgggatgaaggaccctggccacagaagtaaagccagaattatccttgcttcttgctgtgtatttcaggactcctccattgctcttgctgttcattcaacaaacattgagcatctactttgagcctgatgcatgtctaagcactgaagaaataacaatgaaaaactgtcaaaaatccttgctctcgtggagttttccttctccaaggggagtcagtatgaagaaaaacatatactatatgaaatggtgataatgctgtggagaaaaactaagcactgaaggggaaaagtttgcagtttaaaatagggtggccaggccgggtgcgatggttcacacctgtaatcccaggcatggtgatttgggaggccgagcgggggtggatcatcggagggcaggagttcgagaccagcctggccaacatagtgaattccgtctctactaaaaatacaaaaacattagccgggcgtgctggcaggcgcctgtaatcccagctactcgggaggctgaggcaggagaatcgcttgaatccaggaggcacaggttgcagtgagccaaccttgcactccagcctgggtgacagagacttcatctcaaaaaataaaatagggtggccagaggagtcctcgctgggaagacagttaagccatgacctgaatgaggaagggtgttaaccctactgatacctaggggaaaagctcttcagacaaagagagctgcaagtgcaaaggccctgaggtagaagtgcattggggtctttgacgactgcaggagtgagcaggggatgagtggtggcagctgcaatcagaagggtaaggtggggaggagaggctgtgagcactgttaagaactttgggggaattgtgatggcttggaccagcagctggtgagaagtgactgaattctaaatcttaccaatacactggatgtgtgttatgagaaaagaatcaaggatacctccatagtctttagctgagcaactgaaaggttggggttgcaattattaaaatgttggcggggtgggtaagatcaattcagttttggacaagttgtctgactgccaattaacacaagtggaattactggcatttcccatacttgagaaatggagaggcagtgcacccccagatgagaaaagggttaggaataacacaaaggaactgcagaagctagggcctctttccttccccatcagcatactcatcccctccattgcctttattttattgttaaaaatttttcccatctctgttgtctccctcaaaaatataaacagaaggtatcttgcatagcagtggaaagaacagccctggatttaaaatcaggctctgacacactggctgggtgacctcaagcaagtcacaacccaagtctatgaactaatgtgtaaaatggggttgtctccaccaaccctgcagggcttagtgggaactccataatcagtctcatttcctcccagaagacaggattttaaaagggagaggaggggaaattagtatcgcagtgccaggaagcttccatgcttgcctccctcccacctttgacctcattagaggactcacacacaaattccacacttttccttttgtgcccttccttcctatccacacttttgcttccttccatcttaattgaccatcctatttgcaagacgggatgcattcctctaggacaaacagcctagaggaatcccaagcccc

SEQ ID NO: 318039 - DNA, 4001 bp, Homo sapiens
ctccgagttcaagtgatcctcctgcctcagcctcccgagtagctgggattacaagagcccaccaccacacctggctaacttttgtgtttttagtagaaatggggttttgccatggtggccaggctggtctcgaactcctgacctcaggtgacccactcacctcggcctcccaaagtgctgggattacaggcgtgagtcaccacacccagcctcaactgaacattttgctcctccctgttttctgttacgtattgtgaactttaaaaatgaaaaactcgcataacgttctcaacgtttttaaactcaaattcttcgcagggcacagtggctcaaacctgtaatcccagcactttgagaggccaaggcaaaaggattgcttgagttcaggcgctcagatcagcctgggcaataaccttgtctctacaaaacatcaaaaaattagctgggcgaggtggcgagtacttgagtcccagctacttgggaagcaaaagtgggaggatggcttgagcccaggagagtcgaggctactatgttcactactgcactccagactgggtgacagagtgagaccctatctcaaaataaataaaataattacaaatatataataaatattataaatataaaagtaaatagcaactgagagacttttggctgaccatatcaaaggaattcttttttttcttttttttctgagacaagagtcttgctctgtcgcccaagcttggagtgcagtgacgcaatctcggctcactgcaacctccgcctccagggttcaagcgattctactgtctcttctgtctcccgaatagctgagattaaggcacacgccaccacagctaacctttttatttttagtagagacggggtttcaccagcctgttggccaggcctggtctcgaattcctgaccacaactggtccgcccacctcggtcctccaaagtgttgggattacaggcatgagtcaccacgcccggctaaaaggacttcttaattagagctgcctgcaatgggaaatccgactggacaggaggtattaaggtccctaaaactgcagacgttcaatgggaagtctgattgtaaacatgcatgctgtttaaaggattcatgcatcctgaagatggactttgtaaagatctccaatggcctgtcacttcccaacagtccattttcttcttaaaaatatcaccgaggccaggtgggtggctcacacctgtaatcccagcactgtgggaggccgaggcgggaggatcacgaggtcaagaaatcaagaccatcctagccaacatggtgaaaccccgtctctactgaaaatacaaaaattagctgggcgtggtggcacgcgcctgtagttccagctactcgggaggctgaggaaggagaatcgcttgaacccgggaggtggaggttgcagtgagccgagatcgcgccgctgcactccagcctggcgacagggcgagactccgtctcgaagaaaaaaaaatttttttaagtgatctgtttcctggaatccaaccccaaacaatccacgttcctcagcataagcctactggtgtgattcccgttacatgagctcggaatgctatctgccaacaaatgagagcaccaaacatcccaatttaagaagcttttcttcacaccttaccaagctatgtgaaactggcaagggtgattactgtccttgtttttcaggtatgggattcaggctcagaggttggtcactttctcaagcgggtcacaaactcgaaccctgaaccatcatttctaaaagtcgcgcttttacttagggagagacggcctgcagcttccctccctactctgcggctccccagacgaaagttaccttcctctgccttcacaagctccttcacatcctccttccctatgagcccaggcagggcaattcaacctccgttccccgccacgaaaacgctcccagccgcctagctagtcagacggcctgccccacctctgcgcctcacagacttccacacgcggactcaccggcgccgctagaaggactctcagccggaaactcagcccgacactcctctccgccgctttaggggcgccccggaagtcattccgccgcgccctgcggccacgccgaaacgttccggatgctgcagagtgcagctgccggagcggggcgctcaggtgcagggcatggcctccgctgagttggggcgcggaaagggacggtgttccagctggaattcgcagagaaccggaaagagtgatcgccattcgctctcggaaggtcgaaggctctgcagccatcgacctgggttctgaggagctcgatcttgtctttctacttctaaaaggttgggatgaaggaccctggccacagaagtaaagccagaattatccttgcttcttgctgtgtatttcaggactcctccattgctcttgctgttcattcaacaaacattgagcatctactttgagcctgatgcatgtctaagcactgaggaaataacaatgaaaaactgacaaaaatccttgctctcgtggagttttccttctccaaggggagtcagtatgaagaaaaacatatactatatgaaatggtgataatgctgtggagaaaaactaagcactgaaggggagaagtttgcagtttaaaatagggtggccaggccgggtgcgatggttcacgcctgtaatcccaggcatggtgatttgggaggccgagcgggggtggatcatcggagggcaggacttcgagaccagcctggccaacatagtgaattccgtctctactaaaaatacaaaaacattagccgggcgtgctggcaggcgcctgtaatcccagctactcgggaggctgaggcaggagaatcgcttgaatccaggaggcacaggttgcagtgagccaaccttgcactccagcctgggtgacagagacttcatctcaaaaaataaaatagggtggccagaggagtcctcgctgggaagacagttaagccatgacctgaatgaggaagggtgttaaccctgctgatacctaggggaaaagctcttcagacaaagagagctgcaagtgcaaaggccctgaggtagaagtgcattggggtctttgacgactgcaggagtgagcaggggatgagtggtggaagctgcaatcagaagggtaaggtggggaggagaggctgtgagcactgttaagaactttgggggaattgtgatggcttggaccagcagctggtgagaagtgactgaattctaaatcttaccaatacactggatgtgtgttatgagaaaagaatcaaggatacctccatagtctttagctgagcaactgaaaggttggggttgcaattattaaaatgttggcggggtgggtaagatcaattcagttttggacaagttgtatgactgccaattaacacaagtggaattactggcatttcccatacttgagaaatggagaggcagtgcacccccagatgagaaaagggttaggaataacacaaaggaactgcagaagctagggcctctttccttccccatcagcatactcatcccctccattgcctttattttattgttaaaaatttttcccatctctgttgtctccctcaaaaatataaacagaaggtatcttgcatagcagtggaaagaacagccctggatttaaaatcaggctctgacacactggctgggtgacctcaagcaagtcacaacccaagtctatgaactaatgtgtaaaatggggttgtctccaccaaccctgcagggcttagtgggaactccataatcagtctcatttcctcccagaagacaggattttaaaagggagaggaggggaaattagtatcgcagtgccaggaagcttccatgcttgcctccctcccacctttgacctcattagaggactcacacacaaattccacacttttccttttgtgcccttccttcctatccacacttttgcttccttccatcttaattgaccatcctatttgcaagacgggatgcattcctctaggacaaa

SEQ ID NO: 318040 - DNA, 4001 bp, Homo sapiens
cgagttcaagtgatcctcctgcctcagcctcccgagtagctgggattacaagagcccgccaccacacctggctaacttttgtgtttttagtagaaatggggttttgccatggtggccaggctggtctcgaactcctgacctcaggtgacccactcacctcggcctcccaaagtgctgggattacaggcgtgagtcaccacacccagcctcaactgaacattttgctcctccctgttttctgttacgtattgtgaactttaaaaatgaaaaactcgcataacgttctcaacgtttttaaactcaaattcttggcagggcacacagtggctcaaacctgtaatcccagcactttgagaggccaaggcaaaaggattgcttgagttcaggcgctcagatcagcctgggcaataaccttgtctctacaaaacatcaaaaaattagctgggcgaggtggcgagtacttgagtcccagctacttgggaagcaaaagtgggaggatgacttgagcccaggagagtcgaggctactatgttcactactgcactacagactgggtgacagagtgagaccctatctcaaaataaataaaataattacaaatatataataaatattataaatataaaagtaaatagcaactgagagacttttggctgaccatatcaaaggaattcttttttttcttttttttttgagacaagagtcttgctctgtcgcccaagcttggagtgcagtgacgcaatctcggctcactgcaacctccgcctccagggttcaagcgattctactgtctcttctgtctcccgaatagctgagattaaggcacacgccaccacagctaacctttttatttttagtagagacggggtttcaccagcctgttggccaggcctggtctcgaattcctgaccacaactggtccgcccacctcggtcctccaaagtgttgggattacaggcatgagtcaccacgcccggctaaaaggacttcttaattagagctgcctgcaacgggaaatccgactggacaggaggtattaaggtccctaaaactgcagacgttcaatgggaagtctgattgtaaacatgcatgctgtttaaaggattcatgcatcctgaagatggactttgtaaagatctccaatggcctgtcacttcccgtcagtccattttcttcttaaaaatatcagcgaggccaggtgggtggctcacacctgtaatcccagcactgtgggaggccgaggcgggaggatcacggggtcaagaaatcaagaccatcctagccaacatggtgaaaccccgtctctactgaaaatacaaaaattagctgggcgtggtggcacgcgcctgtagttccagctactcgggaggctgaggaaggagaatcgcttgaacccgggaggtggaggttgcagtgagccgagatcgcgccgctgcgctccagcctggcgacagggcgagactccgtctcgaagaaaaaaaaaaatttttaagtgatctgtttcctggaatccaaccccaaacaatccacgttcctcagcataagcctactggtgtgattcccgttacatgagctcggaatgctatctgccaacaaatgagagcaccaaacatcccaatttaagaagcttttcttcacaccttaccaagctatgtgaaactggcaagggtgattactgtccttgtttttcaggtatgggattcaggctcagaggttggtcactttctcaagcgggtcacaaactcgaaccctgaaccatcatttctaaaagtcgcgcttttacttagggagagacggcctgcagcttccctccctactctgcggctccccagacgaaagttaccttcctctgccttcacaagctccttcacatcctccttccctatgagcccaggcagggcaattcaacctccgttccccgccacgaaaacgctcccagccgcctagctagccagacggcctgccccacctctgcgcctcacagacttccacacgcggactcaccggcgccgctagaaggactctcagccggaaactccgcccgacactcctctccgccgctttaggggcgccccggaagtcattccgccgcgccctgcggccacgccgaaacgttccggatgctgcagagtgcagctgccggagcggggcgctcaggtgcagggcatggcctccgctgagttggggcgcggaaagggacggtgttccagctggaattcacagagaaccggaaagagtgatcgccattcgctctcggaaggtcgaaggctctgcagccatcgacctgggttctgaggagctcgatctggtttttctacttctaaaaggttgggatgaaggaccctggccacagaagtaaagccagaattatccttgcttcttgctgtgtatttcaggactcctccattgctcttgctgttcattcaacaaacattgagcatctactttgagcctgatgcatgtctaagcactgaagaaataacaatgaaaaactgtcaaaaatccttgctctcgtggagttttccttctccaaggggagtcagtatgaagaaaaacatatactatatgaaatggtgataatgctgtggagaaaaactaagcactgaaggggaaaagtttgcagtttaaaatagggtggccaggccgggtgcgatggttcacacctgtaatcccaggcatggtgatttgggaggccgagcgggggtggatcatcggagggcaggagttcgagaccagcctggccaacatagtgaattccgtctctactaaaaatacaaaaacattagccgggcgtgctggcaggcgcctgtaatcccagctactcgggaggctgaggcaggagaatcgcttgaatccaggaggcacaggttgcagtgagccaaccttgcactccagcctgggtgacagagacttcatctcaaaaaataaaatagggtggccagaggagtcctcgctgggaagacagttaagccatgacctgaatgaggaagggtgttaaccctactgatacctaggggaaaagctcttcagacaaagagagctgcaagtgcaaaggccctgaggtagaagtgcattggggtctttgacgactgcaggagtgagcaggggatgagtggtggcagctgcaatcagaagggtaaggtggggaggagaggctgtgagcactgttaagaactttgggggaattgtgatggcttggaccagcagctggtgagaagtgactgaattctaaatcttaccaatacactggatgtgtgttatgagaaaagaatcaaggatacctccatagtctttagctgagcaactgaaaggttggggttgcaattattaaaatgttggcggggtgggtaagatcaattcagttttggacaagttgtctgactgccaattaacacaagtggaattactggcatttcccatacttgagaaatggagaggcagtgcacccccagatgagaaaagggttaggaataacacaaaggaactgcagaagctagggcctctttccttccccatcagcatactcatcccctccattgcctttattttattgttaaaaatttttcccatctctgttgtctccctcaaaaatataaacagaaggtatcttgcatagcagtggaaagaacagccctggatttaaaatcaggctctgacacactggctgggtgacctcaagcaagtcacaacccaagtctatgaactaatgtgtaaaatggggttgtctccaccaaccctgcagggcttagtgggaactccataatcagtctcatttcctcccagaagacaggattttaaaagggagaggaggggaaattagtatcgcagtgccaggaagcttccatgcttgcctccctcccacctttgacctcattagaggactcacacacaaattccacacttttccttttgtgcccttccttcctatccacacttttgcttccttccatcttaattgaccatcctatttgcaagacgggatgcattcctctaggacaaac

SEQ ID NO: 318041 - DNA, 4001 bp, Homo sapiens
accagatgttcttggattctcccaaaatagttttgctgagactcatggtttcttgaatagggcacagtgcctcttgttccataattaggactaagtcattgccaaattcacaggcaagtattaatgacagctatagaagcctttcgtaagatttgatgagggtaagagcaaggaggagagtgaccacatgaaatgtggctagtgtgatttgaaaaagcagaggtctctgcttttaaaaaggaaactgggaggaagaaattctaggctctagaaacaaaagggtaaagagcttatagaaacaaaagaccttcacccaatcccaattttcctagggtgattcatgtacagatagatttcaactgtgccttgctttgctgtctgttccttatatgggcccacactgccctctctgaacacaggaaacaaagaggagcacagcaggttgcttttgttgttttcctttgaagaaaagatatggctggatttatctgccctgtgtttttctgttatggaggatttaacatgcctgaatatagtcatactatgccctgcttataacatagccaacctttgtcccaaatgtcctgcagccttgttatttttatatttcttctctctctctctcttttttgttttttttttgagacagagtctcgctctgtcaccaggctggagtgcagtggcacgatcttagctcactgcagcctccaactctctggttcaagcgattctcctgcctcagcctcctgcgtagctgggattacaggcacgtgccaccatacccagctaatttttgtttttttagtggagacaaggtttcaccatgttggccaagatggtctccatctcttgaccttgtgaaacacccacctcagcctcccaaagtcttctcatatttaggtgcataaaccagatatgcacctaaatatgataaaccagagttctttgggaattcctggcaaggcaggttattacataagtccctgcctccaaaagctgatgaatcctgggaaaaaccgtggctggctccatattgccacagcttgagagtagtcctcacttcctagcaggttcttcaagggaaatctagagctccccaagagctgtcaccctttcagtggtaataccatgaattatacagcattttaacccatgcatgctcaactcacacaaaagcagaaatattggttaccatttggtagacaaaaaattagcttaataaaaaatactatagcacacccaaagggttaatgagggaactggcctcacgccttaatttattgccaaagagtctctagaccagagaaataagtataaaaattctaataattcctgattcacttttggtgtctaggtcagatttgtcttaattgtctttatctatgcattttctgcagcaggaaaggctgagctgactaagttgccactattcctttcctggaaggtactatttgttttacgaacaagagagttttgttaactcatttttacattgtcctttttggcaattttcaagttacaaattggcagcaataagcattggtggttctgctatcttttgcaaaataattatgagaagaaaagatttttttttctaaaatacagacatatttaaaatccaagaaagaatgctatttaaaaaaaaaaaatagagacagggtctcactatgtcgcccagcctggactcaaactcctgcgctcaagtgatccttccacctcagcgttcctagtagctgggactacaggcatgtgccattgtgcctggctaaacattataaggcttgggggaaaacatcttctttcagtataggaaggtaatattgccaaaagttcattgaaagtctgctccattttgcttcatggtcataatggaaatgagaagaatcagtcttaccttcaggaattagcaggagagaaacgacaactgagagagaggatgccagaaatctataggagttcctcattgtggctgctgtcccacatcaatcaacctgaaaatctgttttcagttcttaactgcctctatctatatactgagagtaaaaaggatgtggtttcctttcattttttttttcaagtttcaaagtttagcattaggaaaccaaatccaaataagtgagaatggtggatgatggctcactgccagcaggcaggctttcctttgctaggactgctgaggggggcgctggaattctacagggtaggagaggggcaagggaccttgttgccatcagagtacaccagggaagactgtaaagtgtctcagctatgattttgaagacgctttcatcatctgcaatattatctgtagtatccatgactggaaactctcgaagacttaaattagaattttaataaaagtcctcaaaattggtcaccaatcaaaattctttctagctgtctccttgggttatataagaattagcaggccaagtgcaagctgaggacaggagggagatttatttacatagaggctcctgcctggattttccttccccactttgtggtgagtgtttattgtgctcctgcctggtctgtggcaggtgtgggaacatgggctggaggagggtaggggctcttggcccttttcagccctctgattgtgcgttcctgattgtctagtttcacaactttagatactgaaagtatctccgagtttccctccctccccgcccccccccgacccctgcttcctgcctttcttccttactttcttctgaacaggtttaggtgagaaaagaagtgggagtcatttttgttccaatgttggggaatgtctcactctaagaagagtcaacctcagtccctggaggaacagtatgcagtgtgctttctatttgaaatgagttcagctctttttctgagctgaggatgtggtctccgatacaatatacatggtcagatgtgctgtcaggatgttgggtactgaaccaaccatccccatagttaacatcctgatgacttcaaacctagtggttacttctttagaaatcaagtgaccttagaagggagccctgctgagacccctgcatttctttttctcagatattacaagtgtatcaaaggttaatcattttcagtaacagcagtgaggaccctgctattggttttggtgagtaattttagtgcagacttaaaaaagtcaaattgtaattaactacacctactgaaaaattcttaaaacattgacaattttgtttatttttatgtgaatggttgctcttccatttatgttgacttctaacaactttatgagacataattcacacaccataaaggtcacccatttagagtgtatgagtcaatggattttagtatatttgcatagttgtgcagccattaccagtaccatgctgttttggttactgtagccttgtagtatagtttgaagtcaggtagcatgatgcttccagctttgttcttttggcttaggattgtcttggcaatgtgggctcttgtttggttccatatgaactttaaagtagttttttccaattctgtgaagaaagtcattggaagcttgatggggatggcattgaatccataaataactttgggcagtatggccattgtcatgatattgattcttcctatccatgagcatggaatgtttttccatttgtttgtgtcttcttttatttcgttgagcagtggtttgtagctctcattgaagaggtccttcacatcccttgtaagttggattcctaggtattttattctctttgaagcaattgtgaatgggagttcactcatgatttggctctctgtttgtctgttattggtgtataggaatgcttgtgatttttgcacattgattttgtatcctgagactttgctgaagttgctcatcagcttaaggagattttgggctgagatgatggggttttctagatatacaatcatgtcatctgcaaacagagacaatttgactccctgttttcctagttgaatacactttatttctgtttcttgcctgattgctgtagccagaacttccaaca

SEQ ID NO: 318042 - DNA, 4001 bp, Homo sapiens
ataacactttatggctagtgaagcactttttcatacaccatgtttcaggcctagccaaagaaagaaagaaagaaagaaagatctttcagtgtatttctttctttccatccaaagtttgttgaacatttagaagtcaagctctgtgtctggggaggttatagaccatttgaatgtgtattatgagcatatttgaagatgtgcatattttgcatcaaatgaacattcgctgacagttccccactctgtctctctgatctcgagggggcaaatgccctggagaagagagaagtgatggggatgagagtgtgatttctatgagggcaagaaccctgtgtaaatgaagtaaccatattaaattggaaatcagtggcttgctatttagagatagcagaagatctcccagtttgcaggcttcaaaacttccaatttgtgatcaaacagttccatttaaatggggtaatcagacaaaacccccaaagcatagaaaagcaaatcaattcaattgttctgtttagatatagacaatgcctggagagcaaaccattacagctaagagagatctttaagtgaaagaaaaggagaaggctccatttcagcttattaggtaagaaacataaggaaacatatatacaaacaaaaaacaaaaccaaaaacccaagcaaacaaacaaaacaacaaataccaaattagttttctactggcatttccttttgtgatggttgcagcatcccaagaggggttttgtgctttattagctgaagtaagagaatcctaggctgaaatggactttggaaggttttactctgtcttcagaaaagctttcattctaagtatcctagaaaataactctctcattatctttctctttctagaagtcatcaataacttgtttttttccacctaggaaagttgtaagtggtgagtagctactgttaggtagctactgttaggagtggcaaagtaggcttctcatgcgtataatactaatgataatagctgcaatttttttgtgcttactaaatgtgccaagcatgctaaaatacttaaacagatactatttaattctcaaaacccacaaagcaggtatgatatgattattacccctttgtaaaatggggaagctcagagcacagagcaagctcaggttgtctgatttccttttgagcagtgtgatctaacaaggtcaagagtactgctgcttcaagtattactgttgctgtgttccctgcattatacagaggacttgaatttgtctaatgtcttgcctgggaaaagcagctcagttctctctgaaaaggaaaacccaagacagaaagcgtggatgtggaagaaggtaaataaacgccaccagttggtcagtaaccacagaagctaacagtagatcaaattctcattcaggagaggtaagcttctcttgtacctataataactttcagaaaaaacacatgtctggaaaagtgtggaggactcaccgatattggcagtgggctgctgtcagcacccactgtggatcaatcagaacacctccacaaacgtgatgtccgccatactggatggaggccataaatggcctggaatgaggtgacacttctttccctccaataatttccatattgaaacctacaaaagtagaccaaaaggtttcacacaaaagatctaaactactgtttcatgtaattcttccaatgacagtcactatattattttcaaagcttaaaaaacaacaataaccctacctaaaagctacaataattttactgatgaaaaatttgtataatacattacagttcagaaagataggaatgattgtgaaaataattttcatctataatataacaatatagtcagtagaaattcatttaatgtttacatgtagatataggagatacttacacacatgagtcatataagccccaactattaggaaaaacagagaaaaggaagaaaacttagtcattttaaagatttagatttaagaagcccagatgaaatgtgttgatcctgtgatgaaggaagaagattctgaagactgagttttgttcttgtaagttttgactttctcaccacaggtgctctaggggtaagattttttttcacacctaggtgtaaacgttatgtatcagtttggggactttcaggtctgtgcttttagcacttttttgttttgttttgttttgagacggagtctctctctgtcgcccaggctggagtgcagtggcgcgatctcggctcactgcaagctctgcctcctgggttcacgccattctcctgcctcagcctcccgagtagctgggactacaggcgcccaccaccacatccggctaattgcttttagcacttttttgggagaggtatgtatgccataaagaactcatatctggagataccatctctaatacctgtatcagagtacttatgctataaagaaaatttatactatatgtgtatataatatttataaatgaaaaatatccatgccataagaatgtaatgaagttgcagacagagttcaaagatgtccattgctctcaagcaatacttactatttttcctggcacaaaatggtgcctatcatatttcattcttctctctttttcatttggacatagatttatgatgaagagagacatggaccttgcacagattatggttacttcacaatgtggcttagctaaagcctgagcaccaaccagagaaaaccatatgttttgcagcaaacatccctactcatgtcgtttctctaagtttgcccaaatttggttaaattttagttacatttttgtgagatttcataatgttgttaaaggtgaacattggcaactatttttgattcagagtctctcttttactcatttttaattgaaaatggccatgtgtttttccagggacttaataataatgtcttttaaaaataaaggactgcattttgtaattcttcccaggaacagatgacaatgcattgccaggccttcaatacaaaaggtattagactcaagattctacaagattctgtttgtgccagacactgatcagcagtgcaaatataaaatgaatacaaacagatcacgcatcagaatgccaatcacttcctagtaacactgatcaaaatttgcattaaatcaacagatctttcttttaagaggtatgcattttatcttccattcattttagaaaggagaattaaaatccagagctattatgctcggcagattgcaagagactcctttcaaattgttttctagcacaaagagtaggaataataaaaaataatactataattatgtattattcattataacttaataatatataagtaaaataccttatttccaaaattctttttatatgatcatttatggtttcatgtctatgtctttgaggaaagcaggacaacttatgttacaatggaagaaataagttccaagaggctaagtaatttgcccaaggcaacacagcttatgacctagaccaaatcacctgcctgacctccctgtatgttaagttgtatgtgaatgagtaccctcccagaacacagaattttataaaaaacctgctttccttgtacaggtgtgtggcaacagtaaagctttctacatgttaaacagaatgaacaaaaccaacgcagagcagtgacttcctgtcagagcagaaggtgagataaggaggagccagattaagaaaagccacaagcttaataaaccaaacttattactcccactcaaatgtccctgtgaattttcaagtcatctttgtcactgttgatgtaccttggatgctctactgtgtgccattgttccacattggaaggcagacaggatggcgtcagttccctgctacatcccagtgatgctgggatcgtaaggaagatggtgtgtgacaggtagaagtgatccaaactctaaggaagaaataaattgtaaaggacgaagctttgtgtgtgtgtgtgtgtgtgtgtgtggcgggggaaatgggaatggttacaaacatctctcagctgctta

SEQ ID NO: 318043 - DNA, 4001 bp, Homo sapiens
gtggggaaggaatgcgaggcgctcctcaagttcgcctctctcagggaccagaagaaacatcagatggagatgtgtcactccctgacactggcccatttggtaaaaactaaaccagtggcatggttgtatactagaatgtcacatgtgaagttccagacaattcttaaagtttaataaaatgtgagttaaattatgcctccttctaaaggcctgcctcaaacaattttcatttagacaaccctcttaatgccttatctagggatcagcattaacaatggtgacagatcgaagccaaagaacagactggaaagatttctctctccttgtaaaactagaagggggaagaatttgaagtctttcaagagttttgttgtgtttaagaaaaaataagtttgaaaacatactcatcctcatcagagagtctcttgtgcaagactgagatgctgctgcccaactctagttaaatgtgtacaatgggtattaattccagttgcaggcaagaggtgtccatttcagagttaacacctctgacaacaggctagtagcctaaaggtggcctgcagtaggtgaattccacctaatttacaactcgagtctcccattcaaacctaagactgttaaaaaatgcccgactccctggagcagggagctttggaacaaaacacttcccttaccccctactttaacggtaaaacctcaaaccacaaaggtggaagaaaagagggaagctagcaggagtgccccctctaattgtctattcttatgtgctgtttactgggtcattaaaatcttacaaggcctttatagtcattgtaattgttgaattcaaggtttgtcccagttgtttgtacagaagtctctcactttgaaactcagaaacatttcccctaacatcttgtctaaaagaacctttcaagcaatgtactgaccaactccttgagtgatctgtggcccctgcaggagtgggggtagggagcgccatgtcgcacacctgttgtcaggtgacactgccagcagcatcctgcacactcacctccccactccaccccacccccagcgaggctctttcctgctggccttctccacccggggaagcctacagccttccggagttaccttttaaaaaaagcaaacccttcctaccacaaagcaaacaaaaggctgataccgagacaatcgggagcagcgggggttcccgtggcccctctccagcccatccttggaccactccccaacccggtcccccgcaccagcccggcttcaatcccgcgagtagcccccgccttcccctccctgcagatagcgagccagacgcctacacctcggccccccggggctcgggcccgacttattgtgccggggccggcaactcgcgggccggcgggggcctcaccaagtacaactctgctcacagcagctcccgggtgcccaggcccagactgcctagccagcgccgcggggcctcctgcggcctcgggcctggcccgtgagcccgccccaggaagggtcgccagggtaggcgccagcaccgcttttttcccacaaaagcgcccaggcgcgggcagggggatgcgtttcgaagagaagttggtttccaggtttcttttttgaacaaaaccaaagggaatcccgcgcggcccgacaaggcctgggaggacgtagtgcacgcgcgaggacccggcgtgggccacaccgaacccggcggcccgagcccggcccgcaccacaccggtgcgcgccaggccgggccgctcccgggcacccgcggccggacccgagcggcggggacagggagtgcggcaagggggcccgcgcggcacttacgcggcggctcggtggcggcggcggcagctgcaaggtgtctcggcctgagccctcctggccgctcgcgccttttctctccgcgctcctcgctggcccgcccgcctcttcgcttcccgcccgcgcggcccgcgctctccccctccgcccggcgccgctgccgagtgaactggaaccagtcctcgcggccggcttcccacaatgcacagcgcgccgctcgtcacatcccttcgcggccccgagcgtccggcctccgcgcccgtgccgcccggcgccccggccttgaccccgggcccgcgccctacccgttgacgccggccgctctgcgcccaggcaccagcccgcaccccggacgcgaggtctgacccatgaccccggggacgcccagagcccagtccttgggaagggccaggcccctggagaggagcttcttcagggcgcgtcccagactctgcgtctcgagtgaacgcctactgtgtgcctggctctgagcacgggactgtcgctgccacggcatctttaggaaccttcccactaacccagtgggaaggcacaatggctgttaccagcgatcgctcttccctccccagtcaatgccaactcccccctgccccgcctcagagaccccgctgtctttagatacaggccaccgccaagccctggtctgccccaagatcaattactgcgcacccggttcccctggggtccttcagttaatcctcctcaccccgaagtctggaacctgccttgcacatggaagcggttagctacttcgcttcagcaaaagttcactttcggacccaagttgggaattactaatgtagacagtgattccttatcatcacacacgttttttaaaaactgcggacaggccgaaagaggaggagccgccacaaagcccgccacgtcttcctaaattggtttaccgcctgaaggcattggtgccccatcccgggtacttaaatgggggcctgccctctactcccctccctccaaagtgtggagccggaagccacttctccatccagctgtgaactaaatttggataataatacacatccctcagggttgatgtgaagtttaaagtgccgctactggggattatggaggtaattagagacccccacccccaccccccagtcctcaggctgcgcgggaatcgcagcggcagtaacctccacctcaccgggatgctttacaccttactttaagagtttgcaaaacaatgtccaatacctgccattcatgcattcgttaattcgattaagtactgagaacgtattttgtgtcatacatcgatttgggtgctggatatgaaacagccaagagaacaggcagaaatctctgccctcctgtagtttgcagtctcgtgggggaaagacagacaaacgggagaatgtgtcagagggtctccatggggtggagaaaaataaggcggagaaggggaataggaagtgtgagataagagtgaggctcaaatacaagagaaggcctctatgagaaagtaacatttaaagcctgaagaaattgagggagcaagccgtgtggatgtctggggaagaactgcgccgagcatgaggaatagcaagtgcaaaggctggggtaggagtgtgtccaaaatagtcaagacagagcgagtgtgaggttggagtagaatgggtgaaggggaaagtaacaggagatgaagctggaaaaatgatgatgcttatgatgcttctggtcccaaaacaaagcattatggttctatgaggatctcccgaagaaaagatgtcaggaaaggtgcagagaccctcccccacacaccacattgttgttccatccttctctgtgcctttgggcaaggactctccgttctgtagggaccaccaggtggaattaaagtctacactcctccaagagctgatcttggggcggccccacctccatgcccctctacagcgtgccattctcatagaacacactaggacctttgtcctctggagctgttcagtgcagcagctctgacctcatccttctccagaagcctccaccttctctcccctctctcctcctgcgctttgtgtgtcctgttcttccacttcggtgacctgtctcctcccctaatctggctcagagaggggtaccagctgctgctgctgctattgcttcttcttctgttaaaggttttttatttttttccaa

SEQ ID NO: 318044 - DNA, 4001 bp, Homo sapiens
ctttggaacaaaacacttcccttaccccctactttaacggtaaaacctcaaaccacaaaggtggaagaaaagagggaagctagcaggagtgccccctctaattgtctattcttatgtgctgtttactgggtcattaaaatcttacaaggcctttatagtcattgtaattgttgaattcaaggtttgtcccagttgtttgtacagaagtctctcactttgaaactcagaaacatttcccctaacatcttgtctaaaagaacctttcaagcaatgtactgaccaactccttgagtgatctgtggcccctgcaggagtgggggtagggagcgccatgtcgcacacctgttgtcaggtgacactgccagcagcatcctgcacactcacctccccactccaccccacccccagcgaggctctttcctgctggccttctccacccggggaagcctacagccttccggagttaccttttaaaaaaagcaaacccttcctaccacaaagcaaacaaaaggctgataccgagacaatcgggagcagcgggggttcccgtggcccctctccagcccatccttggaccactccccaacccggtcccccgcaccagcccggcttcaatcccgcgagtagcccccgccttcccctccctgcagatagcgagccagacgcctacacctcggccccccggggctcgggcccgacttattgtgccggggccggcaactcgcgggccggcgggggcctcaccaagtacaactctgctcacagcagctcccgggtgcccaggcccagactgcctagccagcgccgcggggcctcctgcggcctcgggcctggcccgtgagcccgccccaggaagggtcgccagggtaggcgccagcaccgcttttttcccacaaaagcgcccaggcgcgggcagggggatgcgtttcgaagagaagttggtttccaggtttcttttttgaacaaaaccaaagggaatcccgcgcggcccgacaaggcctgggaggacgtagtgcacgcgcgaggacccggcgtgggccacaccgaacccggcggcccgagcccggcccgcaccacaccggtgcgcgccaggccgggccgctcccgggcacccgcggccggacccgagcggcggggacagggagtgcggcaagggggcccgcgcggcacttacgcggcggctcggtggcggcggcggcagctgcaaggtgtctcggcctgagccctcctggccgctcgcgccttttctctccgcgctcctcgctggcccgcccgcctcttcgcttcccgcccgcgcggcccgcgctctccccctccgcccggcgccgctgccgagtgaactggaaccagtcctcgcggccggcttcccacaatgcacagcgcgccgctcgtcacatcccttcgcggccccgagcgtccggcctccgcgcccgtgccgcccggcgccccggccttgaccccgggcccgcgccctacccgttgacgccggccgctctgcgcccaggcaccagcccgcaccccggacgcgaggtctgacccatgaccccggggacgcccagagcccagtccttgggaagggccaggcccctggagaggagcttcttcagggcgcgtcccagactctgcgtctcgagtgaacgcctactgtgtgcctggctctgagcacgggactgtcgctgccacggcatctttaggaaccttcccactaacccagtgggaaggcacaatggctgttaccagcgatcgctcttccctccccagtcaatgccaactcccccctgccccgcctcagagaccccgctgtctttagatacaggccaccgccaagccctggtctgccccaagatcaattactgcgcacccggttcccctggggtccttcagttaatcctcctcaccccgaagtctggaacctgccttgcacatggaagcggttagctacttcgcttcagcaaaagttcactttcggacccaagttgggaattactaatgtagacagtgattccttatcatcacacacgttttttaaaaactgcggacaggccgaaagaggaggagccgccacaaagcccgccacgtcttcctaaattggtttaccgcctgaaggcattggtgccccatcccgggtacttaaatgggggcctgccctctactcccctccctccaaagtgtggagccggaagccacttctccatccagctgtgaactaaatttggataataatacacatccctcagggttgatgtgaagtttaaagtgccgctactggggattatggaggtaattagagacccccacccccaccccccagtcctcaggctgcgcgggaatcgcagcggcagtaacctccacctcaccgggatgctttacaccttactttaagagtttgcaaaacaatgtccaatacctgccattcatgcattcgttaattcgattaagtactgagaacgtattttgtgtcatacatcgatttgggtgctggatatgaaacagccaagagaacaggcagaaatctctgccctcctgtagtttgcagtctcgtgggggaaagacagacaaacgggagaatgtgtcagagggtctccatggggtggagaaaaataaggcggagaaggggaataggaagtgtgagataagagtgaggctcaaatacaagagaaggcctctatgagaaagtaacatttaaagcctgaagaaattgagggagcaagccgtgtggatgtctggggaagaactgcgccgagcatgaggaatagcaagtgcaaaggctggggtaggagtgtgtccaaaatagtcaagacagagcgagtgtgaggttggagtagaatgggtgaaggggaaagtaacaggagatgaagctggaaaaatgatgatgcttatgatgcttctggtcccaaaacaaagcattatggttctatgaggatctcccgaagaaaagatgtcaggaaaggtgcagagaccctcccccacacaccacattgttgttccatccttctctgtgcctttgggcaaggactctccgttctgtagggaccaccaggtggaattaaagtctacactcctccaagagctgatcttggggcggccccacctccatgcccctctacagcgtgccattctcatagaacacactaggacctttgtcctctggagctgttcagtgcagcagctctgacctcatccttctccagaagcctccaccttctctcccctctctcctcctgcgctttgtgtgtcctgttcttccacttcggtgacctgtctcctcccctaatctggctcagagaggggtaccagctgctgctgctgctattgcttcttcttctgttaaaggttttttatttttttccaatgacaaagctatgctcattctgaaaacatgaaaaataaaaatgctcaaaaaataaaactcactctacattcattgctaggagagaacagcctgctcccattccagcctttttatctatatccacttaacattaaacatacagagtttctactctatttagtgattgtcacctgcactttaaacttaatggttctttatgagcattttactgggtagttgttctacaataacattactggaactgtttgggtttcccttgaccctcttaaaaattactgagaaccctgaagagcttttgttttataggttacatctatcaatatttgctttattagaaataaaaactgagaaaaagtaaatatttattaatttattttaaaaatgttaacatggaaagaaattatattacataaataatgtattttagaaaaataattatactttccaaacaaaaataattagtgggaagagtggcattgttttacagttttgcacggctcttgaatgtctggtgtaatagaagatagctggtttcatgcctcctcctgcattcagtcggtcactatatgttgttttgtttgaagtatgtgaagaaaattcagccttatgtagatatgtatatgggaaagaatagaggattttaatcgcc

SEQ ID NO: 318045 - DNA, 4001 bp, Homo sapiens
cgctgcaccccacacacttccgccagcctcccaacctggtttaaacatcagggcttggatgcaggcttggggccccctaagccggagctgggagcctcagatacggaggtaaaagagcggggagtcgagctggcctagcgtcctccttcccgctctttcagcaggaaccaagcggtgctacttgaaggaggcggcgacgcgtgggggccgggatccgcccaataacaacttctttcgaggcgccgcacctcgaaagaagccggcctgcaccatccccagtccggggcagccgtttagagactcgatgcctatttatctttccctcgtccctggatgagctttcgtcagtttaccacaggcccccgcaggttggataaaccaggtggggcgcttcagctggctccactccgctacggccttaagccccccaacctagagaaactgattggccagcctgaaaacccagcgctcagaagcccccagccccggacagccagaccgagtgccaggaagtgtcaccctaaccggagaggatcaagaaggccaagacgagactgcgctctccaaagctaaaagaagtggctcttatttacatgcaaagccactgaagtcgtcctcagaaccagtccatggggagaaccagaactggccctggactgagtagaagacccgatctgttttacctcacctccaccctggactcctcagataggtgcttttcctgccccgacccactctgggccctcagtttccctatttatacaatgatggaagtagactagccggtccagcaaaggccctttgaaaacaggaaccgagcccgggcacataaattcaaactcaaagtaaagaactttaacacatattcttaacctggcttccaggagagcccaggaatgaatcaggacttctccaaattggaagcaaaacctgtggtgtgtgcatttttggagggtccgaggctccaaacagattattcactcagtattacaaacactctcccgtattacaaatgaattctatgacgaatctgcctccctccatgcacaggatcgcacgctgtgaccaaccatctcagaactcttcccaacctttccaaatcggacacaggacaacacagcctccttcgactacctgcatggcctgaggctgctcaccgctcctgcacccttggctggagcatgcaagccccaggactcaccagctcccttttccgcttgctctcacggccgccatccgccttcttgagttcagccttgaaggcctcgggatcgccagactgtgcatccttggccagcacgtccatcaggtaggcgatgtagctggtggctaggcgcagagtcttgatcttggagagcttggtgtcggccggcacgttggggatgcactcgcgcaactccgcgaatgcgctgttaatgctctcagtgcgtctccgctccttcttgggtcctgagcctttccgccggccaagacggccgccaagcgcctccagccgcccggggctctgcccaggcctggcgtcaggaccataggcggtggcggctgcagcggccgcgggcggcggcccgcccgcagggaagtccggggcagcgtcagccgggctcagcagccagctctggaagtagggcctttcctgatgacagcgcgaggccggaccgaagaggaagggttcgtggagcatggggtgcgcagggtgcgggtggtgatggtggtgatggtgtgcgtagctgcccacgaggttcatgttggagcggctactggcctgcgccgccagccctattaacgccgctccatgcgccccagagactgccgggggccacctgtgggctctggagccactactgggcgccggctttgggagagtccgggcaaggctgaaaatgagacgcgcagcccactgtcttcttaccggtttctgccgcgggcgaggtcgccgaagcccaaagacctgtttaacccttctgcggactcccctgcggatctggcttatataagaccgcggctttgatgtcaacctctcccgggagccaatggcaggggggcggggataaggaaaagggggagtggctatcccaggttttacgctcagcccgcgccactctagtccgccagcagggactgggaaccggccccgcctctgcccctcccactcagctccctgctctgcgggcttaggggggcgggctgctgggggtgttgagggggcgggcacggggactacgtacttgaggcacaggacggccaacgccctggactgttgctgccaccccctccccacggatccaaggaaaggaatccagaatcaccaagcgaaaagaaggcctacacctagagcccgccttttgattttacagacaaggaaactgaggcccagggaaagaaaggttcttgtttctagactgtctagaagtctaaataggaattccagcagttcccagtcccgagctccaactgctctgctcggcgtcagagctagaagatgagagggcgctgctgaagacaggataggccgctaacgttcttccctaacaccttccagccctccgcccccacccccaccccttagtcatcggccctttctggagagactgggagccgcttgtgcacggggtcgttaccagcccgccaattctgacccagcctcaggcagacgggcacgcagctactgaccagcgaagaagcctttcggaggcaggggtaggggtggggcgggaaggaggaggcggactccaggcccacgggcatcgacgggtttgttcccggcttgagggtctgagatccactccggcctcccgggtgcctgatccattccgaaggccagcccggctggcgcagagacagtctggcgtccgccttgggcccggggcatctggccagcaggtctcctctggtctgtccgcaggactcgcaccgagacctgggagcgcggctacgtcgggccgctctacccagatcatcactccttaagaatctttggttctttaaagacaccggccccgaagctcacacctcgagacaccagcattcggcgttagacacacgcagaggggaccaagactgcacagcatccgcgaggctcgcacaggcaaacgcgacgtccggcatctctcacgcatcagcgcagaggcgcgactcggctgcacgaccctccgagatttcaccccgggggtagggccattccctgccagccggactctctccactgtgggctttccccaggctcgcgttggaatctgggaatcccggagtggtgacgcttcaagctggggactctcggtcttacctcccgctgtggttcctttcttggccgatgtccacctacctgggtccctcattctctcaacctttctcagctcaacgccccctccctcggtgtggtagagggagtgtgcctctcttcaaagcaaagtcgaggggagggggaaaggagaagttaatgtgagtgctctttttagaaggcaaatcattcacccattcattcaacaattatttattgatgcctactatgtgcctatcatagttactagtccaaagacagagggagaaaggcccattctctccttgaacagatatggaacgtgaagcccagagaagaagagcgattttctcgaggtccggtagggagtggatgagtggaattccactcctggacaagagagtgaatgaagggtggggggttacatacaggagtgacggagacaaaagcctgggcctgctggttccacctgtgggagctcagcagggctgtgggccctggaggtgcatgggggggtggtgcagggaggtcctggtttcctgcccgaggcgggctggaaaccccccgctctccccggcgcctggcgccagcagcgctggggtagggcagagcgcggagccggaggcacgcggggagggagcgctgggggcccgctgctgcggcggctctgcggggtcccaagcctccctggcctggaggcattctagaaagagcgcaggtagagagtaattacgctgtggagaga

SEQ ID NO: 318046 - DNA, 4001 bp, Homo sapiens
ggaaaaggaagtgaaaccactagggatataatgaattgattcttctctgtgaaagtctcttcagtacttctaaattacagtgtcagtcattcctctgagagacagggccttgctgaaaataaatggctcattttataaataagtacataatgtttccccaccttcttgtttctcatagaaagcccaggcccataaggcattcctgtcgagaatactggcctctgggtacattcctcctgtagagcagtggtctgttgaggttgttggttatctcttgttcatttaattagccttaagtaaaattacttcttatctagttctgtttttaagctgtttccaatttagtggaagaggtcatcaacaaaagtataaattcatttcttagctgaaacaattaaattttttaaaatgggtggtataaaagtgactaaagactaaagctaatatctgaagagtcctttggtatacattatattttactgaatggaagagaaactttcatttttgtaggtaaatggaatttgttaactgatataagaattatgaatcatatcacattaaaaattctccaaagataactactatgatatacttttgatagaacaatattcccattccattaaaatactgaaatgactgaaatgtgtataaaatctctgcaaatttagtacacagaaataatcacatagaaatagttaccagaaactacaattgtaatgaataaatattacattcatttagaaatcaatccacagccttaatttcttaagaactattagcttccaagaagccagccagtatgtttgattttatgacatcacactggaacatgtacaggaacactttccaccctaaaaattcccaaatgtactggccactgtgtgtatttttccagtgataaatgaaaataaagcaacttattctcaaattaataagccatcttattttgaacacaacagtcacattcaatggaagaaaactacttaatcgaagcccaaacaagtttaggtttgtttttggtggggaacagtctcaacatacaaataatttctttaagcaacttttaacagtaatcttaactatgactataaattctcttcagtgcattcaaattatccatcaacatcattgtatatatgaaatgcatcatcattctatgatcttaagttcataattagctggagaaggaagcctgggccaaaaatggcaacatttctaagattattaatctaacaggtattacctatgcctaaagtaactttctttttcacataaccctatatattctctgaaacaaaattcataagcctggctggacattcccattcctcacctttcccttcagcctatactatccttgtttcatctcaggtgctataaaaatggttgttgagatacagatagaaaagtcaccacttggaaaccatgaccctaccagatttacaggagcactagcagaagctaagatactagagttaattctttctccatttttagactgagcctgtttattgtagtgaaatattttatccgacaatatgaaacttttttaaaagttgaggtgtcatattaaattcaaatgaaaactaaactcaaaagaaaagaataaaatttgtttaatgtatatatacattgcatgtgtattgccctctgaaatcttaaaggcacaaaggtataaccaaaagagggggaaacaatttgcaagttttaccttgtcctgaaatccaggagttcggatgctctcaagttctgcttaagttggaagctggagatcaagtgaagctagcgctctttctcctcaccttaagtttgtctctgggcgagtgtgagagtgtgtgtgtgtgtgcgtgtgtgagtgtgtgtgcagaatgtctctttgtggcgctggatggcagaggtcctgatcctgggaagaaggaggcactttctcaccaagagcagaagaaaagcaaagcgtcaccaggaaagttctcctcccaaatcccctaattacagcctaatgtgcacttcatgcaaacttcagggaggaagggaggggcagctctgtgcccagaccttgtaaagcagcagcctcttagatgactttcccctctgctcagatcccgagtatcccgctctggggtttaggaaagccggccgctacagccacacaagcccccaccacaccacacctcccgaacccgaaccctcatcagtcctgggtctgtccagaagggatgggacaaggggtctgtggaatgatctgcggggcagcggtgtgagcagactcctcaggacagtcagtttgcgctttgttttattagcctctgcttaaaagaaaaatccaagggtcggagaggtcctctctttcccgccttcccctcaccaaaggagatcaaggataacagacaatgatgatagtggcacataaagcttcttaaactggagatggccttccacccaaatcaccagaagcatattttctggtttactggactcagtattggtgttgagtttaaatttctcttaacaaacaactgctattgtatccttggatgacagagctcaaagaacctggatttatttatagaacgaggaatgcgagggggagacgggatgggtggggttgggttgtggatccataaccaggattagaaccagatgggcacagggcgcgcgcgcgcacacacacacacacacacacacacacacacacacacagacacacacacccctgaaataaccagtggggaagatgctgggacacgcgggaaaacgcctcctgaacaaatagacgtttatttataacttctgggagagtatataggtccattgattcccgccttgagtaaccaagggttttggagaggaaatggcttcatatttcaataacagagccacctttgatggagtctaggaaggggaaaaaagaaacacaccgcaggaagcaaacggctgttggagcagccgggaggagggagcggggctggccctgggactgaggacaagcaaacaagctcgaggggcccgcggccagggtggaggcgagacgcaggccgtccccgagttgcagcgagcagggcccggtgtcgcggagcgctggggacgtgcggggattcgcggccgtgctcccggctccaacctccggccccggcggggcggcgcgggcgggactgcgggcttcttaaggccgccgccgccgctcgggctgtggcgcgggttggggagagggttccgtgggccgtagggactgagggagtcgtaagtcgatgagctagtggggcaggaggatgggcgggtccagggcgtcctggaggtgcaaggtgggatgggaggacctgaggggcagccaagctgctggggaagccgccgggacgggggctctggccgacaatgcaggtggccggtgtgcagatgagccagcgcgcggggtgcggccgccgggatgcccgatccgagtcgcgcgggtggcggcgagcggcgctattgtcttaaagataaagcctaagccacggggactgcctcctcctggactctggagagaggcgggagagattgcaggggaaaaaaggcttcttcccgcgtcttctgagagatttcaccagttcttgcctctgggctcccccttgccattctgtctttggtaaatcaacacgtgcctcttggaaaggtttcatttcaaagacaaacggaacactcacacaccctccctaaatgaagacagttatattcaaaatgaattcttcatcaggcgttcaacacctttcttggaattccaaaacctgggtgagggcgcttctcttatttttctgtttcccctcccgcacagggaacaggttttgcagttttatgtccctaatctagtggctattgaggcagctgttatataggcctctacattaactgccaataaaaataagatacatctcggcttttcaactatgcaaagggtttttatgctattcatatttcttgtaaacgttcagggtggtgtgtattttaaagaacataaacgaattaga

SEQ ID NO: 318047 - DNA, 4001 bp, Homo sapiens
gggtaaataaacgacataaataactacttaaagttggtgtaataacaaatatgtatgaagtgccaagagcacctagatgaaggggtaaacagttctgtttatagaacttacagaaagtggaactgaactggaggatgagctcagaatctccaacctcattccactctactctccttaacttagttctagccatgtagatcatcctctagttcctcaaaactaccaaagttctttcccactttagggtttccatactctacctggacctatctttgtcacacttgtcctctggctatctcctactcattcattagatcagttagtatatcacttcctcagttagcctttctcagactccccagttctcccttatttttctcagagcaaccttaatttctttatatcatttttcacaatatgtaattacataaccacatgtggtggccgggtgcggtggcacacgtctgtaatcccagcactttgggagactgaggcgggcagatcacttgaggtcagaagttcaagaccatcctggccaatatggtgaaaccccgtctctactaaaaatacaaaaattagctgggcatggtggtgggcacctgtagtcccagctactcaggaggctgaagcaggagaatcgcttgaacccaggaggcagcggctgcagtgagccaagatgtgccactgcactccagcctgtgcaacagaggatactctgtttaaaaaaaaaacaaaaaaatctgtgtgggattatttgttctaagtctctctccttcagtagaatgtaagctccatgagggtaggctatattgtccaccatggtatatattcagtgctttgtatagtgctagagacatagcgctaaatacacatttattgaatgaacgaaggagtagcagcagcaggctgactcccctgatcacccagctggcctagtttctgccatcactttgccatcccagaatgactcaggtagagtccagtccagcccagcgcccagagcgactgtcctctcctctgcagcatttcagatcctcctcaatgacctggtttagggaggcagacataagcgccccgtgagtagagttagagactttctcagtggctccctacaggaatgatattaccttgggggttttgagcacaaatttctgtttgctttcatcaggacccagctgtgccttcagtttcaggagtttcgccacctcctcctcgatctgtggagggaaagaaggcgctgagctatccatctgtcactctcctccctcccccgccattcattcaatattcctccctcatcacatctctctgctcaggcctagctttgtttctctcgggacccaccccggatgtctccccacgcagcccactctcctccctacaagactggtcgcttccctcacatctctaccctatgtcccgaacaccctggctttacgtcctcccaggctttgccttggccctctcccctgctgcctaaatctcaccagctcggcgctggccttctgctgcttgaggcctcgcacgcgctctccctgaagtttcaccagctcctccagcgccgcacgctctgccatcccggctgtccacttgagccgcctgctgtctcgacctgcggtggttgccccagcctcagcaaggatgacttccggctatcgagtcgctgggtcgcacgcctagagagcctccgccgagcacaaaaattatttccggctcctcccggaagtgccgaagctggctactaagggaacttgggaggatcccacctcagccttcgtgactagtgaggtgcgcaaacgcccgagttttccctggtgcgcgggttccgcctttgcagtgccctccacccttcctggtgtctgacccgcctccttcccaggccttttgttcctgtcccggaaagccggcgtcctgccgcgcgatgcccctgctcggacttcttcccaggagggcctgggcttcgctgctcagccagctcctgcgaccgccctgcgcttcgtgcaccggggcggtccgttgccaaagccaggtgagcgagacagaattatctctggtctgtcccagcagggtctccagatctgaacgcatagcctcgcggcctgtattccagtagtgttacaatcggtttttatcgagtgcccactatgtactgacactgaactaagcgatttggatgcctggtcatttaatccttggagcaatcttgagaggttggagttttgatttccattctgcagttgaggaaacggaggctgcaagattaaatgaatgacttatacacggatatgtagtaagggagtattttaattcatatccacactttttcctgaaactcttggactcaaacagtaacatttttaagcgaaatatatgaatattcctagtaaatgagatgactaaagatcagaagtagactgagttcatcttagaatttacctcaaaatgaatctcagaaaaacattttcagatgtcagagagttttggattttggaattgcagataagggattgtgtacttgaacttggacttctcttagggcagataatcgccatagtatggaaccaccacatcctctatttttggaagggcatacagcgtgctggtaatgtcactgattaagttttgccttacttcggaaagattctaatgctctcttagcagatgctttgtgctatcgtgaacaatagggcacagatcttttattgatattcaatcacagcatcttatcagtctgagttttttagctcattcaagaaatccatatcttatcattccacaggcttgttctgtgtccttgagctggttcccttgtcttcaagttacagttttcctctctctaaacctgataaccagtgctaccttattaaaaattattatttttttgtccgggcacagtggctcatgcctgtaatcccatcactttgggaggccaaggggggtggatcacctgaggtcaggagtttgagaccagcctgacctgtatggcgaaaccccgtatctactaaaaatacaaaaattagccgggcgtggtggcatgtgcctgtaatcccagctactcgggaggcagagacaggagaatcgcttgaacccgggaggcggaggttgcaggagctgagatcgtgccactgcactccagcctgggcgacagagtaagactctatctgaaaaaaaaaaaaaaattatttttgctctttcagtaggaacggtgacctggagaagatcaccataatccctacccctgaatggttggtgttggtagtggtgggttgttcagtgccttcattattctcagattcttaaagtatttgagaatattaaaaatgcggctgagctcggtggctcatgtctgtaatcccagcactttgggaggctgaagcggttggatcacgaggtcaggagttcaagagcagcctggccaacatggtgaaaccccatctctactaaaaatacaaaaattagctgggcgtggtggtggcgcgcctgtagtcccagctactcgggaggctaaggcaggagaattgcttgaaccaggaggcagagattgcagtgagccgtgattgtgccactgtactccagcctgggcaacagaccgagactctgtctcaaaaaaaaaaaaaaaaatccatatacagtgaggaagcttgtgtggtgaagacctgacctcatatatattacacgtgtaattgtaaatacaacatagattctttggggtgggactgagattgggatagatgaaatggtgctttggcttcctgttgctcagggtgaagagtctttgcaggttggtggtcaacagggtcagagatgccacaggtctggccagtgtccagagaagccacatctcacattcattcttctgccaggttgcagaggcagtgttaacatcccaactgaaagcacatcaagagaaaccaaattttattatcaagaccccaaaggtaatactttttgcctaccctatcccattagagtgccttggaggactgacctctgccttgcat

SEQ ID NO: 318048 - DNA, 4001 bp, Homo sapiens
tatgttgtatttacaattacacgtgtaatatatatgaggtcaggtcttcaccacacaagcttcctcactgtatatggatttttttttttttttttgagacagagtctcggtctgttgcccaggctggagtacagtggcacaatcacggctcactgcaatctctgcctcctggttcaagcaattctcctgccttagcctcccgagtagctgggactacaggcgcgccaccaccacgcccagctaatttttgtatttttagtagagatggggtttcaccatgttggccaggctgctcttgaactcctgacctcgtgatccaaccgcttcagcctcccaaagtgctgggattacagacatgagccaccgagctcagccgcatttttaatattctcaaatactttaagaatctgagaataatgaaggcactgaacaacccaccactaccaacaccaaccattcaggggtagggattatggtgatcttctccaggtcaccgttcctactgaaagagcaaaaataatttttttttttttttcagatagagtcttactctgtcgcccaggctggagtgcagtggcacgatctcagctcctgcaacctccgcctcccgggttcaagcgattctcctgtctctgcctcccgagtagctgggattacaggcacatgccaccacgcccggctaatttttgtatttttagtagatacggggtttcgccatacaggtcaggctggtctcaaactcctgacctcaggtgatccaccccccttggcctcccaaagtgatgggattacaggcatgagccactgtgcccggacaaaaaaataataatttttaataaggtagcactggttatcaggtttagagagaggaaaactgtaacttgaagacaagggaaccagctcaaggacacagaacaagcctgtggaatgataagatatggatttcttgaatgagctaaaaaactcagactgataagatgctgtgattgaatatcaataaaagatctgtgccctattgttcacgatagcacaaagcatctgctaagagagcattagaatctttccgaagtaaggcaaaacttaatcagtgacattaccagcacgctgtatgcccttccaaaaatagaggatgtggtggttccatactatggcgattatctgccctaagagaagtccaagttcaagtacacaatcccttatctgcaattccaaaatccaaaactctctgacatctgaaaatgtttttctgagattcattttgaggtaaattctaagatgaactcagtctacttctgatctttagtcatctcatttactaggaatattcatatatttcgcttaaaaatgttactgtttgagtccaagagtttcaggaaaaagtgtggatatgaattaaaatactcccttactacatatccgtgtataagtcattcatttaatcttgcagcctccgtttcctcaactgcagaatggaaatcaaaactccaacctctcaagattgctccaaggattaaatgaccaggcatccaaatcgcttagttcagtgtcagtacatagtgggcactcgataaaaaccgattgtaacactactggaatacaggccgcgaggctatgcgttcagatctggagaccctgctgggacagaccagagataattctgtctcgctcacctggctttggcaacggaccgccccggtgcacgaagcgcagggcggtcgcaggagctggctgagcagcgaagcccaggccctcctgggaagaagtccgagcaggggcatcgcgcggcaggacgccggctttccgggacaggaacaaaaggcctgggaaggaggcgggtcagacaccaggaagggtggagggcactgcaaaggcggaacccgcgcaccagggaaaactcgggcgtttgcgcacctcactagtcacgaaggctgaggtgggatcctcccaagttcccttagtagccagcttcggcacttccgggaggagccggaaataatttttgtgctcggcggaggctctctaggcgtgcgacccagcgactcgatagccggaagtcatccttgctgaggctggggcaaccaccgcaggtcgagacagcaggcggctcaagtggacagccgggatggcagagcgtgcggcgctggaggagctggtgaaacttcagggagagcgcgtgcgaggcctcaagcagcagaaggccagcgccgagctggtgagatttaggcagcaggggagagggccaaggcaaagcctgggaggacgtaaagccagggtgttcgggacatagggtagagatgtgagggaagcgaccagtcttgtagggaggagagtgggctgcgtggggagacatccggggtgggtcccgagagaaacaaagctaggcctgagcagagagatgtgatgagggaggaatattgaatgaatggcgggggagggaggagagtgacagatggatagctcagcgccttctttccctccacagatcgaggaggaggtggcgaaactcctgaaactgaaggcacagctgggtcctgatgaaagcaaacagaaatttgtgctcaaaacccccaaggtaatatcattcctgtagggagccactgagaaagtctctaactctactcacggggcgcttatgtctgcctccctaaaccaggtcattgaggaggatctgaaatgctgcagaggagaggacagtcgctctgggcgctgggctggactggactctacctgagtcattctgggatggcaaagtgatggcagaaactaggccagctgggtgatcaggggagtcagcctgctgctgctactccttcgttcattcaataaatgtgtatttagcgctatgtctctagcactatacaaagcactgaatatataccatggtggacaatatagcctaccctcatggagcttacattctactgaaggagagagacttagaacaaataatcccacacagatttttttgttttttttttaaacagagtatcctctgttgcacaggctggagtgcagtggcacatcttggctcactgcagccgctgcctcctgggttcaagcgattctcctgcttcagcctcctgagtagctgggactacaggtgcccaccaccatgcccagctaatttttgtatttttagtagagacggggtttcaccatattggccaggatggtcttgaacttctgacctcaagtgatctgcccgcctcagtctcccaaagtgctgggattacagacgtgtgccaccgcacccggccaccacatgtggttatgtaattacatattgtgaaaaatgatataaagaaattaaggttgctctgagaaaaataagggagaactggggagtctgagaaaggctaactgaggaagtgatatactaactgatctaatgaatgagtaggagatagccagaggacaagtgtgacaaagataggtccaggtagagtatggaaaccctaaagtgggaaagaactttggtagttttgaggaactagaggatgatctacatggctagaactaagttaaggagagtagagtggaatgaggttggagattctgagctcatcctccagttcagttccactttctgtaagttctataaacagaactgtttaccccttcatctaggtgctcttggcacttcatacatatttgttattacaccaactttaagtagttatttatgtcgtttatttaccctgagactgagactagatgcctaaataggtatagtcagccctccatatcccaaggtcccacattcacagattcaaccaactgtggatcaaaaccattcaggggaaaagaaacgattaagaaaaaaaatctggctgagtgtggtggcttacacctgtaatcccagcactttgggaggccacaaggggaggatcatttgagcccaggagcttgagaccagcctgagcaacatagtgagtccctatctctaaaaacaaacaaacaaataaaaaccttttgaaatctaacaataaaaatttcaaata

SEQ ID NO: 318049 - DNA, 4001 bp, Homo sapiens
tcacgccattctcccgcctcagcctccccagcagctgagactacaggcacacgccgccacgcccggctaatttttttgtatttttagtagagacggggtttcaccatgttagccaggatggtctcgatttcctgacctcgtgatctgcccgccttggcctcccaaagtgctgggattacaggtgtgagccaccacgcccggccaccaagaaattcttgtttaattttgcctaatactagtatcatttttttggattacacatataatgcatgctattacaatttggttatagaagtatataatgagagattatttttcccccataatcccaaaggcatatatcactccagaaatttgtgtttaaaaattaggatatgtctattttactctttccttatctcatagaatgttttgaattaaagtgtttatttcaaaataaaatacttaggccagatgtggtggctaacgcctataatcccagcactttgggagactgaggtgggagaatcacttgagcccaggaggtcgaggttgcagtgaatcaagattgcccaactaggccaggcgcggtgactcacgcctataattccagcactttgggaggccgaggcaggtggatcacaaggtcaggagttcaagatcagcttggccaagatggggaaaccttgtctctactaaaaatacaaaaaaattagctggtagtggtggcaggtacctgtaatcccagctacttgggagactgaggcagagaattgcttgaacccaggaggcggaggctgcagtgagccgagatcacgccactgaactctagcctgggcgacagagtgagactctgtctcaaaaaaaaaaagattgccctactgcactccagagtgagacctcatgaagagagagagagagagagagagaggaaagaaagaaagaaagaaagaaagaaagaaagaaagaaagaaagaaagaaagaaagaaagaaagaaagaaagaaagagaattgaatgtggctgaaaaaaatcggaaggcacaaaaaaatacaataaggattaactctccctccacctcccaccctctgcccccatcccacattacccactgtcactatttcctatatacatgtgtctatgcatatacatctaaccacaccctttttgtttaaacacaaagggcagcctgtgacacactgtgctgcatcttgccttgttcatttagccatgaatgttgtaattcacagcagttaagcaatttctttggcctaaaactttattctggtcctgctcactagttaactcatagccatacaacggtacccaaagaacatctacattaatccaccaccaccatcccctccccttcccctaccccattctctggcttctaacccccctctactcccttcttcccgcccagggcacctactcacttacctgccagatgtaggatgaggcttaagatgaccacttgaggatgcattatgggatcagcctgaaggaaaatgagcagacaggctggttggtaccctccaccagatggtatctgatcaagtcttaaatctcagattgcaacttatcttttcacccagttggttgattcatatgagcctgctctgctggaaatgagagaagaccacatataacggcttcagagctctgttagttccctgcagctgagagctctgtgccttccaaaggacagggaaagctgtccacagaaacagcccctgacttcccagcttcttccccacacataaccgccaaactgactcctggtcctgatacagggtatcaggggaacaaacaaaaaggaaacagggccgggcgcggtggctcaaacctgtaatcctagcactttgggaggccaaggcgggcagatcacgaagtcaggagatcgagaccatcctggctaaaagggtgaaaccccgtctctactaaaaatacaaaaaattagccgggcgtggtcactggcgcctgtagtcccagctactcgggaggctgaggcaggagaatggcgtgaacccgcgggaggcggagcttgcggtgagccgagatcgcgccactgcactccagcctgggcgacagagcaagactccgtctcaaaaaacaaaacaaaaaaaaagaaaagaaaaggaaactggaagcagagaaccagcgtggctcaatggcagcacgagagcaaatgccagccttccagtggcagagatgcacttgcttttcagagtaaactgggcctctggtggacgtggagcttttcctactcagtggccacaacgacttatccctagccttaacagtcatattgccaagtttgccattagcaagagaaattgagagtgaatgtgaatcactgtgcctaacctttcatgctcctgtacaacatgcttcagactacacctccttaccaagggacttcaagagaatgcttcaggaaacagaagtctggagcagacttacgttcagatccaggctctgtcactcacaatgctgggtaaccctgagagttcctgagttctcttcaaacctctatttcctcagttgtaaaatagcactaaaaatgcttcctctatctcccaccaaggattgatataataagcaaaaagggccacggaagaacttggaaaactaaacctacatcatatgcagtaatagcactagctgaggtttttggagaatactatatagcaggctctgtgtcaagcacccacatgcgttaaatcgggctgttgacttctgctgttaatcattaaaccatacaaacatgagtaagcttgcctagtacttcattaactcctcttctggtctaagaattcagtaacttccaaggaggcagtggtggtctgtatcttgcagctcatgacagggttcatggggaagtggatgatctcagcatagtgttttgtatggcagcgtttaaaaattcatttcttgaccgggcatggtggctcgtgcctgtaaccccagcactttgggaggccgagtaggccagtcacctgaggtcgggagttcaagaccagcctggctaacacggtgaaaccccgactctactaaaaatacaaaaattagctgggggtggtggcgggcgcctgtaatcccagctacttaggaggctgaggtagaagaattgcttgaacctggaaggtggaggttgcagtgagccgagatcaagccattgcactctagcctggacaacaagaacaaaactccatctcaaaaataaaaataaaaattcatttcttgccaggcacagtggctcacgcctgtaatcccaacactttgggaggccaaggcaagtggatcacctgaggtaaggagtttgagaccaacctgggcaacatagcaagactccctctctgcaaaaaaaacgaacaaaaaatatagtcaggccttgtgtacctgaccgtagtcccagctactcaggaggctgaggcaggagggttgcttgagcccagcagttggaggctatgattgtgccactgcacaccagccggggtgacagagcaagaccctgtttcttaaggaaaaaaagattgaaaaaaaaaagctaattcaattcaaccagttattactaacatattgagctgatgggacatgactcaatatactagggacgtcaaaaatccagacttgtgcaatcgggcagggacatgggtaagtaagcaactaatgaaatcaggataagtgaggtaaaggtaaatatataatcagactacatcattcccccacttataaccctctcataactctctcagaaaaataataataataataataataataattcctaaatctttactcaaattactgaagccctggtggtctggccctgacctaccccatagatttcttctaccactctctcccctgctgactcagccccagctactagagctttctttccaacttgcctcaaccctaaggccttttccgtggctgtgttctccatctagctccccagccccaccattttcacttttttccttttcatttttatcccggcttaaatatgacctc

SEQ ID NO: 318050 - DNA, 4001 bp, Homo sapiens
ctttgggagactgaggtgggagaatcacttgagcccaggaggtcgaggttgcagtgaatcaagattgcccaactaggccaggcgcggtgactcacgcctataattccagcactttgggaggccgaggcaggtggatcacaaggtcaggagttcaagatcagcttggccaagatggggaaaccttgtctctactaaaaatacaaaaaaattagctggtagtggtggcaggtacctgtaatcccagctacttgggagactgaggcagagaattgcttgaacccaggaggcggaggctgcagtgagccgagatcacgccactgaactctagcctgggcgacagagtgagactctgtctcaaaaaaaaaaagattgccctactgcactccagagtgagacctcatgaagagagagagagagagagagagaggaaagaaagaaagaaagaaagaaagaaagaaagaaagaaagaaagaaagaaagaaagaaagaaagaaagaaagaaagagaattgaatgtggctgaaaaaaatcggaaggcacaaaaaaatacaataaggattaactctccctccacctcccaccctctgcccccatcccacattacccactgtcactatttcctatatacatgtgtctatgcatatacatctaaccacaccctttttgtttaaacacaaagggcagcctgtgacacactgtgctgcatcttgccttgttcatttagccatgaatgttgtaattcacagcagttaagcaatttctttggcctaaaactttattctggtcctgctcactagttaactcatagccatacaacggtacccaaagaacatctacattaatccaccaccaccatcccctccccttcccctaccccattctctggcttctaacccccctctactcccttcttcccgcccagggcacctactcacttacctgccagatgtaggatgaggcttaagatgaccacttgaggatgcattatgggatcagcctgaaggaaaatgagcagacaggctggttggtaccctccaccagatggtatctgatcaagtcttaaatctcagattgcaacttatcttttcacccagttggttgattcatatgagcctgctctgctggaaatgagagaagaccacatataacggcttcagagctctgttagttccctgcagctgagagctctgtgccttccaaaggacagggaaagctgtccacagaaacagcccctgacttcccagcttcttccccacacataaccgccaaactgactcctggtcctgatacagggtatcaggggaacaaacaaaaaggaaacagggccgggcgcggtggctcaaacctgtaatcctagcactttgggaggccaaggcgggcagatcacgaagtcaggagatcgagaccatcctggctaaaagggtgaaaccccgtctctactaaaaatacaaaaaattagccgggcgtggtcactggcgcctgtagtcccagctactcgggaggctgaggcaggagaatggcgtgaacccgcgggaggcggagcttgcggtgagccgagatcgcgccactgcactccagcctgggcgacagagcaagactccgtctcaaaaaacaaaacaaaaaaaaagaaaagaaaaggaaactggaagcagagaaccagcgtggctcaatggcagcacgagagcaaatgccagccttccagtggcagagatgcacttgcttttcagagtaaactgggcctctggtggacgtggagcttttcctactcagtggccacaacgacttatccctagccttaacagtcatattgccaagtttgccattagcaagagaaattgagagtgaatgtgaatcactgtgcctaacctttcatgctcctgtacaacatgcttcagactacacctccttaccaagggacttcaagagaatgcttcaggaaacagaagtctggagcagacttacgttcagatccaggctctgtcactcacaatgctgggtaaccctgagagttcctgagttctcttcaaacctctatttcctcagttgtaaaatagcactaaaaatgcttcctctatctcccaccaaggattgatataataagcaaaaagggccacggaagaacttggaaaactaaacctacatcatatgcagtaatagcactagctgaggtttttggagaatactatatagcaggctctgtgtcaagcacccacatgcgttaaatcgggctgttgacttctgctgttaatcattaaaccatacaaacatgagtaagcttgcctagtacttcattaactcctcttctggtctaagaattcagtaacttccaaggaggcagtggtggtctgtatcttgcagctcatgacagggttcatggggaagtggatgatctcagcatagtgttttgtatggcagcgtttaaaaattcatttcttgaccgggcatggtggctcgtgcctgtaaccccagcactttgggaggccgagtaggccagtcacctgaggtcgggagttcaagaccagcctggctaacacggtgaaaccccgactctactaaaaatacaaaaattagctgggggtggtggcgggcgcctgtaatcccagctacttaggaggctgaggtagaagaattgcttgaacctggaaggtggaggttgcagtgagccgagatcaagccattgcactctagcctggacaacaagaacaaaactccatctcaaaaataaaaataaaaattcatttcttgccaggcacagtggctcacgcctgtaatcccaacactttgggaggccaaggcaagtggatcacctgaggtaaggagtttgagaccaacctgggcaacatagcaagactccctctctgcaaaaaaaacgaacaaaaaatatagtcaggccttgtgtacctgaccgtagtcccagctactcaggaggctgaggcaggagggttgcttgagcccagcagttggaggctatgattgtgccactgcacaccagccggggtgacagagcaagaccctgtttcttaaggaaaaaaagattgaaaaaaaaaagctaattcaattcaaccagttattactaacatattgagctgatgggacatgactcaatatactagggacgtcaaaaatccagacttgtgcaatcgggcagggacatgggtaagtaagcaactaatgaaatcaggataagtgaggtaaaggtaaatatataatcagactacatcattcccccacttataaccctctcataactctctcagaaaaataataataataataataataataattcctaaatctttactcaaattactgaagccctggtggtctggccctgacctaccccatagatttcttctaccactctctcccctgctgactcagccccagctactagagctttctttccaacttgcctcaaccctaaggccttttccgtggctgtgttctccatctagctccccagccccaccattttcacttttttccttttcatttttatcccggcttaaatatgacctccctggacatttttcacaggtccttcaatctaaagtagccaaccagtccctctcactattattatcttgttttccttaatccattttatctgtgtgtgcaatatatgtggtgtctgtctctattccctcctatagagtgctgcccggtagaattttagtaatggagttattctggtaacggagttattctggaactgatgagccacagagagccaagacagggatgtggagccagtgctctgagatgttacataactgtacaattccataggatttgaatttgaattccataggatcgattctgtctccagtagaatattggttacagagttattctgtgtgagtgtcgtgcactacagcagccactagccacatatgactattgagcacttgaaatgtggctaaggcaaccaaggcatttttaattttttttttttccaagacagagcctgactctgtcacccaggctggagtgcagtgtcac

SEQ ID NO: 318051 - DNA, 4001 bp, Homo sapiens
caagtgttgctgaagtggctggtctcagaacctcactttcagaaacactgccctaggagagaattgtggcccaattctgtgaacacgggagaacagggctgatggaaacagacaatcagaaaattagtcatggtcagccaggaaacggcccgcccatctgggctacttgcttgttcatcaacaaagggaggctctcctaacatacttctctttttaagcagcaagtgcacagtaaatacaaacccttggttaaataaggatcttgtgtatttgaaactactcatggagttgttttaaggtttaaagttgtgaaaagaaattaaattttgggaccccaaactcattcagtcaaagggaaaagtcaagctgggaactgggtcacagaaacctgcctcctctttttgattcctgaataagatggctacaggatgaaaggctgcatacctcccccatattttgcccacaaggaaattcctggtcagctgtgcaatgcagattgatagctcatctttaccggtgcggtcaccctggccagacacaaatgcgttatctgattgtttccctaccccattttgtctgtgttatctaatgtaaaatgcagattccccatatttttcctctgccccccccccttttttatgtgaaaactgagtgcttctcaatatcccaccttgtcccctttaaatctggagccctcaaaatcatcttctgagaaagtcatagacctgtctctcaggtgcctccttaactttggcaaacaaatctcctaaaatgattgagacttgtctcctcattttcctcaaatgacaaagttaattccattaaaaaaaaactatatatattttatatatgataaaacattcattatatattttcttttgattttttatgtcccctttgttttcatatgactcaactacagtaaaaacattcaaacactatcaaaggtgtatgaaaaagtggccgggcacacggtgggtcacgcctgtaatcccagcactttgggaggctgagatgggcagattacttgaggccatgagtttgagaccagcctgaccaacatggtaaaaccctgtctctactaaaaattaaaaacattagctgggtgtggtggtgcacgcctgtgatcccagctactccggtgcctaaggcaggagaatcacttgaacctgggaggcggagattgcagtgagccaaaatggtgccaccactgcactccagcctgggcaatagagtgagactccatctcaattgaaaaaaagaaaaagaaagaaaagaaaaagaaaaaaaggaaagaaaagaaaagaaaaatatgccttactctcccaactctttaccattccctggttccttttcctagagcttatacattaagaaatgtccacatattcctgctccccgacaatgcacacacacaaatagaagcctaatatatgcattattctgcaactttttttctttaataacattataattttgagacattctataccagtatgttttgtcagactcactgtttgtatcatgattatatcacatttatttacccactccctcatcgacggacatttaggttgcttccaagcttttgctattacaaacaacattacaatggccatccttgtatctctcccttgtcctctgtacagcaccattatgtcattgtaaatatccatgccgagacttacttgtaagtagtagcagcagcagcagcaggacacagtcaaagggaagatgtgaaaacatggagcttgcagaagaaaagtcagaggacacctctgttaggcacagttttaactctccaaatggactgggtacttcttccaactgtctactccacaatcacatgagcagtagccgcccccactgagtgctagctcagcacacccgggtgtctgattgccagtgattcttatagtaacactgccaggtctacagtcacattaaaggaaaccaaagttctctgtcatgccacactacacacatcctgtaagtgttctgatgtctgtcctgtgatatcaacaaagaggaagcaatacttcagtggaagaaaacgctactcagtcatggcacataaagagaaccctctaataatgtctcagatgagatacacctgaaatggagcatgtccgagtccatctgactagcggggaacacaaagtacagatgcatcatccatggattcattcactcaaatcagtcccttcatcaggcctgtgaccaaagtttatgaagcccctactttgcaccaggcactggactaggaagtggaacacaacagtgaatggcatgttccttatcctcacatttacagaccatagcaactcccagcataagcctcactctcatccttcttctaacacagattaggttgtatcctataaccttgctgagtctcagtttcctcatttatataatttataaaatgagaaaattgtattagataatacatgcatggctctctgttctaatattctgactttgaccttcaaacttccaactcttcaatttagaaaaaacatgttccttttggcaacagttcctttcctctactctgagtagaattaaggggatcttggtatcctgtttcatctcatgcatacaaggtgccccctctcccctaccccaagaggctttggccatgaatgatcagaaagtgttgagttccagccacactcccataactgaggtaacagcttagactcacgtagcctcagctctgggagtgtgacctttatctggacaccttaaaagcaaaagcttttttttataaaagggaagtgagctcacaggctgagtggtttctgaaaagccagtggccttcctctatgtcttgccttcctgagtttctttgtcattcacatttatgccattaaatgcattgggtataaataccaaatttgttcaatataaacaaatggcatttaatataaatatgcaacttgttcaatgtgtgtacttcccatagcattgcagagtggcagttactcaagagatcataatcaatttctcattttattttattttatttttatttatttatttatttttttgagatggagtttcgctctttttgtccaggctggagtgcaatggcatgatctcggctcactgcaacctctgcctcccgggttcaagtgattctcctgcctcagcctcctgagtagctgggattacaggcatgtgccaccaccccggataattttgtatttttagtagagacggggtttctccatgttggtcaggctgttcttgaactcccgacctcaggcgatccacccgcctcggcctcccaaagtgctgggtttacaggcatagccaccgcgcccggccaatttctcattttatagacaaggaatctgagacttcagaaaattgatttgccgaaaggcacatgattggtgatttagaatgagagcataagccccctaagtgacagattttttccactataaattatgttttattaatttaatgtttgtcttcccacataactaataaccagcaaatgaccatattcaagcataaggtagaatagattaaatatggggtctggggttatttttattagcagcatgaacttggtcaaggctcttaaaagcatcagccctcagtttctgtgttttgttttgttttgtttttgtttttgttttgagacagagtcttgctctgtcgcccaggctggagtgcagtggcgcgatctcggctcactgcaaactccgcctcctgtgttcaagcaattctcctgtctcagcctcccaagtagctgggactaagagcgcacaccaccatgcccggctaatttttgtatttttagtagagacagggtttcaccatattggtcaggctggtctcgaacttctgacctcaggtgatctacctgcctcggcctctcaaaatgctgggattacaggcatgagccaccgtgcccagcgatgttttgtttttaccactttgttttctgctcatttctagaattgctactgagaccagctttataa

SEQ ID NO: 318052 - DNA, 4001 bp, Homo sapiens
gaagagaagtaggtgccagcagcccccacagtctttcatttcctctcatccagtcccaggccccctcagagctcagaaggtgatacaggtggtcagaggaacccagtgaccagagcttcggggagagcaaggcaggggggccaagccaatcagaaaggggagggagaaggtgcagggtgacagccaggctcctgccatggacagggagcagtgagtcaggtctgcagaggtaagaggagcagccgtgtgggtggggggtgggggtggggtgagtcacagcccagccctgcccagcctaggaggagagggccaggagaatccaggctgttcaggtcatgggcaaccccagagggccactgggagaggatgaagtatgggagcccaggctcagttttggagtatgtgcttgatttatacaaagtagagagagtatccaaggaaagctcctgggaatgagggagaagggcagctgaggagcaggtggaactagaacaggtgggcatctgtccaaccaaatatagtcattccagggtacagtgctgagtccttgctctactctggataatctcctcaggtttggaggcaggagagctggcaggctctggactctgccctgtacctgtacttggccacagccaaagaggctggttggaggatcctacacagccctccccatttggagtctcctcaggaatgcaaggtgctcagtaagctgcaggtttccggtagcattcacagatatccagcattttaatacagccccctaggggctcagtgctcaccattcacagcctcatctagggcggccaagagctcctcattcccctctgtttccccaatctggagacaggtggatggaggaggccaacactgcacactttctagagatgtgcctgggcatctccgcatgtgttacctctattttatatataatagtcatttgatatgggaattagaactggcgcccatttttacatagtagctctagggaaagcatctcaaccattccttgttcctatcacccagcttacctaagaagaacgtaacaaccccagacaacacgtctgattcaatttgccccggagtacccagaagggcagcaacccagcaggtgaggcaatgacaagagagagagagtgggacctatattccaggatcccccagtgcccatcaggccgatcagcttttccccgaggttctccatgaataccctcaacccacagtattgcccaaacagcaagaatcttggatctgcttattcttcaacagcccaccaaggtccaaggatggggggcctccacacccacctctcaaaaggtccagatctgcctcttgcaagtcacggactttccggtcccggccgcctcctaggggtagcagctggtccgtggatacagtgggagggtccgggttgctggttccagcagctagccctctccgaagccgctccaggctctcgccagtcaccagtgccgagagaactgcgggcgagaggccaggccgcatcagacacccgcccagacccctgaccaacacgcaccgatgccgacgcccgtccgccagagcgcaagggccccaccaagtggcccgtgccgggtgcgctgcggcgaccttcccccatgcccccagcacaacgcccccatccccccgatctccgggggcgtcggcagccctcttacctgcagccagaaagagcttcagcaccaccgacggcagcagcttcatggtcccgcaccgagaggaggcggcgaggcaccagtcactttcgaagcggcggccactgggcgctggcaccagagctgggcggcggagctcaggagattccgccgggcaccgtctgccgcccgcctctgcgtgcaagcctggccgggacccaggcgcagctcgctcttcttgagtgtcttgtcttgctcactcagcccgcccgcgcggccgcccgaccccgcgcgcctaggtcaggccagccagcagcgtggcccgcgtagctccttcggccgaatgagcgctgcccggctcgcggccgggaataaggctccaggaggcgcggaagctccgccccgcccggcgccgccccctccctcctcccgtgctgggaagctcgcccggctcgcggcgccggcagcgcagcccccgaccccgcgggcgcggcggaggactgggcgggaggagagggcggcgttcacaatttttgggaccaggccgaggcagccgcggcctgattgtgggtagggctactgaccggcaggtggcggagagcggttcctacctttccccaaacgcctgtcactctgcagccttgtgactgactgctgagctgagttctgttccgggcctggcctcttgcttcatctaagccccataccaggggtctccatccctgtcaccctctaagtttcagaagcccaccttttggcctaccaacacggcaagtatcaaataataattaattcatctatcatttaaaaattagacacgtgaatgccagccgttctcataaacccgagataaccagagttgaagttgcaggcacttagtatcaatccagcaaaagcaaaggaagttagtactctcttagtctctggagtggcttcctcccatcttccctcaggggacattaggatttttgaactatgggttgtaattcccaggcttctgagattggagagacacaggttgtgaaacaagccttattcttttccttgcctttgactgccacctttttcctcaacataaaaaatgagccaccctcccataggacccagctggctaacctagattgctgtttcacagacactaggtgtttctcttccaacccatgtgcttttgcaggggtcttctggagtcactgtcctgacccaaagaaatgagtgtctcagtaggtatttcagtttccagggacgtgctggggagagagttgtttgacacagggctgggttggctttcagagccctgaaattgtgccagatagagcacttgccggattctgcctgtgtgtagggataaaaacaggcctgctatttatacacagtctatcccactgtccctccctatccccacctttgcaggggtcagtctggccctgccctcttaacttgctccagtaacctaggcctaggtttccatagtgcactggaatcactacagacctgagtttgaatcctgcctttgctacttactgtgtgaccttggacaagaaacttaatttcactgagcctcagttttgacgtctctcaaatggaaaaaataataacaataataataatgactactttgtagggagctttttgagaaatgaatgcgggaacacataaaagtagttagtatagtgccaggcacactataagctctcaataaatgtgacccattattattgttgctgttaataataatcactaagcacttgaccactctatttccttagaggcctcttttctctcacttctctagatcgcttgccttcccctaggccatatctgaggctttatgatatagttgggctggtttcagacagaagctcacctgtcacctatttggctaagagccactgttagattatccttttgggtgatgagtatcgggcctaggacctcagtgcatggtcaccgcccaagccatgactttgccctccctcagcagctgcctggccacctgcttccccaaaacaaagccaccttggggtcaaggctctccccaggggagggtggagagaaacacttcctgacacatggtcaaatcaccccctttcccccaccctcgccagagtcacaccctgctctcttgccccagcctgcctttctcccttcacatgctctgtccttccgccttctcacccccacatcagcctcagtcccattcatggggcaactccaaactttcatcacacctggagcctcaccccagctaggtttgtgtgtcagccaggttttacaggaagggcctgaaaaaagaagataaaaagcttgaattggatttgggacagtcacttcccctctcagaatctt

SEQ ID NO: 318053 - DNA, 4001 bp, Homo sapiens
cctactggaggaaacaggtttgattatttattacatctttttaatatgaacattttcttttttttaaaatttttaatgaacgttctttcaatcaaactcttaatgttctctagactataaacgtcattaggttttataagttctcctttggactttgctgtgtgtttttacaaataagtaccttaaaattatacactttctaaaatccattcactctttgcatagatcacggaggctactgatttctgagacgataaatatctcaaagaaggcaaagaccgtcactctgagcctttgtgtggcgggactgtggatttttcacagctaatgtcattcagaactgtggacagctcccgttaaggcatgtagttggtgacaatttcccttagtttctaaactaactccaaggctgctttacattgctatatttatcctataaagaatacttagtatatgcacatactcctttagttgattcttcttttcttttcgaacgagttcggccaaataaataaatatcaccctgagttattaggagttactagttctggattttaaaatgggaagtccagccttgttcaggagctaagataatcgtgcacacgctaataagaggatctactacacgaccttcatttgacaatctctaaatatgcttatcaccgaacgaatacttgagcgacaagtaagatcagaaaacgtcttaattttaattctccaaagcggagttttcctgctgacagctttcctgtccttcttcccgagctggaggacgtgaaaaagatttttgaaatagacttgcagtcaaggtcaagaaagggtgccgctctatttcagaaaggggctctgtcaacgccccctctctctgtttcaggaactagaggcttcctgccacgctcctgccctgcctggaagcgcctggctttggtgagacctcacgtcagggactatccaagtgcaaattgcccttcttttgcctgccggccgctgtttctgagtaaacacagcgaggataaccagcgcctataaagaaaaacagactaaacacactccccaggggcgagcgcggcaggaactgctcgggcttgtgaatcgctgtctccggttacccagtcttcttctgagccccagaagcctccttttccctcctggttgagaccacacttgagggagccgcgcgaggaagggtggcttcccgcttcctcacgctctcgtctctgaagtaaaagtttcccttgtacaacttcgcctcctcccaggagggtgaccgtggcctccatccttccctgatctgtccccgaagttcaggaggccaaggaggagagcccgtccgggattcccgggcaacaggagcacatcctccgagcccctcctgggtggaaactacccggaggcgccgagtggagcctgcttagcccgagccgacgccgccggcagcgccaccccccgcccgccctcctagtccccgggacgccccccacccaagggcggggaagcgcgtttcagggcgcgcctgaagggagggtggggcggcgaccgggagccctcacctgaaatcactgtaagggtggataatccagaagcctgcagttttaaccctttcctgctccttttccaccgccttctggctcccaaacatgcggagggagaatttgttgaccccgggctgcagcatggaggtgaactgcctctgcatgaagccgtactgccgccggggcccctcggcgtcttcgaagccccccgccggctcctcgccgccgccgccgccgccgccaccgccgccaccgccgtccaccttgaagcacacggagttgccgtgctccttcgcgccggccccgccgccccccggcggggtgcccaggcgcttctcggccgcggccggccccgcgcccgtcgcggacgccttggcggggaagacgctgttgccatcgtcccggctgttagacgaagagttgggcttgccgcctccttccatgcccggaggacgcggccggcgacggcgcgggctccagactcgccggccgcccggcgccggagacacgtagccgagagggtaggggcccgagccggctgccggcgagcccagctgcccgtcgcggcggcggcggcggcggcggcggctgctgcttcccgaccgcgccgctgctagctgcgcgcctggctcccgccgccgccgctgcccttagtggctgcggtccgggctccggtgcggctggtgctgaagctgaggctgccggagctaggcgaggctcagctcggctcagccctcgcgccccagcgcctcccctcggctgccctctgttggccagaaagggtctctccccgtccgctctccacacatgctcgttactcttgctctacttctgcccagcgtgacattgaactcaagagccctcggaggagacattcattggtacacgtggagaaggactcggtgtatgtttgcatgaaagacaggggagagaggagagagagcaagactgaactagcgagtgtgtgttggtccaaaagaaacaaacatcttaaactcatgaagacattgtctgaacgcctgtttgaataacgttacagatggagaaaaggggacaagctgactatgcatgccaacaattcaagtgcaaaaccaaatgtccaaaagaaagtaaagtttgacaatggaaaataaatgtccaaagtatcagggaaagtgtgcctgtgcgtgcgcgtgcgcgtgtgtactagaaagagaggcagagggcaaaagctaccaggtctgtgtaatcctaggtaaccagctgcttggggcttttcagattaaggttctgcacctggggacagacaactgacctccttacacttatccttgttaattcttgcagagttttttaaacagaggacgggatttctttctttccaaggccattcgtatcaatacacgtgcaagcagatctatcagccaccaatattgaaagaaaagtgtgtgagggaggcctcgcctgagctgacctatctttttagataagttacataatcaataaaacacattaagggatgtgtgtgtcggtcagtgtttaacgacaccacgctaggaagttaagacgtcttggaatctctcgtcagaatgtcattaccatttcagaaggggggaacactcttaagggaaacttacaagtgtagtactgatgctgaggaaagcattatccgtttcctcttattccctctgcgtctctgaaacccactggattagctaaaggaagcaaaatgtgctgccaaacccaccagtcactcagcaggggagccccggcgtctgaagagcttcaagactcccgaatgtcccaaaacatctgtttcagatacaagcattgcctccctgcccatagcctcttcaaaggaaatcttgccctgccaagagtcccagatcccctgggttcctgtcagctgtagccacattttatggagaaggggcaggcactcaaggagggaatgtgtatgtcaggctggcaactagtgagctatcatgaggaaaaaaaaaatgagtggggctaatcaaggtgtttttctgaaaaattaaacagtgatgaagccaattaacaatgaaggaagcaaggataaagacaaaggaagacaattggatgccttcctgaggggttaacagaggctgagaaaggaagcagagaacagagaaaatagcagagggaagcagaaacgagccattaggcctaactcagttgcaattctgtaagatttccttaccattctccttaccatagcctgtgctaaatctccttttttcacggagctatgtcctgactcaggcaccatctgttttcaactaatcatataccagaaccctaagaataaatatggatggccaaattttaatggtaagagataggaaaaatatgaaaatatagagctctgatctgtcaaaatagagacctttctctactttggaaagccaagaggtcagataaggataccaggtgctgagggcagaaggaagccacgggaatggataaaaa

SEQ ID NO: 318054 - DNA, 4001 bp, Homo sapiens
gcatattggtggggctgactctctgcaggaagtcaatgtagtcctcggagtggaagcggcacatgtcatgttgggaggcctggtatggcttgaagacctcgggatggagacacaagatgaacccaggcagggtcagccccactccacaggctcagaccacccatactgaacccagtcctggagactatatgaagccaaacatagcattcccctcatcccacaatccttaagtcagtagagagactccgattaaccaggtaagttattacaaatgagccccctgaagaccacttcttttcctttccacctccagctcagcctatcgtaccttctcaactttgagccctgatccacctgccctgttccttggaatctcctattcccagttctctccatgctcatctcctcccccaagctctgattctgtcctctttcctctggattcttctttctggagtcaaatatatgggatatatgtcaactttctaattaaaatcaaagatttattatctttggaaggtcagggggatgtgtcacacctctttgaaaactgcacaagaaagagcttttcttctcccagaaaatgcacacaggtacatacaggcaaacaatctcaagggatatagattcctgcactaacatcacctcagtcttttctatgaccagtccatttgtctgtgccttggcacaagcaatgaacattcattcatattgttcactagtttccctagcaacacataaagcctgggtttagctgttttgtcttattttttcttttgagacaaggtcctccctgtcaactcaggctgctgatcatagatcactgtaactttaaactcctgggcccaagccatcctctcgcctcggcctcccaagtagttgggactacaggcacacccaccgcacatggctactttttttatttttattttttgtagatgtgggtcccactgtggcccaagctggtctccaactcctggcctcaagcgatcccccccatttcaacctcccaaagtgctgggattacaggcatgggccaccacgcctggcgtggcttaactgttactatcccatatcacagccataaattccaagctgggaagacagcatgtgtatgtctggtagatgaaaaactggatagcgattaagcagaaccatgtagaggtattccaggctgaaaaaggaatatctaaaatatcgcctctgttccacacgcacatacacatttacaaagacggcagcatcgttccaccctggagccctagctccttggaggtaaagaaaggtggtaaaagaggagtgggaactgagggtaaacctcacaccctgatacagtgatatccgctcccctaaccctaattcctgaggccaaggccctatccacactctaaaatgcagaggaggaacacaccttctgtcttcaaaccagccccacatcacgctaaccctaggccaagggctagtgtgcctacagtcagagggtggccgacctgaggtgagaaagtactttccattaagcagaggacgccacccccaacaccctgcactttcaaggtactcctggtgacttctatccagctccccgatactctaggggcgggtcgcacttcatgcactcagtccagcccacctatccctacggccacagctcgccccaccccccaacccccggccgaggcggcggaactcacgatcatcttcttatagagaccgtaatgcaggaccaggctatgggtcaatgccaggcgatggggcttcatagggtgtccagctcctgggggtggggagaagagagttcgtcagctctcacccctggagttgcaaccccgcctcaaaacctccgtgtcccaacccctcatgcatatccctgtttcctcaccgtagtggaagttgcccacgtcggggtcgtagaaataggccacggtcttggccatggtgccggcgggagcaggccccgcacctccgccgcccgccgcccgcggccgccgccagcccctccccggccgtgcgtgctgcgcaagcacgtagccggcctctgcggaactgggcgttgcggccccgcctccatccacacccaggccacgcccccaggggagctccgcccctcgcccggctcagctctcccggtatctggggctttgagcgtcccgggttgggcagggaactggcagcatagctcctaggatgcgagggccatttgtctccggccgggggtcagatcctcgggaagccgagccatcccatccagccgcttgccccaaaccgggcgcaggccgtggtcacttctctaggaagctccgaagatcccgccactccgtccctcaaaggtgcggaaagccggcttcccccagccctcggagaagattcctgactctccgctcggtcggggcatctgagggcaggagctgcgccaggcgtaccggatagaccagtggacaacacccacgccggaccgcctgtcccctacccggacccagactcggcgccgcacattgccccgggggggcccggcgcagtcacgcgcgcgcagagctcacgctctccgccccgcacacctgcgctccgccccctggtcctgggcccgcgacgggtgaaggcatttgggaagccagggcggctgcggaggcgatctccctgacccagggccggagttgcccggagcctgccaccgctctcagccagcccgcatccttctctgttcttccctccccccgcctgccacggcgcgggtatccgcagccacagcccggggccggtgaggcggcgaagggggaggggaggaatcaagggatgagcgccggaagggcgtcgggggccctgagccgcactaggacgcccctggagccggaaccccagcagaagccggaaccagaaccaaatcaccggtaccgggtcggccaggtggtcagggtgggagaaaccaaaaagggagaggggtgcgggagtactgagaggaaggggctgcagaggcctggctcaggccggcgtggaggaggtgcgggcgctgactcaggcaggatttctgctcccgccgcctaagaatgccgtcccatctcgtgctgcagtgtccttgggagggacagaagcgcgaacaagctggaaaggggaacgctcggggcgtcggggaagcgggaccagggtcgtggtagagagcttgcgttgccgctgacctcttgccgaaaggcgaaacagcactcctggcccggacagctccctggttgggtagggggtggggccggacctcagccggacgtcttagacgtgcttgtttcagatcctgaggacggcattcctacccctcccccattcccagctgcagccccctaaacccaggaggcgccctggcccgcgctcgccccccagggcctcatgtcggaaccacagcctgacctggaaccgccccaacatgggctatatatgctcttcctgcttgtgctggtcttcttcctcatgggcctggtaggcttcatgatctgccacgtgctcaagaagaagggctaccgctgccgcacgtcgaggggctctgagcctgacgatgcccagcttcagccccgtgagtgaggagcctggaaccctggctcagtcacctttcacccttctccccacacctctgcctccctgaccaacagacccaggccaaatcctgatcaaacctgctcaggaagcctagtgatgcactcttgagttagcaagtggggtgacaccactctgaaagcaaaactagagaaagcagcatgggcaggaacggtcctctggatggtagtcttgggcttgcattggtgtccccatcttttctggtccctgaaatgctgaggtccagcatgatagcaagtaggtaaaagggtatgtcctaagcaataaatgatgggagccaccaggtaatattcccccaaagctgactcattcctgcttccttgccaatctctttcatccttcagctgaggacgatgacatgaatgaggacacagtagagaggattgttcgctgcatcatccagaatg

SEQ ID NO: 318055 - DNA, 4001 bp, Homo sapiens
taataccaggcataattaatggctgcttcactcagaggccatgagttaggcaaactcttcaggtaatcacccgcacatgccttgaaataccaagccttgccttcgaaccatctcagctgatttaagtcctggttatctacctattgttaacttacatcacccatgctttcttgtcacagtcagttcagcatattaccaagtccttgttttacttagcagtatgacacagaaggaaaatccaattctacaagctgaactccaaggcaaacataataagcgtgtttgtttttaaaaagatttccaaccctagtcatgatcttctgagacaaccttcatgtactttccatgcaatctttctgaatatcccaatgcaaccaaacactttggttctacatcttaaccccactctggccttagcagattggataccaaaggctcattagtgtgtgtgtctaaaatagagactgataatacccatttagttgtacaaaacagaaggaaaccatgagccttctgattgtagagaatgaaccatttctgccatcagcatcttgggcctctgcagcttgagcctaggcacctgtcctatctggggtcagaacacattattcagttagtttgacattccctccccacctgttcagggtcctgcaagcacacttaagctctatagtatccactgggtacagcgacaggcttggggaatgccaggaggcagtacagttagcaccaaattacaattctgcagggcacgatacgccttcaggacagtcccacctacacaggtctcacactgaggggacagtgtgtggcgtcttcaaacatctccccaggggaacctgccttgtctatggtgtgattggctgactcccatgacaaaactcaccctgtctgcagccaaagggtgagagagacagaggcgctatctaggggtctgtaaaagaggaagcagggagagcaggcaacatgatcggtgttgagaaacaaagttggatactgcctaaccactgaccgcagaaacgtagtcagatgcaaacatgtcacattttatatggaagagattttaggagagagggcagttttaggcagtgctcgaaactgaggacttctgccatttgagctgttaccaggagatgtgaggagaggtgagggggcgaaactggcctataaatgacagtcagctttgggggattcctggtccctcaagagagcttgtctaagcccttcgggtaacttatccctttgcacgtccttcaaataaggagctgtcactttcctccccagctccggtgtcccctccgtccatgccatttgcccaacaaggcctcagagcaaactccctcttccacttactatccggctctcaaaccagggttcctgagcacccaaggtgtcccttaagaagcagtaggagggtgggggcaagagcgtgggttcagtccatgtggcgctgggcagatcgcctgccagctcccaggcggtttctcgtctgcgcagtggggtggtgagggtctgcacagcgctccggggtggtccgcctctcccctcccccaggacaactcccggccgggccgggagcgctcaccgtcgaaacgcttcctccagcagggtgcaggaggggcccgccgtggaattggggctgtggctgatgtagaagttctccggggcgagatgcagcaggttcggggtcatcttcaccaagagcggcaggggccacagcgccggccccggcttggccgagacgctcggggcccgagccgcctccgccacctgcaccaccagcgccacctgagtcagcagcgccaacatcgccgccagcagtgtcgccaacagcagcgccagcagcatgggcggccggggcagccccagcccgcacagctccatggccgctcggctgctttccgcccggtctgccgagccggagcctcgggacccgacttcccgcccggcccggatcagaggaagcgcggccgcgggtgagtcaccgagtcagatgactgcgcgcgcccgcccccgactccgcctccaggccccgggagcgtcctcgcccagcccgccctgtccaggtcacctcgagaatttcctccaggggtgccctcgggtaggagcagagcccagacagcaacctcaaacacgggatggctaaagtaagaaaaatgcccggtgctggccgtacgtggtggctcacgcctgtagccccagcactttgggaggccgaggcgggcggatcacctgaggtcaggagttcaagaccagcctggccaaattggtgaaaccccgactctacaaaaatacaaaaattagccgagcatgatggcgggtgcctgtagtcccagctactcgggaggctgaggcaggagaatctcttgaacccgggaggcggaggttgcagtgagccgagatcgcaccactgcactccagcctgggtaacagagcaagactccgtctcaaaaaaaaaaaaaaaaaaaaagaaaagaaaaagaaaacggcccagtgcacaggctcgggacgccaggccgacaccgggtcgccgctcacgctgtcaacacgggcgctctcctgtggatccctggcttcggtgaagctggagaagccaagcttgaggagcacctttctcctctcagcccaaccaccagataaccgagatgagagctgagtttatttgctcctaagtctaggcttttctgtaacagcacttcagctgtggtcaataaagccttcctatcagaactccctggggcagagcatgcccaaggaatcctgagagagaacatcttggctcatctgtgtgggtcccgatataaaggatcccaactgacaagtttgatttcataacccatccctaaggaagagccagtgaagtcacatgacgaacacggactggagatgccaaagggagaagaggtgttctcttaccagaaggagaaaacgctaggcagaccaaaaccacagatctgctatataagtattctgaaaatgagggtggaagagctttaaggaaagacttcaaagaaatgtaatgattaggccaggtgcggcggctcacgcctgaaatcccagcactttggaaggcgaaggagggcggatcacaagttcaggagttcgagaccagcctggccaccaaagtgaaaccccgtctctattaaaaatacaaaaattagttgggcgtggtggcgggcgcctgtaatcccagctactcaggagcctgaggcaggagaatcgcttgaaaccggaaggtggaagttttagtgagctgagatcacacctctgcactccagcctgggcaacaagaacaagactccatcttaaaaaaaaaaaaaaaagaaagaaaagaaatgtaatgattattgggcctcagaaaatgagaccccaaagtgtggcactttggcatgttgaatacttggaactgaagaaaagagagtcagaagatctttctgaccttctcctgcctttctttctcctgctcccctttcttccccagagcaagccatagaaactagaattcctctttttcaaaatgggtcacagaaactagagccactgttgggcatggtggctcacgcctgtaatcccagcactttgggaggccaaggcaggtggatcacttaaggccaggagttcgagaccagcctggccaacatggtgaaacctcatctctactaaaaatacaaaaattagctggatgtgctggcacacgcccgtaatcccagctacttgggtggctgaggcacaagaatcacttgaacctgggaggcagaggttgcagtgagccgagattgcaccactgcactccagcctgtgccacagagtaagactctgtctcagaaagaaaaaaaaaaaaagaagaaactagagcccctatgcccccaaagccagtcataaaatctagaaatattactctaatcttgccgtgtctttctgtaggagccagccataaagaggttctctgacctaccttgtctgatagtggctctcaagacttttgttccagagtggccctg

SEQ ID NO: 318056 - DNA, 4001 bp, Homo sapiens
aaagcaagctgggaggcgaagcgcgggcgcttggggacgcggggacccggggacggaataaactctgtcgtggggccctcactctcgagctgcagagctgggacattgttgctaagtgactacgagccaggcaattcacatctccctgggcctcggttccccacctgtaaaacaagggggctggaccggtcatctatcccgttcatttatagacttagctccaaataccgaataaaagacagatattttaactcccagtggaaagacaagcctctagttgcaaagataaatgggattcgtaaaagtgatcaccacgcgagattatttttcgaatcgccttcccttctcctgacacgcgggactattaaacgtgtgtgtgtgctgggccatttctttactgaactccaaactaacaccaccgagcgataaaaaacaggagaaggtgatggaggcttaatcgctaggagaggaggcggcgtggctgctgctttgaggagttcactttgaatcaagcggccgcggcgattggctgaaaagcacgtggtgcgcgccccgcaggactgcgccccggctgcccctgcagtcgcctggcttagggcagagtccagccgggggtgccgcacccactggggagtggggagggaggacacataggaaatgcctggggctggagtctctttggctctctgccagcaagaaacttaaacgtcctggcttgctcaacccgagtgtccctaaactgtccagacttttgcccgtccattgccactatctctccccactctgggtgtcctacccaaggcgctgtctatgcgtgcccagggcctgtcctgcggatacccagctcgccccttgcagccctttttagagcatctcgcgggctctggcatcaccaagcgcacagccccgggctgcgctcccctaaggtgggtccctcagatccggggctgtccattaaccaggctggcccaaagaggcgcagacactcgaacccgggaaaacttattttattctcggttcccggggttgcagctgccagcggctgagacagtgcgtccgctttgtctctctgcactccccgcagcccccctctcccgcttcctctcccgattaactcccccgacacgctcttctctagctcctctcctcctcccactccttctcctcctcttcctcctcctacaccacaggccgcgctaatgcgcttcctccctcccccggtgtcggtctctttgcatacgcgccccctcccctccccgccgcgccacttatagcggggcgcacggcggcggggcgcagactgctctggcagccggagaggaggcggtgcggcggtggcgctgcggagacccggtccagacgcctggcggccgccggcacacaaggcgctttctagctccctcccccgagcgcacagcccgcctccttccgcggcgcctgcagtggcaggcttgctctgccctaccgtgacgcgctccggagacgctctgcgggtcctggacaccgggtccgcggcgtggggacgacagacggaggcgaacgccatcggtagccggtccgcgagccatcgttcggggcgcagtcctctccccggctggccctcctttctccggggcattcgccaccgcttccctgggctgagacgaccggttcgtcgcctccttgcccgtgaccgtcgctagaactcagttgtgcgttgcggccagtcgccactgctgtaagtttcccccactgccccggacctgttgcaggcgctgcgggcttcaggggctgcttcggctgcaggggtgtgttcgcgaggggtgagcgtgctccgagcactcgggagcttcgactagagggcaaggggagctcttctcggtgcggagatcacggtgcccgccgctgccctcccacagcaggcagaagccgggcatcgccggagaggtcgaccggcctcccctccgcggtgcaatgtctggggcgagccgctggggaagcgaggagccgagctaaggatacagtcagcctctctcctctgcggaaagcagcgctttcctgggggtgaatgtcgcgctgcgtcgctccccgcagcctccagggccgagcgcgcgggatggttggcccacgttgcatcctccccggcttggaggaaagttggggccatgcacagacaccctgagtgcgggcatgttcactgcggcggaaatgtctatagagaatgaatgaaaactgctttctgaaaaactagtttcttgatctgtcgtgttaacattattagttacaaaggataggaattggtgggcctggagatgaaacactgaatttatccacatgcggtttggtgtcacacaggcatggccagcttgttaaatagcgttgcaagtgttaataaaaagactctggcaagaagctacttttgttaacaagatctttataatgttctattgttaccggtaatgtaaatgcccagaaaaaaatctgcttagtttctcttttgattggattgagatcaggttcaaaacctggagaagggtgcgggacgctaagcattggaggcagagagcctgagttaggagcatgaagtgaactgaagttactgtaactgaagcccttttgatgttcacagtaatagcagccctttctctgtcttctttgcagacgtaggttaagtacatgtgtgcattttcttggccacttacttggtatgcaaatgtgatttctctgggggcttaaaaatgctcgaaagatgattcattttatgttgaaggtgtgttcagtgacttgtatacatggtttctgctgatattttgaggtttgcacagttttaaaccagaaagcaagtatttcctcttgggtttccaagtttactttttattttaatcaaacattgttgcaagaatgttgattgtgattttgactgtgacgtgcttttccatctgggtggtatccaagatgacaggctaggctcttccttctggcttgttgggccaacctggaacatacaggagcataaacacaggatgcggagagatgtagatcctatatcctaaggtcttctaagcaaattgttttcttaggtgtaagtctggttgtgaatgttgttttgcaccatcctgaatttaatgttcaaggaaatgtgttctgggcctagcatgattccagctcaatgtgtaagcattttggtgcctgtgcacctagtttcagggagcctcattcttccttcactcagggcagcatttgctctgagagaggcggcagattcacaagagtaagtagacagtctattgaggtttaggtttaaagtcttcctccagatactccagattgaatgtactaattaaaatagcaactacagtggtggagcattgagaatgctaatgaatgttttaaccctttggaaacctgatgcattcccataggttcatatggtcattctccaaaacactgggcattggttagaatggagtagacagtagatgcttagcttgaggtgggagtgaagctggctcctcaccattttttatatctcaagtcactgtggaaattactgggtgctttgtaaagtcttcctaacactggagctctaggactttgttgcttcctttcttccactcagccatgtttactcatcataaaaaattatattccaaaaaggaaagaaaactagttgcatcacctaatggtatgaggtatatgtgtcatgcccctgcctttgtggttttctgtgcagtcttatagtggggctcacatctggttggggaggtgcaggttagtattttagcccatgaatctgtggcaaatcattcatttgcatttattaataattcttagaatatgcatttaaaaatgtctgaatggttaaaggaaacagagtttcagctgcgcttttgggactggctgttatgtgtctggaacagatactgcaaccagccacacagtttaccctctggggataaacagcgggataaacagcttccttaggaatccttggacaggcaggttcttgaggacttcattcc

SEQ ID NO: 318057 - DNA, 4001 bp, Homo sapiens
ttcctcttctatactgtgtcaagaaccagatggtctaggctgggcgtggtggctcacgtctgtaatcccagcactttgggaggccgaggttgggggattacctgaggtcaggagttcaagaccagcctggccaacatggtgaaaccatgttgttttagtattctactaaaaatacgaaatacaaaaattagccgggcgtggtggcacacacctgtaatcccagctactcgggaggctgaggcaggaaaattgcttgagcccgggaggcggaggttgcagtgagccgagattctgccactgcactccagcctggctgacacagtgagactcgtctcaaaaaaagaactagatggtctagatcagtggagccccatagactctagggaggtgggagcagggtgaggaggttatgcggagtggagggcagaaccctctgcctctgacccgactatgggaggcctcatctgaaggaaggttgtcctactgaaagtctgaaaaactgctggctagaccagtatttttcaaatggcattactctaggcccactgaactagaatctcaaggagtgaccttgagattctttttttttttttttttttttgagatggagttttgctcttgttgcccaggctgaagtgcaatggcgcgatctcagctcaccacaacctccgcctcccgggttcaagtgattctcctgcctcagcctcgcgagtagctgggattacaggcacgcaacaccacgcccagctaattttgtatttttagtagagatggggtttctccatgttggtcaggctggtcttgaactcttgacctcaggtgatccgctcgcttcggcctcccagagtgctgggattacaggtgtgagccactgcgcctggccaaatctctgctttcaaagtgccctgggtggctgttactaggaaagttcgggaatcactagactacacgatttctaagcaccactccaaagtccgtttcctccaaaatcaaagaccaaaaaccatggggatgatactgaattaaatacaagtggatttttagagtttattaagcaggggagtggaggggagatgtggcacaaatagaagtatgtaacattcaaacaacagcatctaggatttttgaaaaaactttcggttacagttacacaaagggtcacttcctccccagcgacacatgggcctctcaaaggagaggagggagtaagtcccacggtagggccagtggttgctccctgggttttggaatcatttctgcggagctttcaaggccagaccctgggcttagggtcgagacttcatagcagtgacagccagacccagcaagatggctgcgaccgtgaaaccctgggcggcgatccgggtgcgcatcatgagctgagagcgctggctgttgccccggtggaaggagtagaggccgtaggtgagggcggccgccgtggccaggcaacctgaggaggggacaaagcaactgggaaacagcaggtcgggccccgcaggtcattccccgctttgggtctcgcttccccaaagccaagatctctggatcacagcggagggagggcggcgagggtaggtcgagtcgaggtcttcctagttacagagtcctcccaatcttaggccccaaatcccgccccctaaacccgctgctcccgctccaatcagtttcgcccctcaccgccccgccccctcgtctcttctctagtccgctctccttccgctccccgctagcgctctggtccttctctacttccttccctccgacatcactgtcctctccttgtgcagttcctaccgcacccacttacctatgggtaccaccgggttctcgcgggtcttgcgaacgaacttttccttgaaactctctggattcctgtaaacagtggggctcagcccctcaatgactggaggcttcgatggttcaaaggggacctccggaatcacagggccgggagtcgccatgtccgggccacagcagcaggagaaaatcgggactccgacctcagcctcccggtgaaggtcatgaaaggggcggggaaacgaataaattgagccttgtacgcaggcgcaaatgctcgttgcatcctgggagtcgtagtgctcagcacggtagtgctacaaaaggactacatttccccaaatgcccgcaaagccttgtgcacgccttccggaaggagtttgttacacgaggtctgagagacagaggcagcgtgtttgagctgctggtgcggtggtcagcgcgatgcccaaggccaagggcaaaacccggaggcagaagtttggttacagtgtcaaccgaaagcgtctgaaccggaatgctcgacggaaggcagcgccgcggatcgaatggtgagggggctggggttccgggtggccgtgggcctcggccgggacggtccgcgagatgacggatccgcgatgtctctctttgccggtagctcccacatccgacatgcctgggaccacgctaaatcggtacggcagaacctggccgagatggggttggctgtggaccccaacagggcggtgcccctccgtaagagaaaggtactgacatggcagggtctcggtccttgtcttctttactcttcccccgccatactgacctaggtgtcagaacgtggtactgcccattccttccctcaggcccttccgagttttcgacctccccacagtcagaacgctcaactgacgttgagcaagggtctctttacgaccttcgtcacactccctccccagcacacattccccataccccctctactcagtcttttttctctgaaattaacccattagcatctcaacggtattttccttaatttatctttttctacccttaactttcctaattagtactccctaagagttggagatctttacttacaccttttctttgttattcaatcatccttggtctgaggcttccctaggcttccctgactgcagtctccttcccgggttcaagctatatcccacctcagcgtcccaaatagctgggattataagcgtgtgccaccatacccggctgatttttgtggttttagtagaggcagggtttcgctatgttggccaggctgggcctcaagtgatccgcctggccccctggaggcttcaacaactattaaaagaatccaggttcccaaaagaaaagcaagcaattcatctttctctgcctgcctatctataaaatgggtataacactccttgccttagggactatctaactgtgtggctgtagcctcacatttattcaagaaatggtagtgccattttcctctggcatgaaagaataaaaagaaacttgcctaaggcaatggaacaaattcattcgcgaagcccattcattaggttaactacttattgagaacatgtcacatcctaagcaccctggggatttaatagagaacaaaacacaaagtccttgtcaccaagattgtgttgggggtaaaaggcacagacggattacttgaggccaggagtttgagaccggcctggccaacatggcaaaaccccatctctactaaaaacacaaaatttagctgggcatggtggcgcatgattgtaatcccagctacttgagaggctgaggcaggagatcacttgaacccggggggaggttgcagtcaaccaagattgtgccactgcatttgaacctgggcaacagaatgagactctgtctcaaaaagaaaaagaaaaaaaaaaagagagagagagagaaaaagcctccagggcattagttctcattgttacctacttctacctaaccgtgggcagggattcttatgggttagtagttgtgttgggataagcaggagtctataactttccctcatcaaagatccttctggtctcaagggctctgttctctgcaggtgaaggccatggaggtggacatagaggagaggcctaaagagcttgtacggaagccctatgtgctgaatggtgggtgtggtccatatattcctttaggtcactgtcctgcactgtgggaagctggga

SEQ ID NO: 318058 - DNA, 4001 bp, Homo sapiens
tgcaggtcttcacatggaactggccttctgagctctctgccctcagagctttttcaatgatcctctccccctccaaaccccaacttccgtctaatttaaactgctagtcattccgccattccattcccagcacatacatgatttctgggagaaaaaagaaaaaacagaaaaaaacctctgattgccctccccgtcccattactcccaggtcagagtcctagttgtgcaatttcctggttttttttttttctttatgatagcaatcagttttgtaactacatatttgtctgatacttgattaatatctattctcactttactcaactatttaagaaatatacctatccttttgtgtaaagctgaagagtatatatatgatattctttagcatttagactaattatttaaaacagtgtctgtaaatacacatatgacatgaatattttcgaatctcttgctcactgctgaagtgaaagctgttttaataaaacccatccacacttatttgtctcaggagtaattctactgggtactccctacaaaatgctgattcatttagaatgcttcctgccgttctacagttggacttcggtggttcaaatgtaaatttttcaagaaccatttctcaaaggcaactgcgaactttaaaaagaaatattttttctaaaaccaaagaatttcccctgagtagagacaaagtatttttttttttaatttacctagaggaacctaattaaatttttgataacgttttgaatctaaccgacattagtagaataaatgtttttcttagattttatatttcctaaatttaacaaaactgtttacaaaatttgttctatctaaatcagccaatctgcccagctttatctgagatccaatcccaaaaatacaactggccactaaataatttacacaagatatctcaaagtcacatcaactgggatttcacctacaagaagtcaacaaaaactacagtcttagtctcttggcataaaattacttcctgttgaatacaaaaagaatcattcagctgtttgtaagtccaaaatgttcagcgggagaggtcaacggaaagcaaatcccagacgcgggcccacttcttatctcaggagatcgcctcgctagcccagggtaggccttggggtggagatagggataggggtaggggtgagggtggcaagccgcaccccgcggaggaagccggcaggcccagacggcccgcgcacctcccagcgcccctggggccctcgagcacaatgccttgctgagcagcgcccaggaacgccgggccctggcaggccggctgtgcgcgggagatcgcggagattgggcctgagtcagggcgcgatcgggtttctctctgtcaggcagagcgctggcgagatttcgagattcctgatacaggcaaggtccgaggcagccggggaaccggcgggcttccacgcgggggccccagtgcgccccgacacgcgcccaggccccgcggtgcggcactcagggcgcccggcggcctggcccgcgcccggggcagataacgagtaaccggagcgccggcacgcgccggcaggccgcctcggagtgcccgggccctgtccgctggctgggggcccgctggaccagggcagccaggtcccctcccgtcgccgctacactcgcgacccctcctctccctccgcgagaaacccgaggatccgcggacgatacccacctcagcaggcgagagaggtggtgcccagtacctacccggtcatcctcaaaaatgattttggctggtatttccttgcggatgatcttcccaaagatcgtgtcgccaccaggccgagcgacctgagccttggcaatctcatctgccatctcggcctctctcccgcgcggcggccagaggagaggctcggaagaagggaggaacccgcagagcgtgcggcgcgagagggcgcagccaagcctgcgcaggtgccccggctctggcgccccacctaatcttgcgcgtgcgcactggcgacctgggctgcgagtgcggccagcgcgctagagcgcctcagggacctccggcttggggaagttcctggtcttgagctccaaggagattcctaagtcgtttttctatcctcctttcttgtctcctggggaatgcagttactggtataaacccttcgtctgcctatggatgcttgtagggaaagttggatactgtaactgacaagatttgataatttaagtggtgctggctgcaacttagcacttagattatttaaggtcttgctgctgcagcagattttaagtcctctcttcaacagagtttttttctctctctaccagtggttctcaatcttgactacacattaagatcacttggggagcttttaaaaatccccgtgaacctggctgcagcccagatccattaaataagaatctttggagatgagccccaggcatcagtagtttgtaaacctccctagactgctctgcaaagaatttttcccagcagcaatcaacataatgtattaataaaatgacccactttaaaaaaaaaaaccttccttaatcccacatccccctccgtatctttgctcgttttataaagaagttttctacataccatgtctgctttcttatctttcatttttgagtccatttccctcttgtcaaggtcactaaggacatccatttataaaatcctatagacaattacagttatcataccagacctctaagtgtacgtattaagaaaaagtatacctcctcaatgccttttttttttttagatagattcttgctctgtcgcccaggctcgactgcagtggcacaatctcggctcattgcaacctctgcctcccgagttcgagtgattctcatgcctcagcctcccaagtagctaggactacaggcgcgcaccaccacacctggctaatttttgtatttttagtagagacagggtttccccatgctggccaggctgttctcaaacttctgacctcaggtgttccacccgcctcagcctcccaaagtgctgggattacagatgtgagctcagctgccttttatgattacattactacccttgtcttggcaaaattattgaatgtggttgcctttaatctcaaaagtgtccatttggtacttttgctatcaaagacattactgggacaattcgtaaaatctaaataatgcctataaattagataatagttttgaagtcatgttaatttcctttcataaccacagaaaaattgtcaaaatcagttgatctggggtggggccctacaagttaggtttctaactttccaggtgatacagttgctgctggcccgggaaccatactttaagaactactgatacaagggaatgtctttgtaggaaaaacccactgaagtatttaaggctatgggtatcatgtccgcaacttactttcaaatagttcagagaaaaagtgtctgtctataggtaattagagaaatagaaaaggataaagcaattacaataaaatgttaacatttggagaatctgactgaaaggcatatgcaaattctatgtattattcttgcaacttttatgtgtctgaaattgtcaaaataaaaaaatgtgtgctggtttggataataaataacatggtcagctttcattccatctgaaggctttaccatctatagagtagtgactctcaagtatttgtctcttgacctacctcttcccttaattccagactggtctgtgacatacattacagcctattgaccacctccacttagatggctaccaggcactgcaattttattttgactccctccacaacaaacaaaccaaaacctccttttgcaggattctgtatctgctgtaccaccattcacccagtcactccagccaaaaagccttgaaatcatccttaaaccttctctctgtactttcaacacacatcaccaaggatctaatcacttatctcctctatctccactactctaatccaagctactaacatctctttcctggagtactttgaa

SEQ ID NO: 318059 - DNA, 4001 bp, Homo sapiens
gccctcagtgagtcaggtgctctttaggggtgggggaaaagggaaacacagcagagggcccaatatgggaagagacatctgtccactgagtcactttacctcccttccttgcaacagcagaacttctggaaatatagtaccttcccacccctacactcccctccttgcctactcccactatgctcactaatttgccctccacgtggtcactggtgacctcctaactgcccaatcccaagccttttcctcagtccccacctctgctgccctctctcaggcatgcaaagccagtagtcattctctttgctacagaattccccctgtccttggctttcacggccagtctctcctaggtctccttcctgagtctctcgtagtcttcatcagtaatttctgttccttcagacaatggggttcccaagtttcggtcatgccctccctctacactccctttatctcgcccattcccaaggtttcattaatagctgtgtcagggctcccaaatctacctttggcctcagccaaatcctaaatcccagtggtctgttagacatcactatctggatggtggagaagctcctcaaattcaacaaagccatactcatttttccatcaccttacccccacaaagctcttctgttctccaccttgactggagacatcgaagtgtgctcactcacacggccgttcgggctgcctgcgcgcatccctcaccctcacctcctctatgcaattggatctcaggctctctaagagctctcctctgcatcccctcctccccattcccacacactgcaccagaccatcctccggcctgattattacaacagcctcctaaactgatagctctgcttctagtttcttcacctccttaccccacccaacttgatcacctctgcactcatggccggcacagggtctggtataggtatgtgctaatgtgcctttccaaaattggaagcaaggggagtgggtagttttttatttaataaagcaacaaatcagcttctgataaatctccccaaaccatacatacctatgctgagtttccaaatctgtcaaataggggtgtggaattcttgttctatgctgcaggtctatttcaaggataaaatgaggtaactggggcaattaccttcgaaaaggactaagggctacacacgtgtctttctcaaggcccagctagttcatttattcattcactcactcattcattccctcatccattcaatatttattcagcatttttacatgacagaatctgtgaagcaatccccaagtagccctaatatttatatgctaggtaaatgtattcagctctgtctcttcccactgagattccctgtggggagggacatgtctccttcactgcagtatccccagagcccagggtctgtttgcctaagggccccgtggcttcccttagctgaatgggctacacgaagtgagttttcctcctgaaaagtaccccagggacctctactgatgttgggagctgccatcgagaaccagctggcaggctgggtgtggtggcttgcacctgtaatcccagcactttgggaggctgaggcagacagactgcttgagcccaggaatgtgagactagcctgggcaacatggcaaaacgccatcgctagaaaaaaataacaaaaattagctgggtgtggtggtgtgcgcctgtagtctcagctactccggaggctgaggtgggaggatcacttgaacccaggaggtcaaggctggagtgagccctgactgtgccactgtactccagtctgggtgatagagagagagaccccatctcaaaaacaaagaaagagaaccagctggcttaatctttccagtgtccacttcccctggtgtgagccaaacaggagggatgaggacaagacagctgtggaaggagcaggcagtaattagaccgaagtgcttacctgggacacagagaagctagtcactctcctcaggtctgagctcttgtctggcaatatgaggcaccccaatgaccaaaagcaacactcaggggtgacccgagttataatatcctcaagccccacccttttcctccaccaccacttaccaaacatcagctaattcaggaagctgcacttccttccaagcctgccctaagagtagcccaggctaggcaaggctgtggtgaaaacttgagcaagatgattaccgcgaagtggagcgttgaactgggtctaagattttgggccattccctctacaatgctgagggctgtttattttgcaaatatagtgagttctgaggtggtggctcgcccctagaaggagctggaggcgcctagcctggaaaggttatggtaagtacttttgagcaagaggcaatgtgggagcacaagcggaagggactgactctgccgagagtgggcagggctagctgaagaagctgagtcttgaagaaagaacagcagtatgctgacaaaagtggtccttgacaaagtggagagcatgtgcacaaccacaaatcacacacacacagcaatgaggtgcagctccaggcgcctgaagagggtacaccaaggtaggaatatatagtgggagaggaggtgacaggcagactgcggagtctagcctttagtctgtagcctgcgcagggagagtaggttcacatcttaggtcttctctactggaagaaggggagtgttaggctgctgtggagctattggcgaacaagctgtttttctgtgggaatttctcctcaaaggcacagaaccttggggcaccaatgtagaatactagacagcctgcaacaatctttgttgaaggcatggatacactttaaagcttcaggctgccttgtcagcagtaactctatccacagatagtaggcctccacatgacatcaggatggagaccagagatagtggctcctctatcagtagtggcatgaagaggccaggaaacatgccaaacatcagtcctgctgtgaagtttactgggtaccaaccaggcatataggctgtgaaaggcagggaagtgggggatggggtggcagagggtagagtggctgtcacaaacaacacagcatcctgcctagcctgggatcccagtccctttcaactttgttcagttgggagaggagaatgtggaactgactatgaaaggcccagctgtgattcatgcagatagcctgccatttcttgagccagggtgaggatatgcccctgacaagcatggccagggctcttcatctgcgtttctggaaggtctgtgtccagaccccaggagcaggggtcctggttccctagtcagaatgccagggaaagtctgggtcaaggccagtggagggagaaggatggctgagcttgaggtctgtgagcagctgggacagcctggctgtagcagaggcactgcagctgccagcggttctcttcagacaccagatggccactgaccaacaaagggaaggacaagtcctcacgaggttccctcatagccccttagtgccaatctccaactgtagagatggagctaaggaatgaggaaaggcagtttgctgggggagaggtgggcacaaccagagcactgccgatgggctgggaggtcaggccttccctctgcgcttgctcacaggcttctcaccactcacagtgcccatgccaggcacagagatcctcaataagctcccccaatttgttccacaccctttataccgtgaatgtgccttgcagctctcctacacacatcgagctacttctgttgtgtctttgtttgcactgacttgtctggaatgaccctccctttggcctctcccaccttttcacctcatttttcctcatcccttaaattataatcatcaacgacaatgaggagcccttctctgaaaagctcctcctggccgaccccagctgagtgtggtctgcttattggttccgtattatgatgcatgttcttgtatcactgcatttatatctgtttattaaaggcatctgtttatgtgttcttcttccccattgtactatgggctcccag

SEQ ID NO: 318060 - DNA, 4001 bp, Homo sapiens
gaagccacctaccatggccaactgcagaaaaggatgttttggcatcttacttcctcctactcagcactccgcctgcattacacattccagtatttgattatatactatctcacagtgttctcaaattaataaatgtgtacattttgtctctttgaagccaagaactgcgtcttatatggcagtcattttcaatcccaacaagatctagcattctgctgctcaagctggtattccagaaagaaggaaaaaaaaaaaaaaaaaaacgaatcttgcactggcaatcaggaaatctggattctatacccaattagctcacattctattacatgttgttttttaagtcatatctattctcttcattcacttatgaagctagagctccaaagttctctgacaaagataagtgttaaatggaatcatatgaaactgctatttttgtaggttagttgaattttaaatactggcaatttcacatgggtcaacctaagtagaccatgtaattccataatgtggctatctatagtctagaaactagaccataaaggaatacaaagagtgtgtgcatgcacgcatactcacactcttatcttgaaatggttatcccacatacccgacaattttcatgttaatgctgtaacctatgtgcaattttgtttaaccttcatgttactaattcccatttgttttggccaccaagtttatcataagttctggaagaacactacaacaaagcaggcctgcaaaatccagcctatccccaaagtactgtccaggtctttgctagattatctctaaattgcaaaatgcctttcactgcatggagaggaaaataaattcataagtaaacaaaaagtacattctctaccttgtgggacgccgaaatcatgcacatttagtatagcccagaaacaaatgcttcctacgactctgcaggaccatgtctaagaaggaatatcctcaaatcctgaaatatttcaaacgactacttaagaatggagtacatcgacctcctcctactgcagaaattaactgttctatatttgtatctccaaggtacatttttcctaaaagaatatcagcaccaaggagactacaccccttaccaaaaaaaaaaaaaaaaaaagagggagaagaatcttttgagtcattgtgcgaatccccacgttgggctccgcatcctctcaagccgttctcctgtaaataaccagacacatctacaccaatccacggttctttcatggttctaagttagtcagcagtatttacagagatctttcccgtcacctaaaagaaaggtgctaacgaacagcagttcctgggcgtgaatgcccggatcccgggatgcaggcgcttctcccgtctgccctgcgagctgccggcccgacagccccatagacccctagcatttctcgaatccaggggcctccgaggtcaccctgcctgacaccctttccgccccgattttcgtgaccgtgcagccagcactgcctactctgactgaacagggacgatgaacgcagctacgccccgcgggtccaccgatgatgaccgcagtcacgaagaggccagaccgccgcccgcctctcaagcccaccccgggaccccgggttactccggcactgatgccggccgccgctcggcctgccgggcctcaaggacattccttgcagtccccgcgggtccgagctgccacaccgacaaagcgcaaccgcagccccctccaggtccgcaggagctgccggtagccacttcccagggccgagggaagctccagaattgccaccaacacagcccaaaccccgctcccacccatctccgccccgctccccgccgcccctgcccctcttctcggtcaccgcccgcctcacctccagatctcactagaggccaccgaaccccggcgccgacgctcagcctggctccagttaacgcagtcgcggagcggaaggagccctcaccttacgcacgctcggagctggacgagccttcgaccaataagagaggatcgttcgattgtctagccaatcgcctgggggctgctcggcctgacggcgctacgtcacgaacggtcgccttaacaaccgcccacagctctctgcagggccaagaacaggcaccgcaccatctctcaccacggctcggccaaccaatagccgttcgagtcccagcactagggcctgcctattggtcctagagctgtgggggcgcacgcatggcagctgcctaggcggaggcgataggggaccaggcgggtggagtgtcccacagcctcagtgcctgacccgtgctcgtcctggctgtgatagtacagtaggaggcagtgataggaagcagaatcggagcgtgagggaaaacgcagggtcaggtcgatgactgaaagctcagttactagcgcgggagagatggagggaagcggaggcggccatgagaaaaagaggaatataaaaaaagggaaggtggcggcgacgggcacctcaaacctgtaactggccggtagccgaaaccagcgctttcccgagatttacccattagtgtaaatggctccggtcacctgcgtctctctctcttgtgtgcgacatccattgcatactggattctctctgaaatgtgcctctcctgcgtcttctgtgcgttccttctgctctccgcctggtgcagggctttattatgtcttacttaaaacagtgcaatagcctctcctaactggtcttcccagtcttacacgcatgcacttcccaatctgtcctgcagaactcccacatgcagtatgtggcatactacttcctattatgccatagacccaaatcagcgtttctcattgtctactggattaaagaaagaacctgtcaccactaatatggccccaccacacatttctgacgtatctctactttcctgtgcgaaccttacagttcagccaggagtaactggcccttcttcagtcacactcagtacctttttacctccctgcttatgttctctttgtttaccttggatatgcctacccattttaactgctgagatcctaaatatcccttaaggactttttcatatgccacctcctttcctaattccctcaaacacatcatcactcccgaccttgaaaacccataaaatttccgtagtatttttttatttgtcttactatcgtatgtggaaatttattaaggacaggaattgtatttcactcaatttttaaagcccatattttgaaacacattacgaagaaaacactaaacactccttagttttaataaatgattatagattcttataatccttatataataggtattattcccattttacaaaaaagtaaaaattaaagtttgtcaagcaacttgctgtagatcacatagataatgagcaaaactggaatttgaacccagatctaatgcttaggctggttctactgttccccactgcttcagtgtaagaccttcattcatatctctttaccaaatgttgcctttgaaatgctcattatgtgaagtacacactgtggttggcatgggagatatagtgacaaacatgacagacatagtgcctgcctttatgaaccttgcacagtaaagaaaacgggtgaactacccaaagattgcagtgttctcttagcagccttgtcaaaaaaaaaaaaaaaaaagagagaaaagtgtgtaagtaccgagagcctagaacctgtcatatttttaatgccgctagaagtctcaaggaccaaatatctcagaagttacaggttgtacacatgcctactaatgtaattcaaataaggactaaagttgttaccaaaacaggctttagcccaagatttagaaattttcattcgcaaactgcctaattgggaactccaataggaatatgagttccaaagcaagcaataaagaaacaccagttgtctagttttatgctcttaaaataaattctatatccttcccaaaaggtatttcaaaagaatctttatagcacttaactaataatttgtacttagtgataaatcacaa

SEQ ID NO: 318061 - DNA, 4001 bp, Homo sapiens
ctgatatgtagcaaaacaaacttctccagctacatctcatatccaattccactggattatggaagatccaaccaggttttaaatgattctagaggacacaggaaactgatgttacaacaatatcgggtttttgcgtttatttcttctgagaaaagctatctaaaatctaagtcaaaatctcaaaatcaatccacagttaaaagaaacaagatgtaaaagcaatctggagggatatttaagatgaaaaacaaaattaaaacaaggcccaaatgatgtggcctatggctccaaacataaaatatccttttacactccctccccacagcgtaagtcagaccttctgagtgctggggttactgatgattatactagaattgagctgaactaaagtagaaccgaataaagggcaaacttacaaacttaggtgagaaatatctacaaaggtagacacaaagaaagcctttctctcttcccataaggtatgctatccctgcccccttcttcacacaaaaataactgcaattttaaaataaagtttaaagaacacaagctgcttaggtgtctcaagtgcaaagaactactgacacggataatgttaacgactttcaactgcctctcatctaatagtatctgtgcaataaagtccaaaacacatctcagaaggaaaaatctgttaactctaggagcacttccatttgtcttaattttgttgtttatcttgtcattgtttttcatattcatgcctaaaacagagcaaatgttagttagcagcaaccagaacacatcatcctactgcagcaggtggcaagagcatcctcgggaaggtggggagctgcagcagaggtgagcagtgaaagcagctactgatgccttaaggctaaggccatagggacaagcatgacaaacaggcacaacctcacattatttgttccccaaatccctcctccagagtggatcagaataatcgtttctctaccactggtcaaggccagacgtgggttttcaaagactccatatacttgctttgaaatatccttagcttaatccaaaacctatttgtgggaggactctgtgagtgcctgcccattacactgtatcacctaaagctggtcccgaaggtattagtaggagagagatgtgggatttcagaacaccaaggaagcctattttttaaaacgtagacaaaaaaaaatatggaggcaggaaggcgggaggcagtgatctatgagatttgaagcaagtacagactgagccccagtacttagccaggtctaaatcacggttgtgaacgctttcttgcacctgagctgaggaagaaaagtaatgctacccacttcccttctttccatcaactctatatgtggcagcaggacacaccccctgcgaacctaccagcctccgtctaaagaggatcttgcccatcctttggcgtccacccttaaccaacgctctggaaacgccttggtagcccaactgtcttctctccccctcctgacaccccccactcacctctaggcggtcacagctgcctctctggcacctccaactcctctgtcgttagaatacctagacctcaacgccctctcgcgttctcccctccgcgactcgcctgtgttctcggatcttctcagatccgctacggtcggcctcaggtccctcacgagggaacccccgcccggccccgctcacggtgccccatcctcccgggcaaagtccacgcctacgtcctgacccagagccccagctccttcgggcctagtcaaggacaccgcctctgtctggcccacaccccgcccgcggcacctccgcagcccagttctactccccagcgcgggacactcaccaagcgtgaccgagcggcagcagaggaaagggagtgagccacgaaaggacagtccgcggcgcctccccttcgccaccagctttatagccgccaacccacccgactccggcaccgccgagagtcgctgggaggcgggacggtggctcccacagccaatcgcggccggtagagttgcccggcagcgcccgccccccagtccggcttctaccaatcaaaaggaaactagaggcgatgactcgctaggattttccctcgtggctggaagggcggggagaagaggcggggacaaagtctcagggccgaggaagtggtgtgagagactgacgtgaggtggcacgagagcccagttgccaatgacggagctgcgagatacggcgagagccaacgggagcggagtgagaggttctccgaccaattgggactaagtgagaggagatgcgggccaatgggtactccgcgtcccaccgctggagagatggtcaaatgtgggaggcgaggtggtcccagcttgggagtctgtcaggttgcctagcaaccagaactaggcttcacctgaaagatttctgaaatactgtacttgatttgaattcagtcttaacgttttctagcaaagtgtgcgtagattgcaaattggagcagaatacttcacccagaacttgtatatgtgtaaatagtctaaatacccgatttgtaaatactcaaatattgtctcctttattcaaaactaccttgacttaaagaaaacagaacaaacaaaagtgctcttgagacaaagctttctaactaaacctaaaacaaaatggtttcaggattaggcatccgtggggagggtgcagagccttgcctgtgaagggaagttgatactgaattcaaggatttttgccaggccatgcactctgaggaaagggactccatttggcctgttgcccactgtatcttctaagcttcatatgtggtacctgccaagtaaaaggctgtggaaaggccacgtaattgtcggcatagtaaatccatcggatacggactgcctaactcccccagcaaatagagaggagcaattcaagctagaggaattcactgaaacactatttgggggaatccaaaggaggacacttgtggctttgcaataaactctgcctctatctggtcagagagagaagccataatacttagctttggtgggggaccatgagtgaggttcggagttgtttgtatctctccccatctcaatttaattaacaggaatgctattgataaggggtcattggtaattctgtgattcacacaattattgttatgggagattcttttaaccactatagatgctaacctagtaagacacattctcagcagcaaagtggcaaaatatattggaaatggaaccactgtgaagtggtggcataaatgacttgggggaagaggaccactcagtaatgatttccattccacagtattgcccatgactcacttcatatgtatgtaaagtaactagatagtaaacagagagagagacattgcctgattatgatcaacagcaatttggggtggggtaggagattaaaattcttggcatattggaatatgctgaaaggcagtaaggacaaacacaagaaagaagatacagttttgtcgttaggaatcgcaaataattccaactccaggagtacataatgggaaatgattagccagacggtcatgagaatgaccatcttacacaaccggaaatttctacaaggaacagaccgtctttttgatcacgttaatcttcaattaagcaaagtgagcatgattattgattactgggaagccaagcaatggagaacaaaaagggttagtaattagatacagaagatcttgttataaataaagtttccatgctgcaaaagaaatagcagtcgaatataaaattttctttttaattctcagcaaggcaaggtacttctatagaagggtgcacccttacagatggagcaatggtgagtgcacacttggacgagggagggaaaggggttcttattcctgacgcacgtggtccccactgctgtgtcgttcccttattggctagggttagactgcacaggctaaactaattccgatggactaatttaaagacagtgatggcgggaaaaatggttatgaaatgagtcagggtgaagaa

SEQ ID NO: 318062 - DNA, 4001 bp, Homo sapiens
cacagaaaccacttgaattttacaagaggaaataacatagttgcccctgaaaatctgtcaggaggaaatttagaattctgggaagaggcagttgtggtggtaaatatgggactgatacgtgcagtacaaagcccacacacctctcatttagacctcactccacaaataaggtataatgagcactgcatgtggagtcaagagacctaaactctaaccttatgatctcagagaagtctattccacatcctaaatttcaactgtttctactgtgagaaaaggatgaacccagtggctcctagtcttttggaggcaagaattcttttgacaatgttgcgaaagcttaaaaaaacaaacaactacaacaacaaaaaacctctcctagaaattgcagacacactgtatttcacctataattttcaggatataccccaggtaaagcacacattattccttaggttcttcctagttctctgtcatctctaaatgattcctcttcctattaaaaacaaaaactaaactaacaaagaaaaacaaaacaaaaacctacattctaactgccatagtgcaacccaggaagagaacacagtctacaacttggctgggtaagcaataggccagtaaaggataagggaagcagtagttcaaatcaaggctacgtggggactgcgcttttttgccctgaattgacttctgggcggctgaaagccttgtggagaagggcagtaactgcaggagagcatctgtaatgaatggcatatagggtactaagcaccctgcgcaaaacgggttaggaaacactcattacagccaccttgggctgagggcaggaagacaacaccctacggttttgtttgttttattaccctgttctaagcctgagtacaagtttgttatcagactcgaggcagcagtatagcaatgcaaaaaaaggcaggacaatttaaggttaaaaacgaagggctctagaggacagaaaatccgggttctagtacagactacaccagtcgcaccagcacggggacctctgaccttaagcaatctacttaccctaagtctccgttatttcatctgtaaaacagagttaaggtcaatacctgaaatatgcgagacactttctctgtcccatcagatcctccttggaatctcacgagattgcctttgagggctcagccatgggccacagtttgactctgggctagctcctttccctcattctgggtcatgaatgaagcaagagccaaaccagacaaagtcttggtcaagctaagacgtctgggacatccgaatgtcccatacggattgcggaaggaggacactaaggctcagtggccctactttgtggaagactcagtagaggctcagagagccgcagcatccaactcgaggtcgcccagcggctcggcgcggccctcgaaggcgggacttacccggaggagcgtgcaagctgcgccgctcacattcccggaggcgcttggcccggcggctggacgagggggatggctggcgcactcgcgctccccgctgtcggcgagaggcggctccagtcgtgacagcagcaacaaggaagtggaggcgagggctcgcgcgcgcatcccgggggctgaaggagccccggccccgcggccccgcccggcgacacacggcgcggagtcgcgacagcccctctcgcttcccctcctcggagtcgcgatatggggtcctgaagggcaagaataggagcacaggttcgctccgcaggctcctcaccgatgcctgccgagggccccgggggtcaagccccggggagctcgaggaagacggcagggacacggtcgtcaccgaggcaccggtttggcggctgcaccggcagtagcggcacaccacggatcgccagggagacccgtcccggcggccctcgcggcgcaccggaagcggtcggcagcgcgtgactgcatgcgacccctggcgcaagcgcaacagcccagccctagcttgggagcggacccacacgaactgctcaaaggcttggagcgggtctagtaaggcgaacggactgcttccggccagaggtcccgggcggaggaggaagctgtggctgccggcggtgggacgccccggccgctcagcccccgggcactgctgtggggcgttcaggtaacaggggcggggctgtgctgagcgtgagggatctaggccccgcctcacctttcagagccacgtcgggcgctgggaagcctacaataccaccctctcctcagcacgacgttcaaggcctgacctcagcctgtctcagtctttccctctcattcaggatcgggttcatacgtagtgccgcatcaagtagcgccttcatcactccagtgatctgccctcaatccgtctctcccactggcccacgaatagtgatggtagtgagttcctggagtgactcaagctgagctgaatgaccgtatggagagcttccgtaaatcaaatagggattggattggattgtcctttctctccagtgtcacaagttgtccacatttgtacaagttcccgcacaaccctcactgtattccagtctgcctacttctctgcatctaccgccatcaccaaccttctagccaccatcatctcctgcctggactgatgtagttctccccacatcccctctacaatccattctccacgaagcagtcagattgatcattttgcactgtaagtctgatcaagtcactccctgcttaaaaccctccagtgtctcattcacttaaaataaaattcagacgtcttagcttgaccaagacttgtctgatttggctcttgcttcattctctttctatgtctcctctcaatattagtagttcccagaaccagctatatagcactctgtagtgtttggagtgctagctttgttgtgagcctcctgggtttgaatcccagccctgccacaagtaagcaatattaagcaagtaaagtgcttaacaaatgaggtttacgcagtagatcctcccacctcagtaaatggcaccatcatctgctggattcctcagtgctcaaaccagaaacctgggcgttatccttgactcctccttcacctcacatccggtccagcacagggcttgcaaaaacatagccccagactgactactactcaccatctctctattactactctaatccaagccaccattatctcatgtggactcctgcttttttctctgatacccttccattctttacacagcagtcatctctccttccttaaaatccttcaatagcttcctattgcactcaaattaacatccaaactgtatatggcctactggtttagcctgcttttatcttcagatttaaggccatctcttaggaaaatcaactttacccattaggttctctaccctgcaaccaaaagactatattgtaaatctgatcatgtcattccagaaaaacaaaaccaaaaaaccgtcaaaagcctcttaatgcccccaaagcaagctagaaacctgactaggacttcctgtgatttggtccttgctttcttctccaaagaattttttgttcctgaccaggacattctatttcctatatagtatttcattgcctttcatgttaaatatttcctttcatctcatgagttcctatttgtttattctttaaggcccaccatattattccctctttgaagtgcactgcccatccatgctccattccagttgattatctgcacatttatgttccagtagtactccgtaacctctgatttagttttcacatgctctagtgtttgtcttccctggtaggctcctcaaaggtgggcactatgctccattcatctctgtatggctggcatcaagcatactgcttaatacatagtacatgtcatgaatggatggatacatgtatggaggtgatagtaaaaatctacccttgagaagggacagtcatagcataaagtcacagcaggttctcttgtcctttaaggattctcatgataaaatgcctacgaaggcaattacccaaaactgctactgctggat

SEQ ID NO: 318063 - DNA, 4001 bp, Homo sapiens
gttgtgatttcagtatgcttattgctagttcttttattttgccaatggctacatttttaataaagaaaaagacaaggatagatgaggaaaatatagaacatttttatcttcaatgcatgtcagtaagaatgatgctatgaaatttcagttaataatgaaattggagctacaaagaccaaatcataaataaaatgaatttgcaatagtgttactcatagtaacacataaaaatatgaaaatatcatgtgccatatttgcctctgcactgagttatatctgtacttctgcttcaatactgtaattggccatctcatttctattgcctatggagcaaaagtctgaaataaaaaaggtatgttcatatttattacttatatttttttccttgcaaaatgacaatctggagataaaaaaagttaattttataattcacatccttacaaaagaattttatttgttattcttccaaaggaaatccacatgccatttactttatctctcaccaataaaaaaaaatatggactgctcatgagactgacaatgtctttcttcatttgagtttctgagttaaggaaacaaggatggaaacagttgacttatgctggccccaacaaatgccctttccattttttacttttcagttcagctaacatttattgacagcttttactgtgccaagcactgtgctagatgccaaggatacagaaatgattaaaacacagttccttccctcaagaatcccatgctctgatggaggaggcgaacaagtgctttaggccaaaatgtaaaactatgagggcaccaaaaagggagtggtttattttgcctggaaagaaataaaaccttcatagaagaggtgacatttgaaaggggccttgaaggaaaaaagggaaggtcggtagttgtctgtatgaaacaataaaacagcataaaaattctaaaagaaagttctgtttgtattctgtgggctacctgtgcaactggatctgagcattccctggggtggctgagggggctgtgtggaccagacagagcacaggcttccccggcctcatcagtccaggctgagtgacctccagttgcaggaaggagaaaacagcagatcccttcagtgcacggcaccaacacctcctataacgtcaacccagggctccgtgtgtcctcttcaagaggagaaaacaagacaaaaaaacaaacaaacaaacaaaaaacacgacagcagggcctttctgccatttcctggctctgaaatgaggttagtgagttaaggaatgaagccatcgtgtctttatctgtaaactggggaaagctatacccccctcaagtgcttctgtgaggatgaaagagagaaatgcatgcaaagcccccggcacatgatcctaagaagtgggagcatggcgatgatggtgatgatggtggccatgctaaggataaaggacgggtctggtctctgggctgccttgggaagcctgagcatcccacgcggtgggcaagaacaatgtgatcttggctaccctggctccgacccagagggacttcctgcccatctgcacttcccttgccgttgtccttgtggctcaggtggtgcaggcagctgctccaactgctgcctctggtgccctgacagctgcaggcagccaggcaatgggctatgaaaccgaacctcaactggaaactatccgccctaaataatcccagcaacaagggccgtctcactcctctcccctgccttccgccatccctgttttcacctgttgtggtttccctctcattccaccagcattttctttcattttctctgccccttcgctgcctctttccctctctctctgttctccctcctcctcgctccctcacctcttttttcttctctgcattctggctgctcctccagttctggtttctccactgtggtgtggcagaggatgtgaggtcagaaggctcagggcctgcccggcttctgagatgcggggcaagccgcctcggcctcctgggatgtggtttcctcatctgcagaattggaccagaatgactctggagtgttccttccgttctaaactcccgttctgttacattgtgttgtgttagcctttgtgcctgcttttcctgcttcagctgtctcatctgtccacctgcctcttccatctgcatcccaccactcgggtccaagctgccagcatcccttgcaaggacccctagagcagcctcctgctattggaggtctctctgctcctgttcttatccacatccaatgtgttatccacacagaatccacagtgaccttatcaaaatagagatgagattgctcactcagcttaaatcctccaaactcctttacaccccttttctatcataggtccctgtttatgttcttcagagtaattattattgcctgaaattatctttatttactcatgaatttcttaatgttgatgtatcatttgctgtctgtcttccacactagaatgcaggctccaggagtgatggacttgattgtctcgtttactccatatcctcactggaggggccagcgcctttattctctccataaacactgaatgaaggaacctccctttgccgcagaatccatctctccccttcttgagagtattctctcctaaccacaccatttcttacttagaaatacctgtgcctgccagaaatcctgcccatccttctctgtcatttctgatataattcccctcattcacttttctcagtcagccgggtcctgtgttcccatgggctatggtaaagaacaatggcaatgatgaagctagttcttctttcactttaatgtcaatctgtgccgttggatgccttaagataaaataacttaacaactctgagacttgaatctagttaattgtcttacaatgctgagaaagagacttctttaagaaaatatattaaaacttccaaaattctgtgcttggttcttggggagatgttaggagtagccattttctttaaaacacctctttaaagtaggtaatgttaatatgtccattttacaggtaacaaaactgggatttagagagtgcacaactggacaaggccatagagccagaggtgcatggagccaggatttgaatggaagaagtgcaacgccagacccaggcacctagccaccacatgggtgaccctagtcaccctctcactccctagattagattactctgcattattttcaccataacacttataaatacctgatgcgatcatatttcttgtgtctatttgcttccattataacataaactccatccaggcagttaccatatctgacctgttcactgcacttattccaatacttacaatagtgcctcatacataatggacgttcaataaatatttgctaaatgaattagttatttgcatattgaggatgagatatgaaagaaggcctgataattctgtatataaaactccatcttagccaggcactgtggctcacacctgtaattcccagcactttgggaggccaaggcagcaggatcgcttgagcccaggagtttgaaaccagcctggtcaacatagacctcatccccacacaaaaaaaaataataaataaaaaataaaaaattagccaggcacggtggtgcatacatgtagcctcagttactcaggaggctgaggccagaggatcaattgagcccaggagtttgaggctgcagtaagccatgatcactccaataatgcaccccaacctggatgacagagaaagactgggtctgtaaaaaacaaaaaccatcttctttgatgatggaattttctcaaaagtatcttcagtgttggcatatctttttcctttgagaatgcattggctttttgcaattagccaaaactgttaaagactgcttttttgtcaaaaagaacatatggtcataaagcatcatcactgcttttcttgccctgaaattagatctatttgtggaggtgtggaggtctaactttctgtgctttgggaagcttatgcactctggtaaggcccctggact

SEQ ID NO: 318064 - DNA, 4001 bp, Homo sapiens
agtaaaaacaatagaaaaagcatgactcatatgctgcaaagttaggcattgttttgtgaaacttttctttcgtatgtatgtgtagagatataaaaatacatcttaggttgaaatataaattttgggggtttttttgcttttttttttttgaaacagagtctcgcactgtcacccaggctggagtactggaatatgaaaaatcaccacagtgcctcatacacattaagcatcaaattaataattagtattatttctgtaactgtgagcctgaaatactatatctttgataaagccagtttaacctactataatgcaaacaacaaaaaaaccaaaaaaaccttaaagccacactgctgacaaaacttaagagtaggtcctttgattactcgggaaatcatatggtccttgagtcttttaactaagaaaataagtttgtgctgattcacttgctcatttggccttcctttgtgagtagttgtattttcattcacacgttggctgacaaaacttagagacgtaatgagtaaccacgaaatagtgtatgatagtgaataaatcatgagctttaatatttagctctaccacttactgattgtgcaagatacaaaacctctgttttctcatctgtaaaatgaggtcaatatcagtaccttcctcacttggcttttggaaggaataaacaagatctagtagcacagtcccagcatacagcattttttttttttctgtaagacagagtcttgctctgtcgcccaggctggagtgcagtggcgcgatctcggctcatcgcaagctccgcctcccgggttcacgccattctcctgcctcagcctgtagtcagctgggactacaggcgcccgccaccgcgcctggctaattttttttgtatttttagtacagacggggtttcacggtggtctcgatctcctgacctcgtgatccacctgcctcggcctcccaaagtgctgggattacaggcgtgagccgccgcgcccggccgcatacagcatcttaaatgatgagtgcctaccaaacacagctaaggcttcctggttactgtgctgtgcattgcggtgttaagagcacacgatgggggctgggttcatattccagtccggtcactttggtaatgtagcactgagcaaatttaagtctcagtctttttatcaataaaataataataggattaccccttagagttggtgggaaattaacataactaataatcgatgtaaagccttagtacggtgcttgaggtataagtggtcaatatcagccataacttcattgtttatgttttcaataagtgctgctgctctaattttacacccataaactgcctttactaatcttccttcttttatgcccaaatggaatacacaaaagaaatgcacaagttcagactacaagtaatactccagtgttcttatcagtgaggccctctcggacttgaaaatcaagtagctaccaacgtctcgggtccattcccttcgccctgctgtagtttctccattaccgctgtttattgacagtattccccgcctgaatgtaagccccacggggcggagactgtttcactgcggtatccttagcatcctgattagtgcttggcatgtaacagatgcttagagcatatttgagaaaaatcaatcaactgaatgagccccagcccgaccctaaaatcgcctcctgcttgcctcccaagaagggagctgaaagaggcaaagggcgttagggcgtctcccgtcccccagctctttcccccttacgcaccagaagggtcattgaatcgtttcaagggcgccttaggaaaggacatgttgacggccagctccagaaactgaaggtgactggcactcctcgacaactgaatgcggattatcactccctaccggtttcaaattcaaatctccccacattccccacccaccccggcgttagccaattggaaagccaaacccctgggcacaccaatcccgcacaggaacacgaagaaagaatgctgggttctgattgcgtccaattagctggcctgcgagtttaggctgccatccaataggagaccgttactgttccccgccccacccacccagtcattcccggagttactcaagtgtaacctagcatttgcgcaagcgcacttccctccggagacgttagaaagtgcattttggcgtcacttaggggacggtgtagtgagttccggcttcactggttccaattctgtcccattgttcgttgcatgtgaacttttctggatttcagttctttcatccggggcctgccggtgccgtaaacggccattcaaagggaaaaacgaacacgcacaccaaagcgctagcttgcgttcctgcgcatgcgcagtgacccgagcggagaggccgaggcgtagcctaagcgtgggattccgcgcgtgcgctcggctccgcctggtgcggccgcggccgggagggactggattatgtcggccccgtttgaggagcggagtggggtggtaccgtgcgggaccccgtggggccagtggtaccagaccttggaggaggtgttcattgaagttcaggtgccgccaggcacgcgcgcccaggatatccagtgcggcctccagagccggcatgtggcgctgtcggtgggcggccgcgagatcctcaaggtagcggcagctcggggcttgtgttcagtttcctcttcccagacgcccccagccccgtttccctgaacgactgttgggtgtcccgacggctcctgtggctggcagaaagagaaagaggataacactgaccaggtttgggtctggtcagagcccccgcctcttcagggcaggtgctgagttgtggaaatttgaggagcctattttcgtgtttagttttcaaactaagactgctgcttctgcttctctgacgggcttcagctgggaacagattaactaggttgctaaaggaacaaatatttcttccgtgcactgaagacaggcaggaagacaacagataacgtacctgcagtggagaggttaagctcctgtacggaagcgtaattcataaatagataaatataggaaaggacaacaaagaaaatagggatagaataacgggcagagaatttagagatgatgtcaggtgattagttttctcatctaaaagcttgaaaatcctgcatgtttgtggagtggtcaagcaggtggtgaagaggtgtgtgcataaaataagtagtactccttttatttcttttcaccaatgctctttggatctggacccgctttttctttgttaagtgtataattaaactaacaggttgaaattagatttagttctcaggttagatgcccaagatgtttgatggcagtgtaatatggtgaagggagactacttgtttcctagttttgtaaacttgggcgagagattgttcagtgtctctatatcttccttatccacaagataaggtagttatagtacccttctcatgggattgttttgagcttaacatggtattcacgtgtatgaagagcttggagtattcactggtatgtaataagttcatactatatgttagctattagctattatatatattacagtatatggaggtgctttgagtgcctcaagattcgtgtgaaagacattatgtcagcttggatctcagttacttttctgaattgtacaattcatagtttcctcaacaatggttttagattacgattataaattagtaaatccagtaactttcggaatttagcagtagctgctgaatttgggatttctgatgtacgtatagaccagtgggatttttttctcactaattttgacatattttaaaatgtgggcttttcctagtgacatttaatttcactttctataacttaaatttggcaacaaattaaaatggatttgagtttaggcattctctctttaaaaaaaaatatatatttattgagacagggtccctgtctcccatgctggggtgcaggggtgagattgtagctcacagcagcctcaaacccatggggt

SEQ ID NO: 318065 - DNA, 4001 bp, Homo sapiens
ctttgcatatgtgtgccctttgccttaaaaatgccttcccttccccactccatggtctgccaggaagggtttttactcacctttaaaagcccaattcaaatgctctcctctgcagtttgcctaacctgtcttctcagtcccattcccaaaccttctccaccccaatagaatttagttgtttccacctgtgcaccctcacaatctttgtaatgctcaggtataacatttaccaggatgaattaatctgtcatactagaaaaggattttgtaattttgtctttttataaccaactcctagtatagggacagggccttagcaggtacaaactgaatgcttgtttgagtgaatccaatcctctgtcctcaaatctatacctgtcaatttttgaaagaccttcccaaaataatcaagatgaattttctgtcaccacctagaagcttattagtattcaccagctgtaagaaaactttaacaaggaaagatcaatttgcttgcccatttatgcagatatgaacaaaaaatgaataaacacttaccataaatctgaaataacacaagagatgtcttggctctggaaggaataactacattttacaagaaagggagcacatttggcagataagagaatgaaaggatttggggggtggaattttttgctgctttatttcctgagatggggggagcctgggggctgatgagagcaagaggacatgctttaccttttctggagcaggcagctgtaagtgattaacctccaagggagtgatgagagggacggtctggaagccatcctcaactgaaggcggcttggttcccttctcgctggggttactgttcagcttcaccatccttacgcctttcttcccagacctaaggcaagcagtgggattctggttacagcaggaggtgaggcagaaagagagggctgacgacagagaaaatagcactgtcctcaacagctccactcaagtggctttcaatctagtgatcagtcattgatcttccactagatttccagacatgattcccattgtccaacaaaacttctttaatcatcaaaatatgccaccttcccatggggttcaacagcactcaaatttaaggaattcaaggaaaatcctaaacctatacacacaaaaaatataagtgtaaaacaaatacccaagacactagagctaaagtgctcacacaatgccagtaaaaagattatacttagtgcaaaatgaagtcctattataccaccccccccgcctgcagtatgataaatttcacctcaccactctggttgctattctattatgttggttttccatcagcaataccctaaaacacaataaatacattcaacgtctcaatgtgtaccctgttacatcatatgtggattgtacatgaggtgcaatttcctaaaataaaaacaaacaaaaaaaaggctagcttgaacctgatcctgttattcagccatggaatgcctccatttcctcaatagcgaagggccatttttttttttttttggttccatggaaagttagcagcccccatattgcaggattgccaactaaataaacaaatcacatttattcatctccagatcccttagaagtcaaatggtgctcccctcccacccccagaagctcaacacaactgaatttcttctctcaatcctgctgatggaacgtttagacaaaacagggttgttgtgggggtgaaaggggttggaggatattggggagtggttatagcaaaaacaaatgcctacttactgtgctgcactcgtggggggtcagagcagattcaagccaatttgaagaggaggaggacggccaggagtcctccctcctcagcccgagcttgtggtgctgaaaggacagcgcctcgcgtgtgtctggatcggagcttctgagagcaggcgtgagcgagcagggaagagctcctggcagctgcctgcctgcttgctcgctcgcgccccctcctaccggggaacgcgctcccacaccatctgtcatctggcaccacctgctgtttcttatgcatggccacaaccactgcacgggacaaaatggtttcaagaaagtgggaaggattttggccacaccaaaaaaataattaatatgcaccatataacaagtaatccttgagcctttggaaaaactggaaaagcaggcacattcattaggagagggcattgcctcctaagaccttccagaacaatatcataaaacacagaatggttcaagacctctactgtgctctgaccctgtggtcaggacagaagggaaatatatttattgtgtatctttcatgcagtgggcacttttccagcctctttcagactatctccctcatttgcaaaatggtgtttctaatagtacacacatgatggggttagtacaaagcatgaaatgggatagcatagggaatgcatgtagtacagagcagggactatggcaagcactgtattcacatgagctactacactcaacattgcactgtgatcatacagggcagccacggtaaccagagctggaatttgaaccctgatcggtggccaccaaaatttgtatccagcccaggacattgcatggcttccaagttggtgcctggaatcagacagggcaaagtcctagtgtctgctctaccaaattctggctgtatggattttggacattttgcatttattctttaaacctccatttccttttctctggcgtaagaataataatatctctcttgcagagcgattgtaaatatgagaagagattgtgctcaaggaaaccccttattgctcaggagagcgattgtaaatatgagaagagattgtgctcaaggaaaccccttactgctcagggacaaggttctgaatggctgcattatttcatccccggggattgctcacagattctcttcaaatcctctgaggtcaaggctgttgccactgtcttcaccaagctgtggttcaagtcactgatggttgttcattcccagctgcagtgctgcttatgatgcacttcatgaggcccagctgtcttggcatttgtcatagggtccccttttgctttcaaaagtattctagtttatgtgataaattgttaggtcaccctagttagtgctcatgtgctgagcatacactctgctagctaaaaggtcaggagaaaacgtaagtattatatatattgttcagtaatgaaacgtgtgggggggggggacacgtgtgtggagagacagagagagagacattttctgagacaacaaaagctagcacatctgagctgcacagggctatattaatagaagtaggcagatacataatatgggagtgtcccagtaaatgttagtcctccattctcttctttccaaagacctagatgagttttcaggtgcaatcattgtgacaacacaatgtggataaccacgtggagtcaattgtgaacccttgtgtttaatctttttcctccagaggaaaaagaaattccttttgacatgtcttgtgattgattcacacatagaaatcacacttttaataatttcaagccaagcttctgcacagcaaaggaaataattaacagactaaagagacaacctacaaaatggaagaaaatatctgcaaactatgcatctgaccaggggttaatacccagaatatataagaaactcaaacaacagccaaaaaacaaaaatctgatttaaaaattggcagccgggagcagtggctcatgcctgtaatcccagcactttgggaggccaaggcaggtggatcacaaggtcaggagttcgagaccagcctgaccaacatggtgaaatcccgtctctactaaaaatacaaaaattagccaggcatggtggcgcatgcctgtaatcctaactacttgggaggctgaggcaggagaatcacttgaacctgtgaggcacaggttgcagtgagctgagatcatgccactgcactccagcctgggcgacagagcgagactctgtctcaaaaaaaaaaaaaaaatggcaaaatacc

SEQ ID NO: 318066 - DNA, 4001 bp, Homo sapiens
gataaacaattcgcttagtacaagagatggatgcacagaaacttaagagtttaaaaagccacatccaccacttcaaaagttttgcctgtaagggatataattcaacacgcaactagcagggcaacaggagaggggaaaaaaaccacaggacctcttaagtttctctaagtacacatcaagaataaagaattaacacgtaaagtcttaaacaaatatcccttaaaaaacggtacggaatggatcctagaaaaaaaatgttagacatgtacggtcaaacacaatgatttattaaaaataaaacgtaaaaatgatttttgtacatatgcttccaaatttcaggcatgggatccaagtagatttcatagaaaacgctgtagccaggttatcaagtccttacaacaaagtaaactaccccccaccccaacccccacccaggttttgctacagaatcagcaagttcactccctccctccccccaaaaaacacaaattaaaacaagacattttgctagtataaaaacgaccaaggtccaagtaataataaaaaaatagagtccatcaatgactgtaacacaaaaatgtgtatgtggggccgagtccatcttcagagggagagacaagagaggtggcaggcaaatagaggaacacccccaagggtaagcagccttagaagtggctcccccaagggcaaaacagggaaggcggtgtgtgtgagggggtggggcttaggagttgaccccacttgggctgttggaaagagctacccctatagccactcccaggcattttaaattttcttttagaaggagctgcctccatagccacccccaccgccatagccgcctctgtaaggtccactattactgcgaccgccccagctactgcctccaccgccgccgccgccgccgctcttcatgggcccataggaggactgatgctggctgtagctgccgaagccgccgaagccgttaccgtagtcgctcccaccgtaggacgaaccgccgccgccgcctccgtaggcattgtagccgccgcctccgccgccgccgtaaccaccgtagctgttgtaaccgccgccgccgcccttggaaaggccgttctggtctcgaccaccgccgcgcccccggccgcctcggccgccccgggaggatcgggagccgcctccacccccaccggagtagatatcctccttggggactgctttcttcacctccacgcgatggccctgaatcggatggaacttgaccaccgcggccttgtctgccgcgtcgtgattctggaaatacacgaagccgaatccacgcttcttgccggactgcttgtcggcaataatctcggccttttccacggtgccaaactgcgagaagtgctcgatcaggtcgccctcagccacgtctcctttaaggcctccgacaaagagcttcttaaccttggcgtgggcaccgggccgcgccgaatcctcccgggacaccgcccgcttcagctccacagtgttgccgtccacggcatggggcgaggcggccatggcggcgtccgcctcctccacattggagtaggtcacgaagccaaagcaacgggagcgcttggtctggggattcaccaccaccacgcagtccgtcagagtcccaaaggcctcaaagtggccgcgcaggcccgactcactcgtctgcacattgaggccgccgatgaacagcttacacaactgagaattctccatctccaaggcccgggccttgcccccgccctgcgagctccgaggtttcgccgtcgccgccgttatcgttggttaaggcctctacacagcttgggcccagccgttgctggagccacccccgccgctcaccgacggggaagggaaaaagggaaggggagggaaggaaggaagagaggaagggggagggaaggggagcggtgccggctaaagggcgagccgaggagactggaagacaaccaaggccaccgctaccgccgccgccgccacctccgctcccctatctgggcaccacacaaagaggccgctgaacgcgcgcgcaccctccccgaggcgtgcgtcaccgccgacgtacggcagcctagggctaccagccaatccccgcctcgctccccttaatcccgcctaccgcgccgcagcgccgctctagatcacggactccccgccctccgcggtctattcaagcccgcggcctgtgccgctcccgcttccgcttctgccagcccactttcattcccgagcgccccactgtcccttgacatgggtccctccctgccctccgcgcaccaccgcgattcatttcctcctagcaccgcggctgttcccagtgtttctccccctcccctttactcatcccctcgcccaactccgcagtggcgttcgcgccagccccttgagagacatctgagttcagccaatcaccgtgatcccctcgcacccacttccgttttcggcagctgttggacgggcgcgctccccggtgcgcgcttgccccggcgcccccggcgtgcagagccggcctaccacccccgcgccttctcccgcccagggctttgccggggagagagcagggggcgcgctgggggccattcccaacggatgcggtctggggcgccacgcgcgggctttttgaaaacttgactgttggggttgggggcccggatctacccgccgcctctccgcttgtccgctacacctggcgtccccgccccacctcccgcccgcacaaagatggagggcagaggcctggtccacgaaggcggttattaaccgtttacagtgggcccgacgtgcggttaaactaaaactttgccacgtggccctgcgcaaaagcgagcccgaggcggcggtgtgaaagacaacagggaaccaaaagaacttcagacattaggaaccagacgaggcgcgacatccctgcctccctgccaccctcccgccctccttgaagccctcccacgatgccctctcagaggaggccctttcaggtccccttggcacactccagcagacattttcatttaacctcagtgaatggttttttatgtgtaatttacatcatctatgtgttgctttctttgaactagaatgttagcttttttgttgttgttgagatggagtttcactcttgttgcccaggctgtagtgcactggcgcaatctcggctcagcaacctccgcctcctgggttcaagctgttctcctgcctcagcctcctgagtagctgagattacaggcgcccaccaccacacccggctaatttttgtattttagcagagatggggtttcaccatgttggtcagactggtctcaaactcctgaccttaggtgatccatctgcctcggcctcccaaagtgctgggttacaggcgtgagccaccgcgcctggcctagaatgttaactttgcttttttttttttttttttgagacggagtcttgcctaagctggaatgcaatggcacgatcttggttcactgcaacctccacctcccgggttcaagcgattctcctgcctcagcctcccaagtagctgggactacaggcgggcaccaccacacctggctaatgtttgtatttttagtggagacgggatttcaccatgttggtcaggatggtctcaaactcgtgacctagtgatctgcccgcctcggcctcccaaaagtagaatgttagctttttaaagatgttgggttagacgaatgttttacagagagagagatcatatacccctaagttactgcttttagtgccctcactcagatgggaatggaagaaaattacaatggcttccatttattgagcctttgtgtgccaagcaagataaatggggtgggacatagttaatatgaggcattacgtgaccaaaagcctccaaaaccatatggtaaacgctgaagaagttaagaggaattcctcactgtatcctcaagtattcaggaaagatttaggaaagaattggaagttgcactgaacctcagagccaaagactagttagtatcctaagcaaattaagg

SEQ ID NO: 318067 - DNA, 4001 bp, Homo sapiens
ttcctgcccaagcagtcccagcgtgaggcccatctccagaagcgaagcagcagggactcggagcataggctgaagatgggccacaggggaaggaatcctccctccactccctactagctgtgacctcttctacttacatttctgagccttagggttttggtttttgtcctgtaaaatggggctaaaagcctatcataccaatcatggactctcttgtaatcctcccagatgtttagcgccgtacccagaataggcacataaaaggtaatgaatgtcaactgtcatcttcccgaaccactccagcacattctctcactcccagcttaatctgtattttcatcccctcaaaaaccggaacataacctccggctttgggttttgcccaaagcacttaaatcacatgcagaccacacaaactagtcatgctttaagaaaggtgtcctcttagaattcaaatcgtttccactgagactgctgaaatccagtacccagcttaccttctccacactggctgcatctttgaacaggataaacccaaaccctcttgaccgtccagtgttgggatccatttttattgtacagtcaacgacctctccaaatttagtaaaatagtcttttaaatcttttttgctagtatcccagctcaggccaccaacgaacatttttctgaaatggtagggtgagacacacggcaacaagtcttgtaagcaagctgtgattttggaaaggactggccctggcaaagttctcacgaagtctacagctacccttagagtctgcaaggagcaccttagaaagatgttaaatctccactaccctccaaattgaactcaaccaggaccctaacgaggcttaacaaggctctgcagccccagcctgtgagaagcaaagaagggaccacctcaccaggggtatgggacctaaccactcataactggaaattcatgtgttctacaaccatgtagcaaagggccagcgtctccaccaactcctgagaactcgtttcaaggaactcgatgtttccggggaccaagcccgcccagggttcagaccgtgactccgcccccgggagaggcggaggagggaggtccgggccccggctcgcgccaactccgcccacgcagccgccggcgcggcccaagacgccgccgggccccgggtccgagcgctttccctcttccgggccatccgcccgcccctgcgccggctccggccctggccctggccctggcagcgcgcgagcggccccggggcggcgccaaagtcgacccaacaaactcccgcaaactccagcgcgagtggcagcgccaggcccggcccgcgaacgcagcggcgacagtccgcgggccgcaccagccccgacccgggccaggccgccgcccctccccccgccgcgtggcgccaacaaaaggcggccccggaacaaaggcggcgcccccgtccgcccgcggccgcacctaccccgcgtcctcctcgttcttgctggcgttgatctggtcgccctcggcgccgttctgattcccgctcgggggcgccgcggtcgcgcctccagcccccgccgcggcgcccgtgccagccccggccggcgactcgccttcggggacggcctcatgtccgttctcggtggcgcccgtcgtctccatgggctgctcctcgcccgcttccgacatgctaggccgaggcgcggcggctcctgcaaccagcggcgacagcgcgtcaggccggcgcggctcccgccagagctcccgcccgccggccgccgctcacctcgccgccgatgacgccgcggggcccgctcgtccccacccgcaggggaaggcgccgcaggctcggccgcactcaagctcgcgctgctgaggcctcgccccagtcagcccacggagctgctccaactgtgtctcctcctccttggccgccgccgcacgggaacccaccgaccaacagccaagctccgtcccgcgcggtgccgccgcctgacaatgccgactcgtggcgccctttataatgccggagccgggtgccacatcgcaacaaactgcacactcattggctgctcaagtccgtcactcaacctagcttcagcgtcccattggccgccacggcgcgcgcgctctagacctgggcgggctttgtcctcattttagaacgcgcgcgagtccggccgctacggagggctcccgaagccgggcgggacggcgccgggtccagggcggcgggcagctacagcacatcggtgggagggcctaatcggattgtaagctcgtcgaggccgctggtctcttgctctcgaggactccatcccagcattggcagcctccgcctccccatgtcccaaaagaggaaactgggctggagaaagtttcgcagcccaaggacgcgtggctggaagtggcagaacccgggcttccgaggttgggcgagtggggtcctccaaggccctcagcacgggtcggagggattgggactgaacccgccatccccctggaccttggtgccctccaagccccgcgctcgcgccctgtccgtcgcctcccccagagatgctctgcagggacgatgagaccttggtgttccccggttctctgtcccctggcaccacctgaacgattgacatcgcatttgtacttttgtttacttaaattttttcctgtaaatcatttgtctttctttttcttcctttttattatttttttttttttgatggagtcttgctcttgtcgcccagactggagtgcaatggcgcgatctcggctcaccgcaacctccgcctcccgggttcaagcgattctcctgtctcagcctcccgagtagctgggattacaggcatgcgccaccacgcccggctaatttttttgtttttttagtagagacggggtttcaccatgttggccaggatggtctcgatctcctgacctcgtgatccgcccgcctgggcctcccaaagtactgggattacaggcgtgagccaccgcgcccggcctttttttttttttttttttttttaaacaaatacggaggccgggcgcggtggctcccgcctgtactcccagcactttgggaggtccaggcgggcggatcacgaggtcaggagatcgagaccatcctggcgaacatggtgaaaccccgtctctactaaaaatacaaaaaaattagccgggcgtggtggtgggcgcctgtagtcccagttaccgggaggctgaggcaggagaatggcgtgaacccgggaggcggagcttgcagtgagccgagatctcgccactgcactccagcctgggcgacagagcgagacatcgtctcaaaaacaaaacaaaacaaatacaccactcgtgaactcacgaggtaaaggacagggtgggggcgttgttctcttcctaatacacaaaactcctttatattatctccttgaccacaaaattttaaaggcctcggtaatcccgttattccttttaatcatatgggtggtgggccccaaggcaagcaggattacaacctctggagcctgcaggttaccaaatagcaacccagaacacaaggaactagcgtttccagtggattcctgcagccaggaccagtgtggtgggctgggcattccattttctcttctgtatcttaacaaccaaagtaaggtggtatggtcaccaattttatttattttattttttgacacaaggttttgttctgtaacccaggctggagtccagtggcacgatcacggcttactgcagcttcaacctcccgggctcaaatgagcctcctgcctcagcctcccaagtagctggaaccagaaacgtggccaccacgccaagcgaattttttgtaaacacagggtctccctatgttgcccagctagatcaccaggttttttttttctttgagacgggggtctcgctctgtcgcccaggctggagtacagtggagccatctcagctcacagcaacctccacctcccaggttctagcgattctcctgcctcagcctcctgagtagctgggattgcaggt

SEQ ID NO: 318068 - DNA, 4001 bp, Homo sapiens
tggactgtgtgactttacggcaaacatacttcgttgcgagctgttttggtctggggcatttatccgttttaccttaccagtagccacattacggtttctcattcaaattcaaattacaagcccaatactcacctgaaaggggatcagtgttaccaagctaaaatgctccaagttgcacagctgaagccaaacccagtgttgccccctgcaaggcggcttccagcgtacttggttcttgttttacaggtcgctttccgttaccaacgctaaattcagatagtaagtcaatactacaaacgtcttgccaaaagctgttaatttcatccaaatagaattttaatcagtctaatttctttttcccagtctaataataggaacaaggacattctgatagaaaatattcaggaaacctatgtactgcaaaaacacttccctgggcttcagtgtcttcaactgtatagtgagccagattaagaactagataagaaaacactcttcaattatcaaatcttgattaggaaaactgaaattaagacgtgacattttaactttccgaagaatgctcctttttaagaaaacaccaaaactggaaacaagaggttacacttcaagatattgcaaaacattactattatttgtctaatcactcggccattttctcaagattgaggaggaaatcccacctatgccaatttatcctttcgaaaaaagacacccgggccaggcgcggtggctcacgcctgtaatcccagcattttgggaaaccgaggtgggcggatcacttgaggtcagatgttcgagaccagcctggccaaaatagtgaaaccccgtctctactaaaaatacaaaaattagccgggcgtggcggtgcgcgcctctagtcccagacactcgggagactgaggcaggagaatcgcttgaacccaggaggcggaggttgcagtgagccgagaacgcgccactgcactccagcttgggtgacagagactccaactcaaaagaaaaagaaaaaaagacacccataaaagaaaagctggtgttcaaagataggtaaagaaaacaaagtctgccaaacctgccgcactcccccaagggccaggaggacgggcggggctttcgaaatttccattgcgtaacagcgggccgccgggcgcgagcagcacagcggtgagtgtagtcgcccgcgcctcgccagggggcgccccgggtcccacccggcccggcccggcccggcccgccccgccccgccccgccccagcccggccgcccgccagcccgcccgccccggcctcgaactcgaactcccgcgtcctagttctaactcaccagaaaaaaacctctgcacttcatcggccgagcaagaccagggcaagccccggaccttcaccacgaatccctctccaccttccgtgcccaacatcatcgtctcttacgcggtccggcgtcgaaacaaactgcaaagcggggaggaccagaactgagagcgccaattaagctgtccttcgcctccgaggcgcgcccgggcccgcaccgcccccccacggagcaaaaaccgggcggatgcacccaccccggcgactccaacacctcctcgtccggcgaccggacccccaaagctgtcctgagcaacagctgtcggcgccccgaaccgtgggggcccgggccgagagccagcgtagaggaaaggaaatggcggcggccgcttccgctccgcctcctccgacttctcacacaatagagtcggcgcggcctgcaggcctcagcggcggtgccgagattcagcgaaccactcgcggctctcgacggcagcctgcagctcgccaaggtccccgtggccctcccagagatatggggacaaacaatcctcgcaaaaacggtacccaccgtggtcgctgaactgcaagcgaggacccaccgcgactcacctagacacgcgacttctgcgtggctaagacgaaatggccagcgggcgcctgcgcaacctaaataaggtcccttgtgcgagttctgcgcacgcgcagccagctgcccgcaccgccccgttgcgtcacaaagagctctggcgcatgcgtaatttcaagagccagcccacctcccgccggcggattattacacgcttgggttttgggctcagcacccccacccataaacccgccgggctttttgttgcgcctgcgccttcccgcgaatattgaacttcggagtcctagcggtttataattatttcatgcgcatgcgtcttccttgaaaccgttctctagccttacccgccagcgtgggggaggggaatggcggccgcctgttccctatgggactgtataggagtcccgagctctgggttgtgatgaggtgggcgtctttctaccccttgcccccaggctcttaccggcgcgctcctggccgacctgaaaggaggggcgcggccttcaggcgttcccactccccgcgccgcctgtcttccctttatccccaaaccggccgaagctggtcagctgcagattgtcgaacgtcctgggagctgcggggctgcggacgtcccgcgcccgaagccacccgtatggtgcctggggcacgtcccagccctgtgtgcctccacttccccttacctgccgtcgtcgggcctagggccccggtcggcgcgaggtttccgtgcctgtggctcgcgcctgtacccagcttttgcctaacgaattcgcaccctgtgtaccccttgacccgcctaacggtcggcaggccttgactgccctggggccctggcacgaggagggatcgcgagcgcgggctccacgggtgcgcgccggcctctgcgctcggtaggttaccgctgcatctcccagagcagaattggtaagagtgcgtccattcaccaggcgtagacgctgcattcgaggaggcccccgggtcaccccatgtgcacacatgctgcgagatgactaatgttcgtggtttctagcagcactgcccaaaacctaagatgccgtagcctcccaggcctccccatgtctgatttggctgccttcctcaccccagctttagtggacacagacaatacacaaattaacaataaggtagtgctggaccctgccgcagagctaccttagctagtgcaagcctgagtgccaccctgggaagatgcggacaaagcatgtttccaaccccagtgccacagagtccgaatccagttttgacaggtttgagaaaaagtagagaggacatcaaaagaaagacaggagcccagagctaagcagggcctgatcttcaaaggccacttaggccttggcaagggtgttatctccgagagaaggctttggcaggtgatcagcaggggagccgtaaaccctgtgtaaaggaaaactcttgctggatgtgagggggatgcagatggagcaggcagggtgaatgacggtacataccaggccctctactacaaactgaactagaagcacacacctgtggtaccatttcagaaggcactttggctgaggtaatcaagaagagagtccggccaggtgcggtggctcactcgtgtaataccagcattttgggaggccgaggcaggcagatcacttgagatcaggagtttcagaccagcttggccaacatggtgaaaccccatctctactaaagatacaaaaattatctatgcatgcacacgcctgtaatcccagctactctggaggctgaggcaggagaatcacctgaacccaggaggcagaggaagcagtgagctgagatcacaccactgccctccagcctgggctacaaagactccctctcaaaaaaaaaaaaaaaaaaaaattagccaggcatggtgatgcatgcctgtaatcccaaccacttggcaagactgaggcaggagaatcacttaaacccaggaggcagcagttgcagtcagctgagatcacgccattgcactccagcctgggcaataagagcaaaactccgtctcaaaaaaaaaaaaaaaaagaatagtagtaaggtagaatacatttcatacactt

SEQ ID NO: 318069 - DNA, 4001 bp, Homo sapiens
actttacggcaaacatacttcgttgcgagctgttttggtctggggcatttatccgttttaccttaccagtagccacattacggtttctcattcaaattcaaattacaagcccaatactcacctgaaaggggatcagtgttaccaagctaaaatgctccaagttgcacagctgaagccaaacccagtgttgccccctgcaaggcggcttccagcgtacttggttcttgttttacaggtcgctttccgttaccaacgctaaattcagatagtaagtcaatactacaaacgtcttgccaaaagctgttaatttcatccaaatagaattttaatcagtctaatttctttttcccagtctaataataggaacaaggacattctgatagaaaatattcaggaaacctatgtactgcaaaaacacttccctgggcttcagtgtcttcaactgtatagtgagccagattaagaactagataagaaaacactcttcaattatcaaatcttgattaggaaaactgaaattaagacgtgacattttaactttccgaagaatgctcctttttaagaaaacaccaaaactggaaacaagaggttacacttcaagatattgcaaaacattactattatttgtctaatcactcggccattttctcaagattgaggaggaaatcccacctatgccaatttatcctttcgaaaaaagacacccgggccaggcgcggtggctcacgcctgtaatcccagcattttgggaaaccgaggtgggcggatcacttgaggtcagatgttcgagaccagcctggccaaaatagtgaaaccccgtctctactaaaaatacaaaaattagccgggcgtggcggtgcgcgcctctagtcccagacactcgggagactgaggcaggagaatcgcttgaacccaggaggcggaggttgcagtgagccgagaacgcgccactgcactccagcttgggtgacagagactccaactcaaaagaaaaagaaaaaaagacacccataaaagaaaagctggtgttcaaagataggtaaagaaaacaaagtctgccaaacctgccgcactcccccaagggccaggaggacgggcggggctttcgaaatttccattgcgtaacagcgggccgccgggcgcgagcagcacagcggtgagtgtagtcgcccgcgcctcgccagggggcgccccgggtcccacccggcccggcccggcccggcccgccccgccccgccccgccccagcccggccgcccgccagcccgcccgccccggcctcgaactcgaactcccgcgtcctagttctaactcaccagaaaaaaacctctgcacttcatcggccgagcaagaccagggcaagccccggaccttcaccacgaatccctctccaccttccgtgcccaacatcatcgtctcttacgcggtccggcgtcgaaacaaactgcaaagcggggaggaccagaactgagagcgccaattaagctgtccttcgcctccgaggcgcgcccgggcccgcaccgcccccccacggagcaaaaaccgggcggatgcacccaccccggcgactccaacacctcctcgtccggcgaccggacccccaaagctgtcctgagcaacagctgtcggcgccccgaaccgtgggggcccgggccgagagccagcgtagaggaaaggaaatggcggcggccgcttccgctccgcctcctccgacttctcacacaatagagtcggcgcggcctgcaggcctcagcggcggtgccgagattcagcgaaccactcgcggctctcgacggcagcctgcagctcgccaaggtccccgtggccctcccagagatatggggacaaacaatcctcgcaaaaacggtacccaccgtggtcgctgaactgcaagcgaggacccaccgcgactcacctagacacgcgacttctgcgtggctaagacgaaatggccagcgggcgcctgcgcaacctaaataaggtcccttgtgcgagttctgcgcacgcgcagccagctgcccgcaccgccccgttgcgtcacaaagagctctggcgcatgcgtaatttcaagagccagcccacctcccgccggcggattattacacgcttgggttttgggctcagcacccccacccataaacccgccgggctttttgttgcgcctgcgccttcccgcgaatattgaacttcggagtcctagcggtttataattatttcatgcgcatgcgtcttccttgaaaccgttctctagccttacccgccagcgtgggggaggggaatggcggccgcctgttccctatgggactgtataggagtcccgagctctgggttgtgatgaggtgggcgtctttctaccccttgcccccaggctcttaccggcgcgctcctggccgacctgaaaggaggggcgcggccttcaggcgttcccactccccgcgccgcctgtcttccctttatccccaaaccggccgaagctggtcagctgcagattgtcgaacgtcctgggagctgcggggctgcggacgtcccgcgcccgaagccacccgtatggtgcctggggcacgtcccagccctgtgtgcctccacttccccttacctgccgtcgtcgggcctagggccccggtcggcgcgaggtttccgtgcctgtggctcgcgcctgtacccagcttttgcctaacgaattcgcaccctgtgtaccccttgacccgcctaacggtcggcaggccttgactgccctggggccctggcacgaggagggatcgcgagcgcgggctccacgggtgcgcgccggcctctgcgctcggtaggttaccgctgcatctcccagagcagaattggtaagagtgcgtccattcaccaggcgtagacgctgcattcgaggaggcccccgggtcaccccatgtgcacacatgctgcgagatgactaatgttcgtggtttctagcagcactgcccaaaacctaagatgccgtagcctcccaggcctccccatgtctgatttggctgccttcctcaccccagctttagtggacacagacaatacacaaattaacaataaggtagtgctggaccctgccgcagagctaccttagctagtgcaagcctgagtgccaccctgggaagatgcggacaaagcatgtttccaaccccagtgccacagagtccgaatccagttttgacaggtttgagaaaaagtagagaggacatcaaaagaaagacaggagcccagagctaagcagggcctgatcttcaaaggccacttaggccttggcaagggtgttatctccgagagaaggctttggcaggtgatcagcaggggagccgtaaaccctgtgtaaaggaaaactcttgctggatgtgagggggatgcagatggagcaggcagggtgaatgacggtacataccaggccctctactacaaactgaactagaagcacacacctgtggtaccatttcagaaggcactttggctgaggtaatcaagaagagagtccggccaggtgcggtggctcactcgtgtaataccagcattttgggaggccgaggcaggcagatcacttgagatcaggagtttcagaccagcttggccaacatggtgaaaccccatctctactaaagatacaaaaattatctatgcatgcacacgcctgtaatcccagctactctggaggctgaggcaggagaatcacctgaacccaggaggcagaggaagcagtgagctgagatcacaccactgccctccagcctgggctacaaagactccctctcaaaaaaaaaaaaaaaaaaaaattagccaggcatggtgatgcatgcctgtaatcccaaccacttggcaagactgaggcaggagaatcacttaaacccaggaggcagcagttgcagtcagctgagatcacgccattgcactccagcctgggcaataagagcaaaactccgtctcaaaaaaaaaaaaaaaaagaatagtagtaaggtagaatacatttcatacacttatagccaattc

SEQ ID NO: 318070 - DNA, 4001 bp, Homo sapiens
aaacatgcccctcaactacacttcagatgtgtttgttcaaccacacacacacaaaaagagaaaattctggaagttcttctgccaaaaagcagtgacaacctgtcaatgaaatcagattgctccattaatatattatgggtttccagcttaaattaggaagtgtcactagcatttcatcaacccacagtgtgaagagttaataaaagactggaaaatgcactctcagttggctctgggtccgaaggaaggtgtagatctgatactgttaactcaaactgaagggctgagcttaaaagcgaaaaacaaaaggagtgaacaagttccttaaacaaaaagctttttcctacgaaatgcacccgtaccgtggtgaccgcatcagtaagactgaatttcagattttcgttttaacgccccagtaaatcaattctatacattttagctttgaatattcaaggacaagacagagggcacggtgagggcaacaatttactctggatcactttcaaggactgttgtctaaccactcattaaaatcgttcctttgtgcaactgattatctaaaagtactgagagaatgcagtacttctctttgaaagataaccgtcagcaaaagctaaaataatgtgattttgattacaaactgatgcagcagtctgaccagtaaagtgtagaatgcgttgtctttgtaaacattactcacaaatccatattcaagttacaaacgatatatgtgtttttaaattatgacctctggtaccgctctacaaaaatgcaaaaataacctaaaaggttagcatgcctatttctttaaagtatgaccagcttagcaaggtggcaagtttgtttgaaaacacaaaacacaatcaccaccaccgctcaataatacacatacataaacagattcgaagctgtgttaagcacaaaaatccttaccccattttgcccaatgaaaacttgctctgaagtttcagctcttatgctacggaataacttccaaaggaatttctccgtctgctatttcgcagttgcttttccacccccacccccagatccttgtccggaggtatttcaaggatgctgccaattcaattagttctcttaggtaaaatgatttctctcttgtaaataccaaaacgttcaaacagaggcggcatttgcttattcgagttaaaatgctttgcggaggagacagcgatcaactctattccacaaaatgagtctacaagtagggaaatgcagaatccggcttcaccgagtcctataaaaaatgagttcgctggtcatttcactcatgtcctcctcgacactcagggagagccaggtaactcggccttttcggagctaaggctgcgggttcaaatttctccaccacaccaggtctccgggggtggagcgagcaaccaaacgcgacgtgcacgtgaataaaaatcccaaaagcagtaatgccacggcttccctgcgctcacattaggaaaaaaactacacaggaaaatctcctcgaagtgcaaacccggcagctcgcaacctgcacggcactccacattggaatctgtctttttaaatgtttctcctcctaagactcggagcagagaagaggtggggaggacgaagagaaggctaggcaggatcgattcattctcccgaagagaataaacggagccatttccaggctggcagcaggctgggggcgcagcgcacgccggagagctggaggaggggacccgatcccacctccctcagccccttcccgccccccgccgccgagcacaatggagcccggctggtgcccggcccttcattcgcggctgccccctcttccctcctctcttcagagcacagcgggtctgaggctcccgtcggcggagaatgaatgaatcacagagccaagccccacgcttccactggcaccctgcccccagctccagggcgggcgaaaggggccgaagggtcgacgggcgcctgcccgagccaaggcgggaggctaagcccgcgttggggccaggagagctgggctcgaagccgaagcgcagccgccgctccagcgcccccacccctactcctcgtctctcacgctccgcgccgccgccacgcgccgcctcacattccccgggccccgccgccgcctcttcacacttccatcagcgcccgcctccggctaccgccgggcagagcagcgccagccccggcggcctgaagcctgccgctgcctccgcctccgccggccggccggctggcagagaagagggtgctgctttcccggtcagcgccgccggcgtgaagctagcgcggcggcagagtgggctgcggggggcgggaagggggcggagagaacggggagcgagggcggtccctccctctgctcgcgggaagggacgggaggcggtggccgccgcggagccgcggccgggggctggggcgcggactggtcccgggagcccgacgggccttgcgagcagcgggccgcgggagaaagcagcagccgcaaggcggcggagaggctgatggtggggggccgagcggccctcgtggggagctgggccggcggcaggccctcagtccgttcgtccttcttttcccccctcccctagaggctggcggctggctggccgtgcgctctgctcctcctctggctcttggccccgctcccgaccgccacagcctcctccgcgccccacaccaggtgctcgcgctgtgtctccatcctccccgcaggaggacctttaaatagcaacgtcagcgcgcttctctccgcacacacgtcacccgcagctcacgtcaccgaggtgcgggggatgatgtcacgcggccggaagtactgctaaattagggaaggagcagggggaggaggactcggcgagctcctgtgtgcccacctgctctcacttctccttaaaggccaaagcacaggagacagcccgagaggagctcgaacaaggaagcggcgggaggaggagatttccttgcaacaaatgtgccaaacctgagtgaatcattcgtagcaaaagtgcagtgtcaagcgggtaatagcctatctcccactcccaccgctattgcagcagcacccccgggcttctcttgtcctgactagcagggaaatgtgggagggagagcctgatcacactgctggtagatgtgcttccaacaggacttcggaaaaatcacctaaattttcaattatagagtgccattctggacatagtcgacttttaaactttttgttagtggttacctgaaacacgaaagaataaagagcagagcaataagcaaacgaaataatgttataaaggatagtaattttatttgcaaaatagcagttttgacataggaaaatgagtcaatcttagttcacgtatagcaaatgccagtgtgtcctctcagtttctcttcatcaagaatatgagttccatgacacttggctccagccagtaaaacaagaaagagaaaaagtatatgggtttcagtctgtggaatttaaattaaaatttaaaaattaaaaataagaaagagcaccaaatcctttttcattaacacaagcatattttcgtcttctttagttttgaccacataatatgtaattacaatatctcttaagtgtgttttgcattttctgtatggcaagggtgagtagctgtctataggtttactagctatgtgtgtctataaacaccatattatgagtgctttttacattgtaaattactacagagtttttaaattattttaaagtaattaggttaaaacaattttttaattaggtaaatcatatagtgaactttgattttattttacttaacttgataagcatggccaagaaatagaattgctgcgtattgccaaaggccaatactgtttcaagttagtctacaaatttagtgaccctgttttccagaccaaaatctagacacaccatttgacgttaggaaaaaatatttgaatctgaagtgacctggaaaatccaaaacataggattaccaacctatgaagtgattattaggaaagtt

SEQ ID NO: 318071 - DNA, 4001 bp, Homo sapiens
tgtgcctgtgagctcaggagaatcggcctaggctgagatgaataaagacaaggttaaccgggacaaggtgatggaggaagcaaagaaattggtgggctggggtgagtcagtctgatatcggcttcctatgtagtactgagtagtgaccttccttccttccagacccttagagaaatcccttggcaagagtaccccaaccctgctgccaggcttcaggctcactttctccagtgctttgtagcagtccttcctatgacacatggaacaagaagccagtgctgatcgcgcacgtgccaggtgccaggccctgtgctatgccgcaacttatacagtcatattttggggccagcacgatacaaccagaagcaccctggaggcgggcagacctggttccagtctctgaacaggcacttcctaccggtgtgaccacatggcaatcatttacctctgggaacctcagtttcctcatctgtaaattggaatttgatggcaccagtttcccaggagtgctgtggtgactgtaaccaacgccgtacttgtaatgcaccgagtaccaggcctgcaaggagcaggttctcgagataagttattttctcatgatattgaattctccttatatcctagctcagatataaggagaaaatgccaccatccagacccagagatgtcaaaaaacgtaatctatccaattgccttggataacctccagggacaggaaactcattagtaggtaggaatttattaacttccttttataaataaggaaactgaggtgctgagagattatgccaggagtcttcacaggacaaaaactgccatctgagagacgtcatgtcttacaggagcatcagcctcaggacaggtgtgcagtggaggctgaagcttctgggccccccacattccctaggccctgccctgcttcatgcccagcccggccaccacccagcttcaccgattgaccctctctggcaaagggcacagaggggacctgaggcatacaaatgacttcccaagaggcaaccgcctccaggactgggcctatctgatctagggcatgacagctgccactgggggacaccacagcactttcctgccccacctctttcgcctcacaacacctcatggacggggtgggggattagcatggccctgttcatggaggaggaaactgaggctctcaagctcaaggtcactgcccagattgggattcctatcagaggccacttgctctgctcatcccacaggcaaatccacgtccagatgtccccagcaaggactcccacccgctgagcgctgcctgttgtggctccggtcatcggtcatccggcagcgggcggcagcccagcgggatgaaggcaggtcgttctggtttcctgagacatagaagcctcctccccagcagcccccgctctccgctggcttccctttagcagaaagttgctccatgctccgacagacacatcgccgcgagaaaatgccaccacccagacccggagacaaaacggggactgtttcggcgcaagtgcactttccaaatccacccttcgcgggcaaaggggatataaagccgacccgcgtcccgagcactgctgtgcaccggggctgcatcccgagctctcaacgcccccttggggaaggcacgacccccgcggtcacagacaaggaaactgaggctcgcaggccaggcggaggcacctgcccaaggtcaggcacagccagggagcggtggggccgaggctcgaacccgggttcggggccacgacggccgccggggatcccgagcagcccctcgggcggctccgccagcccacgccgggtccccaagcccgcctgggaccccaccccgagccgaggccccgcggggaggcggcggccgcgttacctggtgctgctgccgcgggtattggctccgcacccggttcgcctcggtcccgcgcccgcgccggctgcgctccgggcagggatgcagcgggcggcgcgcgcacggcctgcgccccgcgcctcgcacccacttcctcgtctccgcccccaactcgctcctccttgctctcaacgctccttcccttccttccctctccaagtctctctctctctctctctctctcagcgcgcacacgcccacattttctcccccagtctccctctcccacggtctcacccactttctattttcctttctcctacaccctccctcctcatctcgccgactctgacacttgccccttcctcttcctttctgccacactgccccctctttctctcccttttctccctggctccttccctctccccgccccgcagattgtgagcccgcccttgaccgggcaaccgccacctgtgcagatattggctgagtggccacagctggaggacctgccccgggtgggcgctagacccaggaggtcaggtgacatccctcacattgggcgcccaggacccagctagagtcaggctagaagggggaaatagctagttttgagggaaaagcttgaataattctggaatctgaaatctagaaacacaaatgcagaaattaattagtccaggggttattaatcacaaaaaaaaaaaaaaaatcaggaaacttcaaaaaccctacagtggctttgttttggttgaaggaacggatgaagagagagaaaagtaaggaagtgggctttgggaaaaggggttttgggggtagggagaataacacccaccttccagatgagaaaatggaggctcagatgggaaaagccgtctcctaaatatcaagatatcaaggccactgtgctaaccacacagatctccgtggagggagcctgggtgggcaggatggtgagagattttcgccaggcctggacagcagcccagtgcaggggaggcaggcggtcagctgggctgccccggtttgcttggggagcctggtgtgtggagggggatttctgtggaagcttggcaaaggatggtgaaagcgaggagggttcagctagcatgcgtttcagacacatgccactgctgattgatgcaccacctcaagccattctgtcaccatggaccagccctgtgccaggggctgcgatgcagaggatgaggggccatggtcccctaggtctcagttcacaccttctggggaggctattattgcacgtgcatccaagtcattgtcatcttggaatgacaagagcctccgaactggtcttctggatgcctctcttgctcacctgcaattcacaaagcagctcagagaatctctgaaaagtgtaaattggatcgtgcctttctacttccctgcttccagacctcctgtgacttcttgctgtagttcaggtaaaatccaagttccttgtcactgctaagaggccccaccccacgtggtttgcaagagccacctgtctgatctcatcactcaccactctttacctctctctctgcacctcaaccacagtggcttcctccccgttcctggaataggccaagcacaccataccacaggccatttgcacaggttgtttcttctgccaggaaagctctcctctgttcccatagctgcttgagcatcacctctccagtgaacccacccctaaccaacttatctaaaggaatcaccttcttgcctatagtgtttttcacagaagccccttttattgtaattaacacatttatcactgtctaaaattattttgttttcatttttcctttattttatttatttatttatttatttatttatttatttatttatttatttattttttgagatggagtcttgctctgtcgccaggctggagtgcagcagtgtgatctcagctcactgcaacctctgcttcccaggttcaagcaaatctcctgcctcagcctcccgagtagctgggactacaggcgcccaccaccacgcccagctaatttttgtatttttagtacagatggggtttcagcatattggccaggctgatctcaaactcctaaccttgtgatccacctgcctcagcctcccaaagtgctgggattacaggtgtgag

SEQ ID NO: 318072 - DNA, 4001 bp, Homo sapiens
ggcagagaagggcagcaccaggaggccgaggagcaggtcagtgatagccaaggacacgatgaaacaattggtcaggttgcggagccggcggttcaagcccacggccagacagacgaccacattgccagcaacggtgatgaggatgaggaccgcaaggaccacggtgatggtgatcttgcatgcggtagagtccaggcaaaaggaagaggctgtgccattgggtgccatcctgggactctacggctcagtcccctgatcagggcccctggttgcttcttctctgctcccaatgtgacaactatgccaaccactggactccaagctcccaacagatccaaaatgtgtccagtttttttttttttttttttttggccagggggtggggaaggcttcaatgactgactctgggctgcttttctagaaataaattaagcaacaccttctaaggtgttgggaatgaatatgaatgaagaagagagaaaagcaaggcctcgaagccaggttcatggatcaaactccagtcctcagacggtcccctgaagagctagcttcctcccggggctggggtaggtctccgcttcccaggttttgcatagaatccgaggcactgtctggcggtggctttggtgtcatgcaggatgggtcatgtggagacgcagctgtatccctctccatagctggtgcctgctcccatctgcgtgatggagtcaagtactggggatctccctctctggagtcagtggagggcaggagctgaaaaggcaaaggttggatgttaagcaccttgaaaccagatagaaagcatgacccaattcaagatgtgtccttctactagatctcaacctcttggcaagaccccaggaagtatgggaccagtttggatacctctttttgggagggacttgggcaatcaggatacatactggggaggcagaagggaggcaggatgcaaggggctggacactgagactcgtgagaaagagttggaaaggctggaagtgcttgtactgagaaaagaaggatctagacacagactttcagctccacaagaagaaggcctgcatctgtttgttctctgctggttcctggtgcctggccccacagatagacagtaagcatctgacgaataaaggataaaatgaatgaacgaataaacaaatgtaatgaatctactcctctgaagtgctgagaaccatatctggtgctgctgtttggcaaaatgtcatcatactctaaggcggtggccgacaaactttttcagaaaagggtcaggtaataaacacgttctgcctcacagcctgtgacggctcggctctgcctttgcagtgcgaatgcagctatgcagatgacgtgccgacagaagagcgtggctgcactccaacaaaacttcagtaatgaacactgaaatgtaaatttcatatcattttcacgtgtcataaaaatctcctttttttgatttttttccaaaatttaaaaatgtaaaaaccattcttagccacgggctgtacaaagccaggcagagggccagatttaatcggcagttcgtcacctgtcatccacgccacccctgctccgaacgcatctctaaatcttactggtcttacttggcagaacacgtgatcccacatccaggtcagcagggacagaactcactcattccttctaatggttgcataacagtctgtggggaggctcaccatgaataggtttatcctatcatccccacatcaccctctcacgggcattagggtggtttctccttcctcccttcctccctttgcactattgaagtagtgcaaacactacgtcaataaagtaactgcatgtgcaatgcctcttgattaaataagagcccctggtcactaggtaatctccaaggctccctcccagtggtggctgtatatgattccaactggcgagaaacaagctgaggccctgttccacgccccagtccttccctaccagctcctcctggtttttcagagagcaggcaatctcctgagctctgagtgtgtgcagaaatcgagttgatggcggaaccccctctcagaagcaagctaatctccataaaacataaattaagcctctcccaggctcttgcctggagcggtttgcaacctgaatatgagaagcatcatttaatcacaacgattgtgttcgtgcagggatcagggttcccgatcaccttctgccacgctccctggctcagccaccagtcctggcagctgaacctccgggtactatttttagcagagcttttcattacataaatagcccaaacagcatgggtctcaccgccacacttaattaactttggagggggtagcaataagggtatttttttggagaatccctatttctcatcaaagtttttctgagttaccacaacagccgggtataggtattttggcatcaggctgacatttgagttcatgtttggatgaggggtcttcaaatctgagtggaccagcctctcttataattagaaaatcctttccttctctcctctcccgcccctccttcccttcctcagtccttttcaacacatatttctttgaaaacccacaatgtgtcagatgctactccaggtgctggggggacaatgatgaccaaaacagctgtgagtcctttcttcgtagagttttcaaagaagcaccacttctgctgtattcctatttaaagcccagctcccgtaagttctggtcacctttttcgagggcaggggattttgtacggcgctctctctccctcccatcctctcctgtcccatgtgggcagaaggattgccctagagggccacgtcatccccttatggagcaaccttcaatgggttctctttgcctgtgaggaagaatcatgtcacccttgtcaccgtcattgtcaccatcatagctaacaaaaaatagtctctcaaactgtcctttcaaacttccaaagtgatgacaggcttattccagtaagccaaatatccctgaggtgtacagaaagggccaaaaatcagagccaccacacacctgagcccctccaccaggaagtgactgctgctgactgtttggtatgtgggggcctcctgggtttctcatgcctctgcatgcacaatgggcacacactgggcactgcccgcacacagcatacatgctactcagcaactgcctctccttcacttcttgtaaaattcccaatatgtactggatggccctctaggtcacttagatcgaagccattctttcgggagcccagcccgtggcaatgcacctgctctcatgaggatatgtgcacaaggatgtccgttggcagacgtgcaatggcaagaatggaaaacaacctaagctgccaactgcagggggaagaaggtttaatgaaccacggcacaactgtcctgctggatcctcctgggcaaagcgataccatgcatagtaaacaaaatatcactgaatcctcacgaccccacgagtgaggaaaatcatgtctccatttaacggttgaggagactgaggctcaaagaggccaggtgatgtcacacccctagaaagtggcagaacctggattcaaattcagctcaaactcctttggcctgtacttaatacccgttctttgatcagacttcaacctgtctttccaacagggtctcatccagcactccagcatctgcctgttaatttcacagacactcaggcaaccgagcatgtccccagatgcagcacaccttctccctccttcctctgcctttgcatcccctatgcctggtgtgtcactctttcttgtattcacttcaaccactctcctttcaaggccagctcaggtaactgtctccttgagtcctcctagatgcctaaaagcaggagtaatctctctgcactttgtaccgagttagattgtacagcacctgctgccttggagtgttgatctggctctgcggcatttaattctgaaaagtgccaggcccattctgattctgtgcctttgcacatgctgttttcactgcctggaaggtctttcct

SEQ ID NO: 318073 - DNA, 4001 bp, Homo sapiens
gtcctagctagtctggaagctgatgcaaaaggatcacttgagcccaggagttcaaggttacagtgagccatgatcgggtcactgcactccagcctgggtacagagtaaaacctttagctctgaaaaaaaaaaaaaatttaatcaactctgaatgggtaagagagaatttaaccagtttatgaacagcaggtgctaagttcataactgtctagtcacaactcattgtttcacaaaatcaattttgtgggttacaattacaatttataaataaaacagaatagaaaataaatttcaggatgcattgcctgtactacacactatatcatgaactggttttaaatacagatgtatgtgcttgtgtaagtgtactgagtactggtgtaaaatgtactgcataccatgtgtaagtatgctaatggtgtcaaaagaagcagtccctatccttgaatgattttcagatatagcccctgaaaaggaaagtctccttagcgatggcaaaaacgtcttagaatgtaatccctggacctcctgcatgaaaattatccaagagctgtcaaaaaagatttaaaacaccaagcgttgtaaaatacattatttacaataaaagcaaagtgtaaacaaaatgttttcctaaaaacatttagaaggtatgactacacccaaatacatgcccatgcagagataaccagacagctatgggtataaaatacttggctattcatcaacactgaaagcattttctgaaaggcagcataagaagccactttatcaatacagatatgaaagtacataggaattaattgacagaattccagtttgtaacgtttaatatataactcaaataattcatgcattagggcctttccaggtataaggtactaccagtggagaatcaaaggtgcataatgtcaagatccctgcacttggaggttacagaggtcacccactggtgagaaactaatgtaaaatctcactgcacagcatctatgttggtatgaatggtttgttttaattttttgtactttaaaaaatggggctatttcacataacaattttccattttgccgctcctgaaatacaggcaactttcccactggccggtccacttcggaattctctgctctccagttcctcagatgtgcccatcctactcccattttctttctccatcatacgcctgacccctgtgcgcatttgagcttacaacctctgccaagactccagtggatttcgagaacagattgtgacttgctaagcatacaaactccaacggggaagggctcttatcagacgccctctttaaagaaggtcctctcacgaacttaaaatcttacgacagagggaaacaaacactgaacgaccgaatgacttttcaggagctgacatctctgcgcttcagggggcgaattccagcccccgcccctcgcggcttttcagtcctttaaaagactaggcaaagatctaagagagttaattgcaggaagagtaacaatcgatgcccacagataagggtcagggagaactttcacccagttttgcaatcagcagcccagcctggcctctcctctcaggcaggaccttgggaagcccacaccggggtgctggggagaagcgggctgtacctgcttgagagaccaggtgtttccggctctttcctcctcaagagatgcggtgcctcaagaataaccattcccctccccaccacctcagcggggtgacctcagctgcggctgcgcgcgtatgccggcccgaaaagagcagccagctgcgcctcagcaaggggcgcggcctccaaccttcgcatgctcacctgcccccgcgccggtgaccagtaccacccgcccgtcgaacctcagcggtgagcccatgaataaggcctgcaacgacacacacacgaacaagcagagccgctggacgccgactgcgggacaggaggaggcggggaatggcgggggcgggacgagggtcagtgacttgccgatttctggtaggaagatgagcgcagagcgcgcggctcccttggaatcctgggaaatgtagttaagagtgactccactcgctggaagacttgccttccaggggccatttctgcggctggaagcaatgggagctgctaggacttgtgtagaagaatagttaactcgacaccttgcgttcatctattcacctgtcgtttcatcattcactcaataaacgttttctgggtttagttgctgacctagagaaacagcatgcggcccctatccttgaggggcttccagagatagcccctgggaaggaaagtcccccttagggatggtaaagatttgtcagtgtaataatccctgcacttctacatgcaaacatcaggggactgtcaaaatgcagagtcctggacccccactgcttacctcccaaaatagaatctcaaggggcaaaaacattttgacaagtgttcctaaatgatcttgcgtttgtatgttgagaacagtcatagttcaatcaacatttactgagcatctcctgagttttgataggatcctcaagctactcagagtcagatggtaaactttcaataacggtgcagcctagacttgtgaccaatgtgtgtaagtgagctaatggtgtcaaaataaacagaccctatccccgctggggagaaagaggaaaaactttctgaaggaggaccaggacctaaagtggcgacccctgcaaagaaagaagggcattacaggcagcacaaacactagctaggtttggggagaaagagggtaaagccacaaaagcaaagccagcaagatcatgtttagatgtttgaattttgtgctgaaaacggttttaagtaggattactccagagagtggtgggaacacatttacactatggaaagatcactttgcccattatggaggattgattggatgttgcgggaagtcatggaccccaaacagagggacctgctagagccgcagcagaggaacataaattgtgaagatttcacggacatttatcagttcccaaataatacttttataatttcttatgcctgtctttactttaatctcttaatcctgttatcttcgtaagctgaaggtgtacgtcacctcaggaccactgtgataattgtgttaactgtacaaattgattgtaaaacatgtgtgtttgaacaatatgaaatcagtgcaccttgaaaaagaacagaataacagcaatttttagggaacaagggaagtcaaccatatgggctgactgcctgcggggttgggcaaaaacagccatatttttcttcttgcagagagcctataaacggacgtgcaagtagggaagatatcactaaattcttttcctagcaaggaatattaatattaataccctggtaaaggaatgcattcctggggggaggtctataaacggctgctctgtcttatgtggttgagataaggactgagatatgccctggtctcctgcagtaccctcaggcttactacggtggggaaaaacccggccctggtaaatttgtggtcagaccagttgtctgctctcgaaccctgtttctgttgtttaagatgtttatcaagataatacatgcactgctgaacatagacccttatcagtagctctgcttttgccctttgtcttgtgatctttgttggacccttattagtagttctgcttttgccctttgtcctgttccctcagaagcatatgatctttgttctgctttttgccctttgaagcatgtgatgtttgtacctactctctgttcttacacccccttcccttttgcaacccttaataaaaaacttgctggtttgaggctcaggtgggcatcacggtcctactgatatgtgatgtcacccccggcagcccagctgtaaaattcctccctttgtactctttctctatttctcagctgactgacacttatggaaaatagaaagaacctatgttgaaatattgggggcaggttcccccaataattagaggtgggcaaggagaacatagaaaagatttgggggaaa

SEQ ID NO: 318074 - DNA, 4001 bp, Homo sapiens
tccatctcttgaaaacatttaaaaattagctgggcgtggtggcacatgcctacagtcctagctagtctggaagctgatgcaaaaggatcacttgagcccaggagttcaaggttacagtgagccatgatcgggtcactgcactccagcctgggtacagagtaaaacctttagctctgaaaaaaaaaaaaaatttaatcaactctgaatgggtaagagagaatttaaccagtttatgaacagcaggtgctaagttcataactgtctagtcacaactcattgtttcacaaaatcaattttgtgggttacaattacaatttataaataaaacagaatagaaaataaatttcaggatgcattgcctgtactacacactatatcatgaactggttttaaatacagatgtatgtgcttgtgtaagtgtactgagtactggtgtaaaatgtactgcataccatgtgtaagtatgctaatggtgtcaaaagaagcagtccctatccttgaatgattttcagatatagcccctgaaaaggaaagtctccttagcgatggcaaaaacgtcttagaatgtaatccctggacctcctgcatgaaaattatccaagagctgtcaaaaaagatttaaaacaccaagcgttgtaaaatacattatttacaataaaagcaaagtgtaaacaaaatgttttcctaaaaacatttagaaggtatgactacacccaaatacatgcccatgcagagataaccagacagctatgggtataaaatacttggctattcatcaacactgaaagcattttctgaaaggcagcataagaagccactttatcaatacagatatgaaagtacataggaattaattgacagaattccagtttgtaacgtttaatatataactcaaataattcatgcattagggcctttccaggtataaggtactaccagtggagaatcaaaggtgcataatgtcaagatccctgcacttggaggttacagaggtcacccactggtgagaaactaatgtaaaatctcactgcacagcatctatgttggtatgaatggtttgttttaattttttgtactttaaaaaatggggctatttcacataacaattttccattttgccgctcctgaaatacaggcaactttcccactggccggtccacttcggaattctctgctctccagttcctcagatgtgcccatcctactcccattttctttctccatcatacgcctgacccctgtgcgcatttgagcttacaacctctgccaagactccagtggatttcgagaacagattgtgacttgctaagcatacaaactccaacggggaagggctcttatcagacgccctctttaaagaaggtcctctcacgaacttaaaatcttacgacagagggaaacaaacactgaacgaccgaatgacttttcaggagctgacatctctgcgcttcagggggcgaattccagcccccgcccctcgcggcttttcagtcctttaaaagactaggcaaagatctaagagagttaattgcaggaagagtaacaatcgatgcccacagataagggtcagggagaactttcacccagttttgcaatcagcagcccagcctggcctctcctctcaggcaggaccttgggaagcccacaccggggtgctggggagaagcgggctgtacctgcttgagagaccaggtgtttccggctctttcctcctcaagagatgcggtgcctcaagaataaccattcccctccccaccacctcagcggggtgacctcagctgcggctgcgcgcgtatgccggcccgaaaagagcagccagctgcgcctcagcaaggggcgcggcctccaaccttcgcatgctcacctgcccccgcgccggtgaccagtaccacccgcccgtcgaacctcagcggtgagcccatgaataaggcctgcaacgacacacacacgaacaagcagagccgctggacgccgactgcgggacaggaggaggcggggaatggcgggggcgggacgagggtcagtgacttgccgatttctggtaggaagatgagcgcagagcgcgcggctcccttggaatcctgggaaatgtagttaagagtgactccactcgctggaagacttgccttccaggggccatttctgcggctggaagcaatgggagctgctaggacttgtgtagaagaatagttaactcgacaccttgcgttcatctattcacctgtcgtttcatcattcactcaataaacgttttctgggtttagttgctgacctagagaaacagcatgcggcccctatccttgaggggcttccagagatagcccctgggaaggaaagtcccccttagggatggtaaagatttgtcagtgtaataatccctgcacttctacatgcaaacatcaggggactgtcaaaatgcagagtcctggacccccactgcttacctcccaaaatagaatctcaaggggcaaaaacattttgacaagtgttcctaaatgatcttgcgtttgtatgttgagaacagtcatagttcaatcaacatttactgagcatctcctgagttttgataggatcctcaagctactcagagtcagatggtaaactttcaataacggtgcagcctagacttgtgaccaatgtgtgtaagtgagctaatggtgtcaaaataaacagaccctatccccgctggggagaaagaggaaaaactttctgaaggaggaccaggacctaaagtggcgacccctgcaaagaaagaagggcattacaggcagcacaaacactagctaggtttggggagaaagagggtaaagccacaaaagcaaagccagcaagatcatgtttagatgtttgaattttgtgctgaaaacggttttaagtaggattactccagagagtggtgggaacacatttacactatggaaagatcactttgcccattatggaggattgattggatgttgcgggaagtcatggaccccaaacagagggacctgctagagccgcagcagaggaacataaattgtgaagatttcacggacatttatcagttcccaaataatacttttataatttcttatgcctgtctttactttaatctcttaatcctgttatcttcgtaagctgaaggtgtacgtcacctcaggaccactgtgataattgtgttaactgtacaaattgattgtaaaacatgtgtgtttgaacaatatgaaatcagtgcaccttgaaaaagaacagaataacagcaatttttagggaacaagggaagtcaaccatatgggctgactgcctgcggggttgggcaaaaacagccatatttttcttcttgcagagagcctataaacggacgtgcaagtagggaagatatcactaaattcttttcctagcaaggaatattaatattaataccctggtaaaggaatgcattcctggggggaggtctataaacggctgctctgtcttatgtggttgagataaggactgagatatgccctggtctcctgcagtaccctcaggcttactacggtggggaaaaacccggccctggtaaatttgtggtcagaccagttgtctgctctcgaaccctgtttctgttgtttaagatgtttatcaagataatacatgcactgctgaacatagacccttatcagtagctctgcttttgccctttgtcttgtgatctttgttggacccttattagtagttctgcttttgccctttgtcctgttccctcagaagcatatgatctttgttctgctttttgccctttgaagcatgtgatgtttgtacctactctctgttcttacacccccttcccttttgcaacccttaataaaaaacttgctggtttgaggctcaggtgggcatcacggtcctactgatatgtgatgtcacccccggcagcccagctgtaaaattcctccctttgtactctttctctatttctcagctgactgacacttatggaaaatagaaagaacctatgttgaaatattgggggcagg

SEQ ID NO: 318075 - DNA, 4001 bp, Homo sapiens
tgagcccctggggccgggcaccgtgactcacgcctgtaatcctagcactttgggaggccgaggcgggaggatcacttgaggtcaggagttcgagaccagcctgggcaactcgacaacaccccgtctctactaaaaatacaaaatttagccgggcatggtagcacgcgcctgtaatcccagctcctcaggagactgaggcaggagaatcgcatgaaccccagaggccgaggttgcaatgagccgagagcatgccactgcactccagcctggggcgacagagcgagactccatctcaatcaatcaataacaagtgagcccctgggcagggcacggtggttcatgcctgtaagcccagtactccagaaggccgaggctggaggactgcttgagtccagaagttcgagaccatcctgagtgacatagtgaaacccgatttctactaaaaataaataaaattagccaagcatggtggcgcacgcctgcaacgccagctactcaggaggctgaggtgggagaatcacctgagccaggagccagggaggtcgaggctgcagtgaaccaagatcgcaccactgcactccagcctgggcagccagagtgagaccctgtctgtctcaaaaaagaaaaaaaaaaaaaaaaaaagaagagagaccctgaatggcaaataatacagaacttcttacaagattttgtctaagaacacgacaacggattaaaatgtatctacaagtattcaaaaggcagacactgtaaccagtgaaagacctgagtgacccaccattttttagaactgtgtctatgctggtcccaaaacttactatgggttctagaagtcaaggcgggcccttgagccactaacaattgtggccaacacactggttagaatgcattatcgttaaagtgcaaccctattgaggggttaacgcgcacaaaacagagagtgacccaatatagcacaatatcccgaaataatgtggaaaacaaaagcgattgcaaagttatcataagagcaccgattttattaaattcctatccgtgccaacccaatctcaagaccccgagtccatccggaacccgtgcctgaggctgctccagctcgctctcttccgggcgctgccccgcccccactcacgtgggacgctgaccgctccacggtctcgcggctggcaagccccagaacccgttcgattcaactattattaagcgcctgctgtgtgcaaagttctgagctttctgttggactcaaaagactcagtacgacctgggcctggtctctgccctcaagaaaaggaccgcgatccgtttacatcctaggcctgcagtccttccagttcctacccgtgccctccgctggtccgagtaccggccagaagcctttcttcggccgacgggccaccggggaaaaggccctcgcgcttagcacacacccacgctcatagtgggccgcggcccctagtgtcctaatacctactgggggtccctgacctaccgggacctcggctcggaacggaggcgactcctcggcccgcgttccccaagcagcgagggtcccagactggaacaagcattatctcctaaccccagtgcacgcggcaggcccggcccacacttacggcgtgcagcggtcgctatactcattagcgatagtctcgatgccgccggcgcgggccacagcgacgtagcagctctggaagcccaggtctatgcccaccaccgacatggcgccggctactgctcgggctcgggcccgggtccggccaccgagacaggacacggacccccggcggggctagcgagtggaaagcaggcctcttgggccgaggctactgaggggcttgcggtgtccacgcgagcgcctaagtccttccagtgggtactgcaaccgagagcgctgctcaggccggctccggctcagtggccgcagaggaggcgccggtagcgggggcggagaagatctcgaaagatctcgttgcgacgagagcggagccgcagcaccagagctacgaaagaacgggatgttctcgcgatatcccggctcaggcgcttttccccttgaggccccgcccccagtacgtctgaatacgtcacgtcctggctcgagaacctgggaaaggactgggtggctgaaagatggctggaaagcgcatttagccaaccgagcctgcgcatggaacctgcggcgctgcacagctgcatagagatgtggagcacctccctttaccgtagaaagtaggcgagccagctcgaggcactatactgaggaagcgctgcggcctacttccgccgtttttcttaacatcaaagaaacttccggtagtggggtgtcttgcattccaccgtgtcggtgccccagaatgagacgcaagctgatctgcagatcccgcagggtgccttctgctcttttcggggcaggttggccggtaggggagaaggccgccattggaacgcggcctttatgtcgggttctctcaagagtctaagatcgcaccctcaccagcggagggaaggagcccactcccagccacaccgctttgttttctttcgcttagccttgttgcgccgttctctaagccactcatgtccttagatcagattgaggggcccgcaggatttaagcctttaatccacagcacattccaagcacctacccggtggtaggccctaacaaggaacacaggcaagtgacacgctgcctggcctgaaaggtccgctcagacctttacatgaagttaataaatgttaagcttcagggcccctcgcttgtatggcctcctgggagaatagatagttgctgagttgtggagaggggaagccagcttgagattaggaagcaaatctatgtaagcatttctaataaattacccagagagatctaaggagaatctgaatctccaagtctctagtaatgtgttgtgatttgtcgttttaattatttgttttgtgtatttgtagggccccccaatggtatataagtttcacctctgcaaaacctggatcatccccatcatgagggtggctaaacaagtaaaggtgaccccagtacagaatggcgagtgctatatgcacagaatggtggagactaggacaacttcccagaaaaggaaaaggctgtgttcaagtttggaaaactagcaatagagaccatagtttaaggactaaaaagaaattctccgttgctggagggtacatcatgagttgaaggtctcaaggctagagtacctgcccttcagccattttaaaagtgaatgagcaaagaagaaattacattgccctggtatgcccttccctttaaatacctgcatttcctgccacctccggaggtacttcactctataggagcaaccccaaacccgggttgattaccattaaaacttgcaaatggccacactgttctcacattttgcctaactaaaacctgttaattcttcaaagacaagtaccaggtgctacctgtaaaagggtactgggaataaaaagagtagaggcagccaggaacagcctttggaaaaacgagagcagggacatatttgtacattgtatacccatgttcatagtagtttattcacggtagctaaaaggaggaaacaatccacatgtccattgacagatgaatgagttttctaaatttagtgtatacgcgtaacagtacattatacagctttgaaaagacaaaggaatgaaagtctgataaatgctacagcatgaatgaaccttgaaaatacgctaagtggaaagccaaacaaatcaaaattaattttttttaatttttaattttatattcaaaatttaatatgattccacttgtatcaggcacctacaataaactacataaagacagaaaagcggtttcacaagtagagtgaaatggagagttaagggatacagagtttcagtttgggaagatgagaaagttctggagatagatgctggtggtagttgcataacaatgtgcatgatcagtgacagatttgtacatttaaaaatgatgaaaatggtaaatt

SEQ ID NO: 318076 - DNA, 4001 bp, Homo sapiens
gagactgtctccaaaaaaaaaaaaaaaaaaaaaaaaaaagcgcaaatcaggttctcaaattccttaactaaggaaaagagcacagaattctggacagattctggataaggtactagttatcaatcatgctcacctttgcttgtttaccttccataactgccacgcaggagttggtagtacccaaatcaataccaacaactgctcccttgattgcttctgatctgtaagacatttagaacagtgtcacagctattgttatcttgatagaccaaagtcactggaagataatatttaattggaaaattaacagtggtatactacataatctctaaataaatacagataaataattacagagaagaataatcacaaatgtagaaaacactgctttgaagtttaatatgtattccctctcaaaggaaatgatattatacttacgcataatcccgccttgaaacaagtctaaaagcctcatgactaaggccattccagctatcctaaaaaagaaaaaactgactcagtcaccaaccagtgtgtatcctgggaggaaaaagagaaaacttgggctcacttagtatataaaatacattaagctactaaaacagtaaatattaaagtttcccaaataagtaagacgaaaaaaggtaaataaaagatggccttagaatcacattacagtaggatttctcaaccgtggcgctattaattttgggcgaaatttttgtggtgggggctgttctgtgcattgtaggatatacagcagcatccctggcctcgacaccctagaaaccaataagcaccccagtaagtaagtgacaacctaaaatatccacagacattgccagatgtcccctgggggaaaacacttccccttaccttgccgtgcaattagtttaaaagaactagagttactaagggtctttgaaagaaaaaagaaaagtagtggcgtttcactaggataaaagacctttattacaacttaacctcaggctccttccaagccttccttaatgcccacatacaattcctgttctctaaagcatttgtcttttattttagaaaacaagtaaccactccatagccttttctccgccccacgatctgcttttttttctgaagtaacaaacgagtacaatcttacaccacagattttgagaaaatgttgctaagcacgaaaactggagttccgactcagagctttcttattttatttcaccgtatcaacgggatccttacacactctgtattctgtagaggagccaaaaataaaactgaaaatagtggctttcccaatagactgcatccctcacccccaaggccaaacctttccattcagccacagaacaggccatgaggaccactacctggtaattttgaaatgacactctagatcgcgaggggtgtgactcagcagggcccaagccggaggcaaaaccttgggcaaaatcttgacccggcagcgctaactatggaaggcccgttaccttccttcccgcctgacctatactggagaattcaaaccctaaagggcgcgcggcctgccgcagcgaagcccgaggcccaaggcccgaggccgtgaccccattcgggaaggtcccagttcctcacctggtggcgggcggccgtagggccccgggaggctgcggcgcccacgagacgggctgctgcagctcggctggcacttatcatggcggataaatggaggagtacgaggcagcaaacaagcgctccgacggcaaagagctgcgcgatgcggtggcggcagcgcttctggaaacctccaaccacgtggggtgaggggcgggggttggtcactgcggcccagaggcccgctcttccgctgaggcgccgcccgcgccgcctgaccagaggatactcgactgccgctcccggagccagggcgtacaggtaatatgctccgcagcatgatggttggagaaagcctgccctcctgtcccggctgcggcggctctgagctcagaaagagtccaggggaggaagagggatatgaaggccgtatctcggacagccccggtcctcggcgacaggaaagactcaaggtcacacgggataaattgcgaaccgattacagtcttcttgcgtcagttgcgcgggaggaggagcctgttggcgcaacagacatccagctaagaacctagagcgcatgtgcgcaaggagtggcggaaaacatgggtggagactaactgcggcgctcactgggtgcccgagtgcacgccagcgttccctggggcgagcccgggcgcgtgcacaccccccgggcgtggacgtgttcccagctcccgctcctggaggacggcgccatcttgtcttgtggctttgtgaagtgaggacgtcagtacttttgttgtttggtcccgcccgttgttcacaacttgaaagacacttggatatgcagacagacgttaaacaatttcgtgttgcgttttatcacaggggtcttgggtttccaactacgaagcgtttgattcacacagaacattaggccaattagcctgcacaaagggaaaaaaaaatagctgagcttggccgggcgctcacgcctgtaatcccagcacttttgggaggccgaagcgagcggatcgcgaggttaggagatcgagaccatcctggctaacacggtgaaaccccgtctctactgaaaatacgaaaaagtagccgggcgtggtggcaggcgcttgtagtcccagctactcgggaggctgaggcaggagaacggcgtgaacccgggaggcggagcttgcagtgggccgagatcgcgccactgcactccagcctgggcgacagagcgagactccgtctcaagaaaaaaaagaaaaatagctgagcttcaggctcttcctctccccactgtgctgggcctgacttgagactcctctggccctttttaaaccttgtgctggtggcaggatgtcaactacttcactaccctgtgaccagtttttaggtttttgtttttttttttgaggcagtctttgtcgccaggcttgagtgcagtggcgccatctcggctcactgcaacctctgactccctggttcaagctattctcctgcctcagcctcccaagtagatgggattacaggcgcgcgccaccacgcccagctaatttttatatttttggtagacaccgggtttcaccatgttggccaggatggtctcgatctcctgacctcgtgatctgcctgcctcggcctcccaaagtgctgggattacaggcgtgagccaccgcgcccaacccagttttagatttttaagaagaggaattaattgattcaacagatatgttttggcatgcctaccgtgtgtcagtcactctcccaggtggtaggaatacagcgaaagcaaaacacgaacgaatggctgatgacagattgaacttgattttggagatgaagcaatttgtcctggaagcccgctttcaaaaaaagagaaatgtttcagaccccctatctcttcaggaagatctgtattattaagtagtcacccctgggtgaggaactgtgaaggaaatgttggggaaagttggggagggaaagaagctaactgaagagtttacattctgaggaggatggcagtgggagtaagaaaataaacaaaagtctaacgtaacatgggttatagattatatagattctaaaagtttttaaaaagcctcccacacactcttaactgtcagctattactatattatcctcactagttacttaacacttcatttctcttgtttttagttctctcagaaggcaggggtggccaggcggtggctcacgcctgtaatcccagcactttgggaggccgaggtgggaggatcacttgaacccaggagttcgagatcagcctgagcgacagagtgagactccatctttagcctctgtcgcccaggctgcagtgtagtggtgcagtctcagcttactgcagcctccacctctctgggctcagatgattccagtgccgcctcagcgcccccctcccccgagtagct

SEQ ID NO: 318077 - DNA, 4001 bp, Homo sapiens
acagtaaacattcttctcagattacatttgttttcaaaataacttttagaactgtttgattcgtttttctattgcttcatgtcttttacattttaacttgagctacagtaaaacaacgtgggggagtactgggatactgtcagcaatctgcatttgccctggtgttttccacaccctgcattccatgtctattcttagcactgtccttgggctgcttgtcagctcacattcagtgcggggtaaaaggcaggcagccactgcctctgaagaaatacttaatgtatacagaatgagatagcaaacctttggaatgtcccagagcagctgttgaaggcactagtccttaacctctaccaatgtctccaccttgagccaaggcagtagtttgggagaatataataagcaccaatcatcagatgtgctgtgtaaactcagacacgcagtgtaagctcaggtgttgaacttccattggctgccaggctatttaaagctaaggattatgcagagatagcagatgtgttacattttgccatctaagtttatggagcatctaaaaagcacagattaaaactcactgaattcagcaatcaaacttttaaaagtggtgtccttaagcttcatattaatttacaagaggatatgtaaatacatatctcatgaacattttgtacgtgtccatagaacttatactatctttaaaaagtcaaaacacttcagataggattcagtatatctttaaaaagatgaatgaggtacatatttgaactttttaaaaataagatttatatctgaaaattcccattgacctttaaggcagtaacaactatactaaatcataaatagatatcagacccaatttccaaatactgtattttaatttttgcactccatatttataaaacctcattttaattaaaatacattaaaaagaaaagcttatcgagtgaagggaatcacaactctttttggcaaaataaaagattttcataaaatggataggaattccttaaatgggtatagctcttttgccatcagtgattacaaatgcagctggcattgttggaataataagaaacaattcggagtcctctctaatatccaaatacagccttctgtattttcaatgtttcagttgtaagaatagtatcagtttgagccacacaaacatatttacaaattttcctttctgagtaagaataataaagacaacctcaacataccaggaactgtgtatatatttttaatcttcataaaaatcatagcaaatcatttcaaatgtgggtaatacaaacattctcgtagtaccagtggctgaaccatcatcttccccatgtcatctgaacaggaaccgatacgatgtcacttagtcccaactggatcctttacttccaccaccaaaattccatcatgacagaggactgcagacaaatctttgatttccacaccatctggtagtttgtactgtcgggtgaagcttcttgagataaaaccgtgctcatccattctggttccgtgttgtgcttttatcagcagccagccttcgaaggtctgaatgatgatgtcttcagggaggaactggaccacgtccagcaggatctgaaagtgggatttgccttctcggggtggcgtctctgccgctgagtccactggaggagactgcgctgccctggttttcctcaggtccacgatggttggcccaggcagtgcatataaagcatgatccagcctgcagtcttctagacctcgagcttcaaactcttcctggtaacgcactggaatctctatgaggtgcctcaaaatgatttttgccatagtgaaggcaaaaacagccttgaacagcctccttctgccaaccttccactgccttcagtcagtggcgagcccctgcagttgcctactgactggattaccagttgaagcagctagtggtttatagccgtgcccagacgcaatcacttaattaggcctgaatcatagcacggaatgctctcttgtcttttcacacatgctgacaatgaacggctatttatagggcatgtttcccagtgcatttagcacacagcctgcacaagctgcccagtcatggattgcccttacattctcagttatccttggcaaatgtgtctgccttgcttacttcaagaaagagagtgggaatcgaaaatggtatttgaaaaatatctgggtgaggccaggtgcggtggctcatgcctgtaatcccagcacttcgggaggctgaggcgggtggatcgcctgaggtcaggagttcaagcccagcctgaacaatgtggtgaaaccctgtctgtactaaaaacacaaaaattagctgggcatggtggcttatgtctgaaatcttagctacttgggaggttgaggtaggagaatcgcttgaaccaggaggcaaaggtttcagcgagccaagaccataccgttgcactctagcctgggcaatagagtgagactccatctcaacaaacaaacaaacaaacaaaaaccaaaaatatctgggtgggtgctttctccctgtgaacttcagtaatctaagggaataggacttcttagaacagtcagagatgttcactcataatatgaactgggatcacattttccctcgtctccagatacaaagctggggagggcagaatctagctgtaattcagaaagaattaatacacacatattcaaatctcagccattcaacaaactgccctgtgtcctatgcatttccttttattttatcttttagtcttttgggctaaaagacacattatctgggtttatttacatctgactcatcaaaattagatcagatgactaagctagagaagtgacaaacgtcagatgggggctgcaggggcataggatggggaattttagtgatgaaaatagagccacaaagaagagaaaaatgtcaaagctttgaatgatttgatatgaacctccaaaaatctaaggattaatcttgtcacagctctgctactgagttggcaaaaataaattaaatataatttccccactatatcaccctttatactaaacttaccctgaaaaagaatgaggcaactccttatccacagctatggaagaatctccaagatatgttaaatcaaaaagaaaagtccagggcaatatatgatatgctagtgtttatactttttttttttttgagacagagtcttgctctgtcacccaagctggagtgggtgacagcctcgaagtcctggaatcaagaaatccctcactctcagcttcctgagtagctgggactatagaaccatgccaccatgcccagttagtttttttgattgtttttttagagatgggggtcttgttatgttgcccaggctggtctctaactcctggcctgaagagatccttccacctcatcctcccaaagtgctggaattacagacgtgagccactgcaccaggccttatttatacttttttaaaaagtatgtatttgcttatattaataaaatctctctgaaagctttgtagctgaagacagtgggtgcctcctgagagtgattggcaggtgggggctggaaggagacctaattttttactgtaaatacttctgtgctatttatttacttactatttttattattatttttgccaccatcttctttgtgatagtgtgtgctttttattttatttatttatttatttttttgagatggagtgtcgctctgttgcccaggctggagtgcagtagtgccatcttggctcactgcaacctccacctcctaggttcaagtgattctcctgcctcagcctcctgagtagctgggactataggcgtctgccatcacacccagataatttttgtatctttagtagagacagggtttcacaatgttggccaggctggtctcaaactcctgacctcaggtgatctgcccgcctcagcctcccaaagcattgggattatagatatgagccactgcgcccagccagtgtgctttttatttatagagtgtatatggaatataccta

SEQ ID NO: 318078 - DNA, 4001 bp, Homo sapiens
aggaagtggggaggggaccaggtctgcaagccgtgagcggagcagagagaaagaggagaagtggcgaattatcttaagtgttgattccctagggttgggggaagcatagtgaatgggacggatcctgtagcctcgactggccggctactcctccgtcatcactggcggcagaacttacacttaatgatcttcttaaacgcgttttgaaagtccttgttgaagtatgcgtaaatgacggggttaagcagagagttggagtagcccagccaattgattatggcgcccaacagggtgggcatgtggcagctgctctcgcagaagggcagaacaagagccacgatgaagaagggcagccagcagaggatgaaggtgcccatgatgatgcccagcgtcttcactgtcttcctctctcgggccagggccatcttgcgcttcgcctcggcgttgcgctcatttttcctctcgaaagaggcgggggcacaaggggtaggaccagcctcgctgggcagaggcaagtgctctttggagttgcccactcggtgcacctcgatcacctccagggcggcgccatcgtcaccttgcctcaccgcgccattggcgcacagagcacccccagccttgctctccacgcccagcctccagttcctgctccccgactctccattcacactcttcttgggctgcggggcgggagatgctccatggcgggtgtccgctccggtcttctccacctttttgaccgtcttgcggatgcggaagcgcgcagctcggaatatgcgcccatagagaaccagcatgagcagcagcgggatgtagaaagctccaaaggtggaatagatagtgtagccatgatccttgctaatggtgcatgcgtcggggtccgagcggtcttccggggtgcgccagcccagcatgggcgggatagagatgaggaagccaataagccaagtgagcgagatgagcgcagcggcgcgccggggcgtcctcttgttcacgtagtcgatggggtccgtgatggcccagtacctgtccagcgcgatggcgcacaggtgcaagatggatgaggtgcagcacagcacgtcgagggcgatgaacaggtcgcaggttacctggcccagtgtccacttgttgagcacctgatacagcgcggccatgggcagcaccaacaccgacaccatgaggtcggtgaccgccaaagagccaataagataattggccacgttctgcagggagcgctccaaggcgatggcagccaccacgcacgcattgcccagcaccgcgcagaagatgagcgtgcccagcagcagagaggtgatcacttggtagctgacggtcacgtcggagataccagtagtgttgccgccggtctcaaagggagccggtggtgatgtggtgttgttgccctgaccagggctgagcacatccatgcctgcgcgcccggcgcgggaagggggagggaagaaaaagcagcgcgaagattcgcctcgccccttcccctggggtcttccgcccttctcctgggaagtttcggaggaagggaatgcagagacccaagcaggaagttcttactgcttcggcgaagggtatctccgaggagcagctttcaggcgctccctgggctctcgcagtccagcgcgttcagaagctccagctgggaaactggagttggcctgaaagcagctccaggatctcccggcggcggagaggtggctggaacgtctgtctgtcgctgtccattttactttgccgctcccgaactggctgccggagctggagtctccccactagcaaacagtctccaatcccagaaatatctagaaccgagaagccccatcctccacggtcactctgtgaccctcctctccctatttccttccttccctctctccccctctctcctcctctcttctctctcttctgcctctttcgtcccccttctccccacctgccttccctttcagtctccctcttcctcctcacttccctttatttatccctctgtgagtcgcttcgaaagccaggctccttccctcccactctaaccctcccctcctaatacttccccaaccccgaggagtgcctctttcctctgggtccccgccctcctctccctctagctcagcgtctttgcattcgagtctctttttgtcaacagagactcagaactcacttacacacaccagatccctgccggtcagaccaaggttgtaacaaataaactccgcctccaacccagcaaaactggggttggaaaaacttgggggagggaattccaactactccttgcctcatattatctgccaaattcttaaatcgtgtcagcatcccagagtggcaataggagatgagaaaaggaagcatagggagcctgaatgggaaggtgaacagtcctgggtcagtctcccaattattgctaattgatggaagaagaccgagtgtgtcttcctttttaaaaagctacctccgttctcgcgccattgcactccagcctgggcgacagagcgagactccgtctccaaaaacaaacgaacaacgacgacaacaacaacaaaacggtacctccgttatcatctaacagtccagccttactccctcagggagaatattgcctgtgactttttttttaacgttggggaaccgggagagaacgaaattataaaggacgtgtcaaaggacaaggagaggtaaacaactgcatctcgaaatgaagaacaaaactcagtgtgatatatattctaaacacacacacacttttccatcactactacacttgtaatttcagtgacactgccacttcccatagctttgtggctagtaaattcagggatggaaatattttgcatatgtgttctaagtgaagcctggcatttcacatggccttttgcacttcttaccagagcctgcaaacctctgggggaaacttggtggaatcccggttcgctagccggctagcctctcttaatctcagaaactgggttcagcacctgggacagttctaagcaatgaggttttatgtcgccaccttctggcaaatgttttagagtgccatctggaaacccttatgcagaaatgaagcaagtattgaggaaatacaacaacttttagaaagaggaagacagttattaaaagacaaggtagtattgagttttgtctccttcctattttctttaaaaatttattttagtgccctcttttgctctgaaccttatatatcaggcctattatatgttttagcttccttcgaaagcctgaagtatctgtcattcacaagttctaactgggaatgccattttaataaagctaggctaacactttcacctgtgttggttttgtgctgtcataacctgaactttggaactgacataaatttaccttttgttggagaaacgaatagtattgcattttccaaatgatttaacatttggaaatgttaaatcactgaaaataaagatacttacaagggtttgttctaagctgtttcctttaacaagaaaaacaaatttaatcacatttgagcattggtaaagaatgggacttctaagcaactacagtaaacataccacacaacatttcacttatacatcctgattgcatgcctgaggtgaaaggaatgcaatctcaaaagcagttgacactggataacatgaacagattcactacagattgcaataatcttaatattgtgttcaaatctgagctctgaatttcatagctctgaattctccaagcccaaacaaaagagcaatcaccaaagcatcaaaaagaatccagttgggccaatgcattacaatacaggacagtgtgtttggataaggttttgtttgttttttttttttatagttcagtgctgggcacagttcccactcaatcatttcagcatgccaccacaatgagcctgccatttgtgatgattcatggcattgaaaagaaagagataagtatacatggtaatgctgtttacagactctgaagaagtctttttaagatttgtgaaggtatct

SEQ ID NO: 318079 - DNA, 4001 bp, Homo sapiens
tttgttggcttcaaggatgcttttgcccctacagggaacagcatcagaactgaaatccagataactcagaggaaccagagacactactgtcctctgggccctggggcctccttctgctcgatatgaactgaactaaatgctccctgaagctcctgctagcttcagtgagctacagttctcctggcatttaaatgatgactgtggctctcctctataataataattataataaggatatttcccacaggagggaatgatgcaaacgtaagagagattttaagatgagaatgcaggaggaaaataaacatgattaagaaatgacttgctaatgctgcaaaacctgtttactttttactaatttttttcctgacacttgtatatttcctaggtgagagctgctcttcagaactctgcaggtctcatcccttccctgactctttccttgttttcagggcaccgcatccaccacccacgtccttttccttcaaaacctgtgctcaccaggagcacgcagcaacatctcccttggtcactgatgctcaagttccattccagggacagggtaaatatccactactgctcaccacagtcacccacagctttaagggccagagaatccatcccagcgatggaagacagggagggcaaacttgaaccagtgtccttccatcaaaagcctcctttggttcatgccaaacctataccctaagaaacattctgtttcttcatttgattggaccaaatggaaatcaagccaagattttctcttaacattgaactctaggaagacaagctcatgcctaccactttttgacctctgccagctgccacttccttgtaccaacatccacttctttcaaagacaactaacagcacagtgccgcacagggtagcaagctgtgaggaaatgcatctgaaatcgggattgggattctgtgaaaggcaactgcaggatggttgcgagtaccggcagtgaccgccaaggctttatgcagcacatcgtacccacacactcatggctacgtatacacacacatcaaagtggacgctcaagacacactatcttgtctctctctctctaacacacacacacacacacacacagcacactctgggctgcacatcaaggaccagccatagagtccacacacacatccagttacacacttggctatggatgcacagcctgtgcgcgctctctcttacacacacgcacacacacaaatctttacatacacaacctcccttgtatagtcagtgagcacacatgcagtttcacaagtacttacatacacaagtggaaagcaccagccccaagcctacagtgatcccacgctggaaacacgttgtatacaaccagccagcccacctacaccctgagccgccccgaagcccaccctgccgcaaagccgggtgtcctgagtccagaacccccaagcccccgaccccgtcgtgctgccccgcccccgccgcgtccccaccggcacccgtgggctcctggggtcccgacccccggcgcacttgccgcacatacccgctgccagaggcgagggagcgaggtgccctggcagattcgagcggccacccccagccgctgagccgagcttctgctgccgccgctgccgctgcgctcccagccgctgcctgcgccctccctgccgccccctcgggtgcgggctccagcccccgcgctggggagccggcgagcgtgaggcgcgggccaggggctgcgggcgcaggaccccagccccggatcacctgggctcgccgcgcatcgtccttctccccaaccgagccggactccacgggctcaacagcccccagccccggtggtccccgctgccctgcccgctgccgcccccactgggcgccagggacagcgggggtgccgctctgccggcagggcgcacaggggagtgggcacagaggcgggctggagcgatctcacccgttccgggctggccagcacgcgccctccctggccggagcgctgctcatctgatggagggcaggaaggagccctgggctgactgcaggctcctgggtgaccttggacaagttggttagcctctctgagtgcccacttcctctattcaaatataataaacatgaaagcgtttgtggcgtctgtgccagggaaatcctatccctgtatagtttacttccttcttatgcctctgcctctgccagagcagggagagtttgggtgcagggttcagagtgagcttcgtagcaccttggatataagactcaagttttccagagacaatgattccatttgcctgaagtcttcctaaatgatcctgtccatattgatagtccactatttgctgtcttagcctgtcctcccagctttgaccacctgtgaccttgagcatgtaattaaacaagagtcaagcctcaacgctcccgtctgtaacacgggcataaactcacagttgtgtggtgcaggtgtgccacttagtgagttgcagtacctgtgagggacggtgacagagtgaaaaatatttttcctcaacacatgtgacaaaagcctcaaattccaaggataaaataattcaagagttagcctaagcatgttgggaagggcaggagcgagcagagccttccttcacggaggcaggcagggagcaaaggggtaatgggtgaataattcaccccctcaagggccactgaggcctcctggaacctaaacaaaacagagaagctgtggacagtgattaacttctgaaagtaaataaatctgcaaagacaatcttaaaaattattaacttaacgattgtaagcacatctcaagtgaactggaaatttaaattgaccaacttatccatgctagaaacctttgagttggtcccttttttagtttctctctgttgacatgccttgtctctcattttccctctattttgttaggtccttccttcttcctcatggtctatatttcttccccatcttactcttacacttttttctctcttctttccttctcctcccatctgagtccccattctgtgtatgtcttcttcaccatctttgtgccaagtttttgtctcaacatctctcagccatttccacctgttagttctttccttggtgtgtatgtcttgaatatgtatttatctcatatcccctatgaaaaatttaaaaggagaggagctgtagattgtttctttaatgacaataagatctaaacttgaatttgccactactccccttccctaaaccaaacacctcacttaaataaagccattatcctcactcatggatgctcagagcctgaatcatctttgacacctccacctctgttccccttctccccactttctactcaaacatttgccagttcctggggactctatttccactctgtcatttgcatctgtcccttccttcttatttccactgggcctaattttatatatatgtatgtatgtatgtgtatatatatatatatatatatatatatagagagagagagagagagagagagagagagagagaggtaatcatcaaagattgtctaactggtcttctctccctccagtccatcctcttcattgagctcagcatggtcttcctcaggcagatagatccccaacagcatcactctttgctctaaaaccctaatacccatgaaaggtagaaagcagctccccaaagatatccatgtcctaatcccaaggacctgtggttatgttaccttgcatggcaaaagggactttgcagatgtgattaaggattctgagatgggaagattattgtggattatacaaatgggtccttaaaatattattaaaagtaaaagagagaggtaaaagaggaggtcaaagtgagaggacataaggactcaaccagctgtcactggctttgaagacagaagaaggggccataagtcaaagaatgctgatggtctctgggagctggggaagacaaagaaacagattctcccctaaagcctccagaaaggaaggcagctccacagacaccatgatattagcaca

SEQ ID NO: 318080 - DNA, 4001 bp, Homo sapiens
aaaaataaacctacatttacattttaaataaattaatcatataaggaaatatttttcactattataagtggcaaaatattattactcatcctaaggaggtaacctcaaaataaacatttgattttaaaataaaaatattgttggcataccacctaaattcattatgtattcctaacaattcatgcatcacaatttggtaaatgtgagcctaaaaacatcttttattatggacattcaaaggctgtactgagaggacatgagggaaagtctgtggcatttgcctgttattaatattgtggatagagagggggagtgggtgaggagaaacatatgttgatgggatctggttagaaaactgacagagaagatggtccagagacaagattctggggcgtgatatcatcttgtatcctgcactattgttccacagcacccaggagaatggctaatgtccatttaatcaaattgtattctgctgttagaatctaatgctgctataaataaatgtttaaaagctagaaatgttacagctcataatatctgaattattcccccaaaagtacattttaaccaactgatccagtttgatacagtgtctgaaatttaaaacaatattataatgtgtcaccattgatattgctcactctggccttttaattaacaaaaataaaattgagattctctgcatttcactctgctttctctgggcaaataatttcacaaactttagaggaaaattaaagacctggcaccaggtctggcaccagcctaaataatctatgttaatgtcctaagactctgaaccaagtcagtacatctgggaaataacaaagtccacacacttttattgagagtgtaaaatgttttattgctaaaaatacagtctctttgtatatctatatgtattagaacacaaccttatttgaaatatatatattacaacaatgacaaactgatcaacatctctttattaaatacccaccatgtaccagggattttgccagggatcatgaaacacattctaccctcaagaaattccctggttggggtgacagtacatcttggcaactcaagtcatattacactagagtttctgtcaagatatttgacagctccttttgtgatagttttctactatgtcaaatgcagaggcacaaggcccctgatctatacctgaaatatacttttctagaggtctcaagtgaatgaaaaacagttcttgtgattacagcaagaatgtattttttaggatgtattccagctactgatatctatggataattctcagcctcaaatgccaattcataacattgaggccttattgaatacacttttctttgtactatttgattgtgccaaataaagcaatcttttcgaaaagaaaatcttccctaggagtcagactactatttcatctccaaggcttgcagaaaattacaggaaaacaaatcaaaacgaaacaaaaaccatttagctttatgtaactataccatgcaaccattatgtcacataatataataacctagttgagaaaagaagtggacaaactagaacctgctataaaaagcaacgtgaatttgtctcaagtttagatatacagatagatattcttaagctatttttacccctacttaaatacatctttcttcctattacagagatgaatatctattttcaaacatcatctccataatgcagacttttagtataggaagctggaaatgtttacagtcatattacgtttttcatttaaacagaaatgacaaaacactaataatcaaacagtactgtgaacatgattatatatgaaacatcaaagaaaatccacatccattaactttataactctacaacaacagatttttagagtcttcatagcagaaatgttctcagtttacaacacaatatgtacagaaaggtaacatacctcacattagcatcaagtttgtccattacaggaaataagcatgagtgagttggatttcaatgcccacagggtcctaaaatgggggaagtaaaaagatgttataaaagaaagcagcattgaaaaatacaagtccttgttttaaaaaactcaaataactattgcttcctattatgacttgttttgtggaaatatttaataaacaatactaaagcaaaaagcttttggcatattgacgtatggtacagccgagtgtcacaaaaggtttatttacaccctactgatcgctttgtgattaaaacatatgggtgcttctttttgctccatttattgttatttatgttctttccagaaacatggcttatttttatgatctgcattaggacagtaattagtgaagataggtagctacattcttatgcttaaaatagtatattgcccaaaatggccattttgttcctatgaggattttaaaaaaatgtttaaatcattttaagggtaggaaatcacagattcttttgagaatctagtaaactcttgagaactgtctgcccagaaaaaaatagatacgcatgcacacacatgcacactttccagagagtccatgattccttgaactcaggaatccaggaatcccaggcccatccaggaaccccaggctaagaattcccaatcgaaggagagttaacttcaaattaccaaagttcctctatcacagaccctcagaagacctcacactctttaatggatgggcattcactgatctccacaaaatcaaccctctttactaattgttcagttccatttttgcatttttatatcttcatcacatctgttccacagcatgatgaatcagtaagtgtaggggcagggtccggctgtctcttctagggtcaccatgagcaagtcccttttccttctgaacatcatcattcacttctcagtaaagagaagagattggaaaaaaataatctctgagttcactcctagctctgatattctatagttctgtttgctagttttctagttgaatcttaccaagaagaacctggaaatctgttatctacataaaagaaccatgaaactcagcctgggcccttggacaccttggccagggtgagctaaacagatgtggctggcagccacgaagagaatggcagatcactagatatggaaaggacctcgactctctgtgtttttcgatgtttgtttcttagatcctctaaacttaacaggagctcccatgggcatttctgggcctggggcaggcatgggaaaggctccacctgcagaactctgagccccctcccctaatctgaaggaaagtagctctgtccacatctgtctgttttatattttgaatgtagaataatattttgctggaaatatacaagtacaaagccctaactatcgaagtgacaggtctcaatcctctttccttgtctatctaaaatttttcctgagaggatcacatccatctggtggctgaaaatacagtacaattacaatactattcactgtagactcccaaaattttatccctacgttgagactttcccaggtgtagacagtgcccatccagcatctcaagatggatgattaaaaagcatttcaaactaaactcttcctttctcatctccgacacaaaaacctgctcttccccagtgttctctatctcagtaaatggcccaccatttacccagtggttcagaccagaaaaacttcttctcataccctaagaccaaaccatcagcaaactcattctctctactttgaaaatgattcctggccgggggcagtagctcatgcctataatcccaacactttggggggcctaggtgagtggatcgcttgagcccaggagtttgagaccagcctgggcaacgtggcaaaaccccatctccacaaaaaattagatgggcgtggtgatatatgcctgtagttccagctacctggggggctgaggtgggaggatcacctgagcccaggaggttgaggctgctgtgagccaagatcacgctactgtactccagcctgggtgacaaagtgagaccctgtctcaagaaaaagaaagaaa

SEQ ID NO: 318081 - DNA, 4001 bp, Homo sapiens
cctagtcctcacccattcattccctccccatctctgttcaattcatcaacaacgttttcattaccctctaacataactcatttgtttcatttatcctgccaccctcctagaacggaagctccaagagatcaagaatttttgtctttttctcccctaatgccataattgcagtgtctaaaatacggcaggtgatcaataaatgtttgttgagtgaattggctcgaataataaatacaatgtattaaagattcgggagaactccaatcacgttcctggggtggtggtggcgggggcgggggggcgttataagatacctacacaatgcagctcagtgaaggcaatgatctgttagttctccttctactcacaaaagcagcacatttccttcctccccttccttcaacacttaaaatgtttgcaatcagttcacagatattgcacttaaaatgcaaaccaagtttctcggcatggcctacctagcctgcactcccgtctggtctcatcaaccatcttccgtgtgcactatgctcatgccaaccataccatgttctgctcatcaaagacaccctgctccttctcaccaaaggaacctttccacctgttaatccctctatccaggaagctcttcccacatctcttctgacagcccgatccttcccattattcaaatatctgaaagttactgactcaaaaattccctacctgactactctagctaagagacaagaccaatattccaacatcctcctttattttctaacacctaaaatcttctgaggccttattcacacatatgcatcttacttatgagagatcctattttgttcaccacaatgtctgtagttcctagaacactaggcagagtaggtaatgaggtgctggtgagttccgttttatcactgaaaccgcgatagtaggaagttaaaagagacccccgacatcaggcagctaggagagtcgtgggaaatgaggggcactattgcccaagtaccaccccataagatctggagccatactctagcaattctcccttatgtcactctaaagaagagcccacgccgctgttagaaacctccagtctctgcatgcctttcataaactacttttatcaaacaactgacaagctacttgaccaattacttggcttgctttttaaaaaattagcctcgggatggcacatctgctataagctgaaacgcctccctagactcttcgagtctaagactcagacaacccacatgtcacgtaagattctgcctccaaacaacaaatactcaggatgggccagaagaccaaagcgttatcctcagggagataactgccctcggcgtttcacctgtccctcactgacctacggagtctgccctagggagctccgaggccgggtagggaaggtggggggccctccaaacctcgcttactccacccccaccgttacaccagcgcattccagtcaatgaactctgggtttcaagcttaaataaagcaaagaaagccgtccccaaaactcatgtaggaaaaagagagcagagagacgagcgagcaagagctacggttgggaagggagagcagcgcactgaggcacagcccgcgcggccggaccccacatccctgcgctcccggccggccgagccgagtccccccccgcgcccggggccccgggaggtgctgcacctgctgcagagaggcgcagccctgacatcgcgacaggtccgccgccgtcccgggcgccgccgaatgggtctcgcccggcatcatggtgccgccgccgggcccggtgggcacgcacgcctcaggggcccgcggcgtcggccccgtcctgtctctgctgatgccgccggggccgccgcctgccaggccgcttcccgccaggtccgggcgggtccatccgtgcacagaggtccccgtggggctagcaaaaggctctccgagccagagctgcctcaggcactaaaaagaaacgctacccggcgcggcccccgagcgcgacgcagtccagtcagggccccgccccgccctggctcgccccgccccgccctggctcgccccgcccctcccctgggcgcggggctgcctaaggcgctgcctgagcaacaccgggagaggagctgtgctatgcggcgggggagacgcccacagaggagcagccaataggagtagaaggatcgaaggtgcattcctaccactgttaagggtcgatcctttattgccaccttgctgtacgacaggctttccatagacacctaaaggcctccgctatgtgggcggtgacccgcccgtgacgtaagctccagacgcctgagaagtggaaggacccggcgtccaggacaggaaagtgcgtgatttacagctagagggataggcgctgtcccggagcccgtcctgggccagggagcaggagagggagggactacagttcccgacgcgctgcggggcgggcggagatcgtgcgcttcggcgccagttgcacggccttagcagccagtggcggctcccctgctcctgtaacagtccccttgtcttctgacctttcgctcctcggtcatgtgtcctcgccggtcgccgcggcagccagtgatgcccgagcggcgggttcccaggcccaggtgtgggcgccaccgcccaccatgcgccaagcccagagcctggttgaatcgttcgccaccttgtctacccattttggccattatcctgccacctccaaatcctgtttttgacacttctcgggagagagagaaaacggaaagataaaggaataaactcctcgtggtcgtagttagtgggtaaattcagatctcgtttgaaccgaggtttttcttatctccagccaccgtatccaccaccaccagaatcgtctttttagtcatcacagctggtcgccgtcagtaccttgttcagaagcctctcgcagcttccatcgtgtggttatacaatccaaattccttataaagtccaaattcaagaggaggaatgcacgtttagttaagttaatgtctagaccttaccagccaatttctagctcctcagtatggaaattgcaactgaaaacaccccttccaaaaaaagcagtctgcatttttctctgagttttcttctccaaatttcgcacccctgaccttgcttacacactctggataccacctgctgtggagtggcggaagcagacatccagcgatagctaagtttcctgtcgttgacacccaagcaagacaggcgtgtacctaactgaggacctgccggtgatagaagtctcagcttttctcagagacaggtgggcagaaaacaagggtaaagttaaaaaagaaaagggaagtgagcagatccatagcgggacgcagctatacagtggaagacagaccatgtgacccattagggaaaggggcagcaggtattagagaaagacctgtagggatcatgatcgtcccggtgctagcgtctgatcccagacaaatttatcttcaccattacttcccttttatgtacagttacttaaatgtgtgtttttccaaagtaccttactggagaagacaccagctctctctccctctacaccatccacccgcagccatgacgcacttttatgattaggggcacttggagttctcactgctgcctccctgtctgtgcacccttgctagtgttttccccttacctggaacacgcttccttctagctctaggtgtagaaatcctacctgctcttccaggctccggggtttacctccacaaccccaaggatctgccacctaaggggcaaaaaatccccttagcacggagtaatttttagtaacatcacattttgagttggatgatggtggtttttatgtcttacagatgagtcttccctttaaatgctgcaaagtgctgcatagtagatgttaaatgaaagtcagaaagaatcaaatgtgctgcaaataattgaaggtaagaaacaacaaatatttcccttcaaaaatgttaataaaagtgtattttctcctacctttctcaaagccagttctc

SEQ ID NO: 318082 - DNA, 4001 bp, Homo sapiens
ttgtcttctttatactttatttgttttcccataaggaaacattaatgtttacattctttaataaagttaatcttacatcagaatataacttaatactgtcagcaacagggaccacacacagtaaataagaagcacatttaaaataagtctgatttcacatagattaacatttgttggttaataaaatatcgacagtattacaatcttacaatatttacagtaagaaaaatctagagtaatatatacctttcacagcaggattcctttttttaaaatttcttccagtttgggattgtgtatacacaaaaagctcaaaataaagcaactctgcaatataatcttaaaataatggctactgggggaaattctatcacaaccattgaaaataatggtgacttctcacggagtctgtggcatctgagaacccagttaattaaccaaagtcttgctcatattagcctcagttacccagattaaagcagaactccggccttccctgactgctgaaaacccaacagattttctcaacatgctataaggaaagaggaaaaattggtttcagctcacacctcatggctggaagcctctggaagcctccagccagtgcacactccccaacttatgctaaaagagggccaatttcatccccacagcatcacaagagtccaccctccaaccacacagtgctctgacaccaagctcacccattcctcaactcttgtgccttaggataacacatgaacttagcccacataatacacaccagcgtcttagagacttgagaccagggcaaagaaacagactagtgtagtttgcactgagatcagtaagaaaaatgggaagtgatgcacatttccaattagaatgacaagaagaagacccacatccctaaactggaatttggccagggcatcagagttagcaccccctctctgagtaccgctagcgattaggatgtgtgctctgggcctcctctaaaagagagcatctacagtaagtaacacagtatgggacattagttcagtgacgactgccaagaaagcagatacaattcttgaatctggggctgtctacggcacctgaggtcaatcatccaagctgtgacctgtcccaaccctgcttactttaagatatctgatgggcacagagcactcagggatatggctgctggctactttggactctagatctcacaggtaatcaacaggtatctgggattgaattagcaaactgtaccatagctccttaaacagacattgtcaagtctgaaatcatgtcaagcatgaatcttcactgtcaggtcagtaatcaaagtgggagtcttcccacatcagccaaggttattttgtcagaaccttagaggagttggacagtttttcatgttgcaagtgattggtttacttatttcagtcaagctggattggcaaaccagactgatttatttagtgagctttgtttttttgattcttatgtgtgtgctaacccaaagctgttgtatttgggctaaatacactgacagagaaaattcaaacgacaaaagttttcagcaaacttctgtggcattttttctttttggaagtaaatgcaagatctaaaggtatttctacccaacaacgtctgtttaagtgtttaatgttatttcctttttggtcctatacagaatgctatgacttctatataggtctgaatgctgctccatgtagattccttctgtatatctaaaaatatatacttttcagtagttcaatacatggttaatcttcccacagaggaagatttttgtaatcacatgttgcaaagtagaaaacatctcctttctaagaaaggaaatatactttcctattgtacacttttgaataagcccaaaggcatgcaccaaaaatcattaataaaactaatacatgcaataaaatggtgtagagttagacttaaagtgctgcttctcaattttttttaatttgaagaagacattttgtcagttgtagactcaaaaatctttcccccacccaccctccccaccccatggcattaagagagaaaagtaaaaagtatgcataaatcttttaactatgctttacatgggggaaagaacagatgtatcaactatcctatatatcaactggattcccagttttaaataaaaccaatatttactggtaaaaattgtcaaagcgaatacacgcaaacaaatgttactagtaaataaatgttctacatagagaataatttactttggttttatgcgccttctcaaaaataacactagtgtcccaacgtcaccaaactgatgtgttccagcaaagttgtaaggcaaatctttttttccctagtgacatcttgtttcccaacagacaaaactaaaatcttttggtgaggaaggggttaagataatggctaaccccttggcatcctgagcattgtggtttatcaaactctaccctgctagaaattgtcaggcaccctgacccctgccttgaaccaggaaggctcccatgtctagagatgccctgactccttataaatagctttcagaactttgcttttttcccttctctctggttgttataatgtctaacgaagctggttgcaatgtcacattttgctagtaggggccaccatctaacaataattccaatatgaaaggttttaagccaatagttggttcctaattttatcaacgatttgcactaaaattctctacaatttacttagagcagagatctttaacttgggtttcagaagatgtgtgatgcccctgaagttgtatgcaaaattatccagggatgggcattttttttttcttgggtagaggatccatcacactgtcatcagattatcaaagatatctgtgacccccaaaaagggttatagggacttagagggatacccgtaattcattttataccaggactgggaaatgggggcagaaaactaaaaatggcctcgaaaaaggccagggacaaattgctgatcttttccctttattcacattgggaaaataagtgcttcaaactggaaaaatcattaattaagctggttaaactccattaaaaaataatcaaatcgctttctaaatttttttcattttcgatatgtggtaaattttgtctccaagaaaaggtttggagactgaatttttctcttttcctaaaggaaattcatagatagaatgctgaatatcatccacatttaaagatttgacaacataaaagttagataactcttaatgatgtgaatctttaacttatgattttgagtaaaggattatctagaatcaaatatacacttattaatcttcatttcccaaaattggtccatatttagacaactacctggcacaatttcactagataaacctaaaatctgaacaatggaagttaaacttctacccaaagtaaaaacaaagccataagattccacaattgaattggccacaaacattcacactatgttataaaggactttctcatttcaaatacatcactgaatgttcaacagaatttgcaaacataagatccagaatgactagcaaaacatgctaagagcatgtcaaaaagtaaaacaccacctctccccccccaatctggaaacacactcaggcattccaaaaataaaccagatctgaaaagaggcctctcacttggttttaagtatgaggtgtgtacaaagctatgggaaagggaatataaaatgaaataaccaaataacttacaaaaaataattttagccaaaaacacatctctctgttccattgataaaactatcaatttttaaatttttttgcaattctgaacactgtgttgcataatatcaccaagacaaaaaatatgttcacaggtacactttttgttattttctttctagagcacatctttgaggtcataagaccgcatctggttaaaataaagtctcttgcccttgcttcccttccccctcaaagtgattcaaccctgaattccaaaaaggaatattcaatataacaacttgaaaaccagttgtaa

SEQ ID NO: 318083 - DNA, 4001 bp, Homo sapiens
gcactttgggccgccgagacgggcagatcatttgaggtcaggagttcaagaccagcctggccaacatagcgaaaccctgtctctactaatacaaaaattagccaagcatggtggggcatgcctgtaatcccagctactggggaaactgaggcagaagaattgcttgagcccaggaggcaaaggttgctgtgagcagaaataatgccattgaactccagcctgggcaacgggaggaaaagatatgccaaaaaaggtaactgtggttacttctaagaaaaggactgaggctgggcacggtggctcacgcctgtaatgccagcactttaggaggctgaggcgggtggatcacttcaggccaggagttcaagaccagcctgacgaacacagtgaaaccctgtctctactaaaaatacaaaaaaaaaaatcagtcgtgcatggtggcacatgcctgtagtcccagctacttgggaggctgaggcaggagaaccgcttgaactcaggaggcagaggttgcagtgagccaagattgcatcactgcactccagcctgggtaacagtgagactccgtctcaaaaaaaaaaaaaaagaaagaaaagaaaagaaaagaaaaaaaaaaagaaatggactggaattggggatgttatcaaagatgattttatcgggggccaggcacggtggctcacgcctgtactcccaccactttgggaggcagaggcgggtggatcacctgaagtcgggatttcaagaccagcctgatcaacatggagaaaccccatctctactaaaaatacaaaattagccgggcgtagtggaacatgcctgtaatcccagctactcggaaggctgaggcaggagaattgcttgaacccgggaggcggaggttgtggtgagccgagatcgcaccactgcattccagcctgagcaacaagagcgaaactcagtctcaaaaaaaataaaaagatgattttacccttatttcctatgttttaatttgctattggaagaagtaattcctatataatgtgtaattacacaacacgtataaaaaaaaaaaaaaacttaacacctttcctgcaggaatttcccttctaatacccttatgcacttggcctgatccagttaaggctcacagagataaagggccagcgggtataattttttaccatccttgatgacaagacattcagaattctttcaccatcaccaccacttttctattcattgcccaactcatttccatggtcctagcacaaaatactcactggtggaaggagtgaggatcatccacatcgtggccatcgggggccaaagggttggagaacggctcacctgacaaaaaaaattgacgttaatttaatcagtctcttacgtgtcagatcctatgcaaaaatttgagatatagtagtgaacaatacagaacaaaagttagaacagcgacagtgtcaacacaatgtaataagtgctgaaataggaaactacaagaagctgtgggagcacaaagcagaggaccctaatcctgcgctggaggatcagagaagacttccggaagatcacgtctaaaatactacgtaaaagataaatacgcgcaacccaggattaagtatggggacaggactgggggaaagcgatccacgcacaaaagccgcccatcatcacttggagtaggagtgaggactggggacggagtttggagctgtcggcctcacttaggaccctgtggcttctccgggctcaagcgtcacacatacatacatacacacacacacacacacacacacacacacacacacacccggcttaagctcagaagctacaataatgcgccaagtgccccaagtgccatggggaagaaataacggatggcctgagccttactatctcgctccggcattttgttatcgttctttcgctgtcaccaacaatcgagtctccaacagcaacaccgcagcgacaagctctttcccacagtgcacctcagaatcaacccacactgctttgcgttcgcagcctttccgcttcctgtttttccctccgaccaaccccgagcgcaaagaaattgacctcgcagcggtcctacaatacttttatatcattggccaagctttaccccgcccctgcctcatgcagcctatgggctaggctttagggtccgcggttggtcagaccggagcacttggcctgaagacctggaattggcgacttcgatattaacaaggatggcggcggccgcagcaagtcgaggagtcggggcaaagctgggcctgcgtgagattcgcatccacttatgtcagcgctcgcccggcagccagggcgtcaggtgaggcgcggcgtggtgaggcgggcgggcttcgggacgccagggtcacgacctcgacctccctgaagttgagggaagcccccgcccacagcacgcgcggcgctctctccggccccgcagggacttcattgagaaacgctacgtggagctgaagaaggcgaatcccgacctacccatcctaatccgcgaatgctccgatgtgcagcccaagctctgggcccgctacggtgagtgcgggacgccaggggtctggggctccggtaggggaacaagggtttgagaagagaagggaccgcccaaggtcgtgcagaaacccgtggagaaactagaactcggactttagccttgctgttgatcttgtttccatgaagaaatttatattcgcagggttatatgatgcgttgtattccgggcaacataagtatgcaggctgaccgaatcctgcgtagggaccaggagctgacgtttttgtagttaagaatgggcttcagacaggagagaagttagtcaatatagtttctccaaataacgtgtagccagtgtcagtccaggtagtgtgtgagaatctcagtaattttgcacatagagctgggccctgtgctgagtgcttccctgcctaactcatttaatcttcattagttaggaggaagcgtgttcttcttttctcactgtagagattagaaaacggaatcaaaactttgttttgcactattgttaaactctagctgcaactttagatgcagctagagtttaacaggattgagcctttacatttattccccttcctagaatgcacttacccctctaagactggcatggcaatgtattgcaaaatgaaattttcctatcatgttgcctaacacattgtaggtatgcaataaatgtttatacatactgaataacaggattttaatcacagcttttaactatatggtgccctgggaatgacgggaggaggtggaggagagtgaccaccttaagcagattggttctcagagtagatatctgtgagacacagtagacattagacatgcactaataattggagaaggaaaaaagcttctccttccaaaagccagtagactacaggaggagatagacacgagtaactttagtgtattgtgctgggtattatgttagatagcctatgggagcctagagaatgggtacccagctgggtgcggtggttcacgcctgtaatcccagcactttgggaggctgaagcaggtggatcacctgaggtcaggagttcaagaccagcctggccaacatggtaaaaccccgtctctactaaacatacaaaaattagccgggtgtggtggcgggcacctgtaatcccagctactcaggaggctgaggcaggagaattgcttgaacccaggaggtggaggttgcagtgagtggagatcgtgccaccacactccagcctgggtgacagagcgagactccgtctcaaaaaaaaaaaaaaaaaaagagagagaatgggctcccagctgaggctggacccatgcaatacattgctcaccgtagttaataataaatgcctacagtgcccccgaaagcttccctgaaacaacccattgcggccatccagaatcagccaaaattctatttggacttgggcttcctagatgtgtttgagacctattgtattaattctaggcataccaaatgtattttgatc

SEQ ID NO: 318084 - DNA, 4001 bp, Homo sapiens
gggaaaggcaatgagataacatattatagaaggcaaccaataacatattaacttgaacctagaggaagaggtaagggaacaattcggtatctgtgttttatatatcatggatagtcaagaaagtcattctaggcagtagggaaatgtgcacagaggtactgcaattacatgcgcctgtaaaacccagaggctggcacactggaagggaaatagtggagattcctggcatctcctggccacttacgctgaggtattcccactagctgtgtgcccagcacttcctctgcatgcctcagatgcatttgacaatctcaggtgaactgcacttcagggtcaagggaaccccggccatggttctaagaagcaactcccattttagtatcacctacatttgaaaccacagagcactgtccaggagaggtgatggtggtgggtctcctcctttggctctctggcccatcagctgatactagggagcgctatccctcagcccacatttctcagcatggtaagtctgagagtcttgatgattaaaacacatttttgtgtgtgcaatttcataggttttctaaactcttgaaacccttgcatgaaggacaaagggaccccacgttacacactcctacttcctggagtatgctaagggcttcccaacactggtgccaacatcagcatgccaatgacgcttgggtgggcatctcttttttaagttttgtttgttacctttaattagaaaagggagttattattaaagaataaaaagatatagtcacagatggcatgggtggcacatgcaaagatccctagtttgagggccaggcagacttctagaactgtgtgactctgggtgagtcacttggcccctttaagccccacactcctgatctataaaatgggcatgctactgtggtaaggagttagtgacataattcacgtgaagtgtcatggtgcctagatgaagtcaggacccactatttgctcccctccttccacagcatttactacaatggcaacaatacagtctcttctttactgtttgtcttctctgccacactgagtgaactctcttatgccatggatcatgtctatcttgttttgcactttacccccagagtccagcacagagggattccatgacttattagtagcatgaaggaatgtacggaaatcatacaatttcagattccagtaaactaaactctaagaggttacccacattccatctagtatcttgcaattccttgtttgaaaaagtgggtcatcacctggggtttagtaatccctttgttaaaatgacattgttgttgcacacaattttacctgggcaagtaaaaaaacctttttttcccccttctcacagatttaaaaactctttaggaagcaataatagcttttcattttttaactggggccaaagttagttaatccacaagaatggggatcccagctgtcattttggttgatatcacaactgacgaccaagaccatcacaaatatgggagcaagtctgatttgtaacattattataattatgaatccaattactttaaggaatgcacgaaaggctttttaaaaatttcaatagtaaggcaggcaccactcactttagctctatacaatcctttaactgatgggcattaacatttaggaatatacttttatacatcaatacacaccacttcaaaataagataaaacaaacatttccacaaactatgcatacacacagatcttgctatacagttattattaggtggcttttaaaatggacactgtacatcggtccctagagtactaagttttcactaatgttccagcagatgactcaccagggatgcttccaggaatccaccaactccctcctgccagctgctggggtagcacactaacggtttctacacctggacagctgcaggcccacagggaggggagggaggtaggggcttgggaagtgcttaccttgctctgggcaggacggagagtccaatggccctgaaacagatgttgtttcttctgctgctgttgctggtactggaacttatatactctactcctttctgatggaaacttaaactagaaactgacttgttgcaacattgaaaacaactctcaaaaccttctgggggaatttcaagaagttccttttttgtttgtctctctctgtgtgtgtatcaataacgaggagggaacatagacatcaaaatcccaggtaatgaactaagaggaaatgacttttgggtggggaataaggaaggagatggagatgctaatttctctgggtttacatcatggccaaggtgcttggagacagcactaggcagattccctgggttccacagatcgaggaagaaggaaggccaaggggcggtcagacgggaggctgagttcatgtcgggatggaacaactgtatgcccaagggcttaaaaacaaaatcctggttcttcccaagtcagagaggatgagatgaagggcaaagggtttagtacatctggggcgccttcctccacattagtcctttaatttcagaaacatactatttaccacccatcttggctccatgcacctctccccacattccccgagtgggaacacacgcgtgcacacacacacccatgcacatttcatacagacacagacctggggagatgataaaactgcgtgtaccactaataagactcaaatatgtgcacatcctgtgctcataggtactcgctcataggggcggatgggagcagaaagtgaaataccctcagggaggcatacagacaaccacactcaaggcacccccccttgggcacccagactacatcctcatttcatttgcacacaaatctatggccctaggggctccgtgcagatgcacaggaatagcggaataaagatatctctcgtggtggaatttcaagttgctaagaggtatgcaaaggtgtacaccggtgtggacccccccatcccccgcccagtctgcacgtgaacaggaacatgtacctgcacgtataccaggtacacgcagacagatgcgggccatccccagagccgccgacagaggtcgctgcgagacggtacccgcgccccacagtccacccgctcctcggagtccccccgcgccccggagtccacccgcgccccggagtccacccgcgcaggtccacttctccatccctgctctcgacctccgcccctgcggtgggggaagttcctggggcggtggctgggaccaggccgggttttaggcgggcgcagatttccgggctaactttcctcgccgtctcagcgcgggaagggggaaatgggaaacccgggccagagcagcggagcttcccagccgcacacttcctccctccagccgtttgtctcggcaggggagggcccaggcagccaagccggcaggcccactggttatccgaccttgtgctctggccgtgggtggagaccttacatccagctcagagcgcctcctcccatcccctgtgtcctctaggcctccccagactttgccttttagccttccagtgaaacaagttctgtatccaagatatacaattaagtggacaaagcagattgcaggtatgttttttcgtatgataccatttgtggggtgtgtgtgcgtatgtgtgtaagtgcacctgcacttttcacaactggtatctctgaggcatatgtaacaactgggggaggggctttttgtaaacatgtattaatttcctccgatccatcactaaagtgtactgaacagaaattgacgtgaagtagtttcactaatttatttacagtggctgcaccaccacagatgagtccttgtgcccccccataaataaatacatgcataaaataagacaagtaaggttcaaaatgacacaaatattttattcatgtgttcgtaaaagcaccttgaaaattaaaaaaaaaaaactgtaacgtaaagtctcagtaaaaatccagcgccagttatgcaaaagaagcttcgaagtatgccctcatcctcccttttccgctcagat

SEQ ID NO: 318085 - DNA, 4001 bp, Homo sapiens
tgcaggacaaagaggtcagcacatgagtagaacgccagaggccgggacgactcgcacaaaccaggggctttccagggactgtctcattcagtcctcacggaagtccccatgaggtgggtactgttagtacctctactgtacagatgtggaaattgaggcccaggtaggagttaggagcccttgagcccagatcctgtaaatcccgaaggccacgtccctgctgccacaatggccccacccctgggtggacacacaccatggatattcagccagcttcccttcagcgagcccagggttggcaggagggggtgcagggtgggtgtgagagggtgggggatgccttaccccagctgagaccttgtgcgggcagaatccgctcagcatcctctgggtcttctcgatggcactgcagcctgacacgttgatcagggattccagggctgcacagtactgtggggaggggacaccgaggggtcaggccctgcttgggcagctgccttttgtgagtctgcaggaagatggggctgagatgcctggcgcaggtgagtctgggtggtgggcgggaaggggccagattatggcgggagggaggagagcacttgaagcttgcttggaaccccagccatggaagggaggctcagagaagataagcccaaggcctggagcctctgccccatcctccctgcacccaaaggtccttaccatgccagctgtcaggttgatgctccataccatgctgccattgcagagcggagcctgtgggagcaaagtgacagtgagcagagtgctggcaggggttgtgggcctgccctggcagcccaggccaggtctgccccagcacaggccccacaagcatccctggtgtggcacagaggcaggcctggcagcccctcagcattcctgagcttcgttttctgctttgaacagcaggcataggggtgaggtcccactgtttagggtcttggagctgagagaaaaaaattgacaccactagtaagggacaagctgcatgcaaggcttgccatagtcagggcaggaggacaggggcctgcgggaagggccagggtggggacgagtgaagtaggagtggcctgggccactgttgaccaagacaaatcagatgggaggcggtggggatctggtgtattaaatgccctgccttctgatggtgagggaacactgcagttaggagcatggacactctggtgttggccaggcctggcttgaatccagcctctgtcacttaacctcactgaaccttagcagaatgggttcatcgtacctgcctcttgaggtggctggcagtgatgaaatgacacataaagcacgtgcaccaggcctggtgtaagcagtgctcagacatgtgagctgttactagtggggcaaggagcggactctactaaggaatcctcctgtaagggcgggcctatgatggtgctggggagaatggctgcattgttatggtcaaaatccagttggcaaatgccacatggttctgggagggtgctggcccttctctgctgtcctctgttcaggaatggctgagtaggagctggcagtggcagacaaggccaggccaggagagcaggtagtccctggggagtctgccagacacctccataggtccatccacagtgctgagccccccagcccagctcctctctccctcatggctgggccgggccttggtccatggagatttttcctgacctacaggcatcttaggaccaggcccagcctgctcatgacctcatcttgggaatcacccaccctggagccctcatagctaggaccctggctagccgacactcaccttctggttctgggtgatgttgaccagctcctcaatgagctccctgagggctgtagagggaggcacagggcctggggaggcaaagccgccaaggcaagtgagagcaatgaccgtggtcaacaaaagcgccatgaggcccagtgccaacaggagaggattgaggagcggatgcataggctgggtggcttgtggccttggcgtcttgtggcagcttttataggcccaagtggtgacgcctgacaccatggtctctgctttttcaggcactatctagaaaccacatctttactcatcttgattttactttgtggaaaatccagtgtcgcataaaggaaagagtttgatttctcatggacttattgagaagggtccagggcagagtttccaagatctgggtgggtttaattccagcggcaggcaaggggccctgagagcggcgtggcatttgcaatgctgccctgagttccagcagttttgcctgtgacaaccctgagtacctggacagctgacccaactctgagctcctgtcctcagacccttttgggtcaccagaagtgctgagcagatagtcttagtgcactgtggctgtgaccacagtctaccagctatgggaatttggggagttttattttttcgatgaaccagtctcttaaattacttaagtaacacttgcttggatacaaaattcaaacaggcaatagaagagtaaagttcacttcttttggcttgcctaattcctccttggccccactgtgagagggattgtcaaagttcagatttccaggtctccactgagagatccagaaagattcagaggtctttctgggagcttttttggtgtttttttgttttgttttgttttgtttttttggagatggggtctcactatgttgcctgcctaggctggcctccaactcccagactcaagcgatccccccacctcagcttccagagtggctggaagtagtgtgcacgtgtctggcccctttaatttaaagtgtatgggccatccttctgggaaactcttaactgggccaggctggcagccttagtccaggtcagagattgtaagtgttcctagtgccactggggcttggggtgatcccctttgctcaccagtctctgcaggatcaacccctgccgtctgggggcctcaaatttcccttctgcagaatgagtgctgtggagggcggctcctgggcttggcccctgcagccatgtcgccttttcctgctcttccctcgttttcctagaagtcctccagaaacccccacagcagaggccacggcatttgcctgttgggtgttgatgtcaagatttctcccctacccacttcctccccgaaccagcgcctccccaggccccctctctgcctgctcaggctccctccgtcctgtcctcgatggggctcaacctcctcacaagggtgtgcttgtgaccctcctcacaaggcatgctggattcccgctcagaggcatcccaggcttgcccaccctctcttcccacagggaacgtcattcccaccctctctgtccacactcgaagcttcccagcccagctgctggctctgactcccagaagtctgccccttcccctcgagggcccccagtgcctggagtgccgctacttggccgtgtgacccctctacgggcctgtttcctaatctgtagtagagggcccacggcatctcccacagggtctccgtgatgggggaaggagcggggaactaccttggtctgtgcaactcccggagccccgcccgggtgagtcaacgccccttatcccccatggccaccaaaagccctgccgggagcggtgggcaggggcgcccccgcgcgtgggagaaggcgctggcgcggcggttgcggcggcgatggcccgcggagataggggggtggccttatgtaacgggagatgggcccgataagcgggatctgcgcggccgggccctcctccgcggcctccggcggtggccggtccgggaggcaggggtgggcgcgcagaccggccagtctggaagctgcggaggctggcgagggggcggcaaaggtggcggtccgagcgccaggcagggcaagggccggctggacacccgggccagcggctccccgagcgccggtgcgcaccggcgaggggcgggagcggccgaggggccgaggcgcgcacgtgccgctccagcaccggccat

SEQ ID NO: 318086 - DNA, 4001 bp, Homo sapiens
ctgcctgcagcattctgcctcttcacctcctggacaccttcccacccctcgtgtcagctttagcatcgctttcttagggatgcctctggactttcttgggctctcataacccacacacctcttgcatgacttcaatcttaaagtttgtgtatacaattcttttatgtgtctgcccccaactcagcatggactccgtgggggcacgtgtcagtttccacacactgtcatatctcccgtgtctgcgtgatgcattcagtgaacactcactgagtaaatgaatggctgtccccatcgctgcccttctgtcatttatgtctaagaaggaagacagtgaacaagaagacaaacacccaagtctccctagcgacaagtccaggatgggcccattcagggtgtggctggagaagagtggggcctcctgcttagctgtgctgggacaatggcctgggaaacttttctggggaagggacatgtcaggtgaggcatggcaggcatgggctgagggagttgaagtcttgcaggtgtgggaggggtgggttgggggaagatgagagaggaggtttgaactggttaagaactttgctgtggccgggcgtggtggctcacacctgtaatgccagcactttgggaggccgaggcgggcagatcacaaagtcaggagatcgagaccatcctggctaacactgtgaaaccccgtctctactaaaaatacaaaaaaattagccgggtgtggtggcgggtgcctgtagtcccagctacttgggaggctgaggcaggagaatggcctgaacccgggaggcggagcttgcagtgagccgagatcacaccactgcactccagcctgggcgacagagcgagactcctctcaaaaaaaagaaaaaagaactttgctgaatcgaatggaatgttgattaagagtgggtgggaggaagaggggatgagatgaagctggggagatgggcaagttatgggctaaggatgtcctgtccgcctgcactgcccttctcccctgagccttccctcttccagccatcccccaagccctcctcacacacacacaccctcacccattgccatccacttctccctcccagcaccagagtatcaggaaagcctttggctcacaaggaagaggactcaggcccggcagaagccagactccccaggaatccagagagaagggacagtgcctgcgtgtgaggcagagctcccaggatggaggcacctctgactcctcttaaattgagataggctccatatgttccctgtatgcctcacctcacagccccacagccccatggcccatgcctgctttatccaggctacccagcaagtcttgaccctaggaaacaagtttcagcagagcccctcttggcagaggtatttgctggcacaaaatctgcaacagagattcaagtgctaaattcttcctttttggtcctagattctagtgcagaaaaaatgtctccctaacaataggctctctctttagagtttctcacagggcattcttaaactctggctctccactcggagaaacgtagaatagaatcaaagtccccctccctcactctccagatgggacactgagaaacagaaggacttgcccaaggtcacacagccaggacctcagaagccgggtctctttggaaaaaccccgataactgagtttgccgggatctccccagacgcctctggtctgaaaaggcttcagtgtgccccggctgagccccgttcaggagcctgcactgctggccatggctacagtgaccagtctctgtttctttctagtcctgggggagaagacagagaagttgcctctgcagattctaaaccaaacagaggcagccattaataaataggaaagaaaaactgacatatttgggctcttaaaaaggggtgggggtgcggcagggaagcgccacgtaccaggttgtgaggccagtccattccgccaagctgcaaggtcagcctgcagctgctgcccgcctggaaccccagatgccgccgagagaatggcagcaacaggatggagcgaagcaattatagctcaactgggggctgctgggggagtgagtgggtgggctcgtcatcagctgggagccttgggcccccagctggctgagcctagcgcagtggcaggcggtgaggggcgtgggggcaggccaggagccgagctgaggtgcccaggggctgttgaccgagggacaatgccctgtgtgtctggtggggctctggccggtggcacctccgcctgtggcctgcggccggccgcccagccagcacccacagggccagctaagacaatcagcttcgtttgcttaggggatggcaaggggttgagggtggaggagggatgggccgttggttggtcaggagagcaaatgttctcaaattgtgctggccaggagtgggacacaggccccatctcccagggaaacagcctcaggcactccagcctctgccggcctcaggtgagttcagcagccctaggagaccaaagccccacccctctagatcacagtcaaggaaactgaggctggagccagaaagggacttgtcactattaacagtgagttagaggtgtcagagctgctattctcaccctgtccccatccagggctctatccaccaccccatgttgtttttcttgggagactttccgcacaatttcagcctgctgtgaacatatttctgaagctgtacgccctcactctggccaagtttcagatccatgaggacttacggctgattgtcctggccttcctgacacagcactctccctcctggggtggtctccgctctcagagactgtgtggctgcatgtgagctttactgtcagcctcagttccctcctccataaaatggtgggtgtatccagaagtagacggtggcctggcccattccctcctgaaatctttctgagcctcagttcccacatctctagaatgggaagaatcatggcaccctcttaaaactgctataaggaataaaggaaatcacctatgttaaatagctggcaacagtacctggcacatagtaagtgctcaataaacacttagctatttattatagagattattataaaataattgtataattattataaacattagttgttctaattagcattagaggtagcatggttctcatttctctactgactctcccttcaaccccctcaggcccaccctcctggctgctgagagaggtctaggcctccaagattcaggccacaagtttgtgaggtcggatgacctcagggtccaaaggtcctggaatcacatgctcaactgaccacctcctctggccaatgtctctcacctcaggtgaacagcccagcccaatgtaagcgggcacatccacccagggaggcaggaatggcgggagggaatgtgaggaggacagaggaggggcattgtgaacagatactgaggacggccctgtcgtgctgagggccggtcttggccatttacaggaatcgtccgaggggaagaaggcagggtgagaggcgctcctgaatgtcacaagattaatctgtccggggcaggcttccacagcataactgagatgctggctggggctcgagcatgagagatgccaccatatttggtcaaatactagacagggctctattctaccgttggaaactccagagggaggggtactctgaaaatacctcctcaggcaacaagggccccgcccccaccgcaggctgtcccagccccagccccactggccgggcggcctggctgtgttctgtgctggctctctgcacacactctgctgctgctagcagtggggtcccacagacatgcaactggggtgaccctcccatatccacagaacagtggcaaactgaaagatggatgctggggtatgggggacccctgaaaccaacacattctccttacctgctggaaatacgcacccctcacttctgcctccccaagccaggactgacttgtcagcttcccctgctccagctgcagtgcttgcta

SEQ ID NO: 318087 - DNA, 4001 bp, Homo sapiens
agaaggtggcattaggtgagtccaggctgtaatggtgatgaccagctgaggagcaagccatgacgggcatcttgggggacagcttaccgtgggtgcggccgtggccaggggcagacatggcaggagattctgtggaaagagaccaaagcagatggtcagagattcccttggaaagggagtgggccctgctctcctccccagaggcagggcagggccaacacagggatcccaaaccctcaacagcttcacatactttaagaatgctctcaattgctgatgcgttctgtaaactcttgacagccctgttgaatgcctccaggtttggccttcgaaggttattttcctaacggggcagagaatacacttaagggggaaaggttacagagtatccctcccacaagcaggtggaagtcacccccacagtttcccaagcccactgttggggacatcctcgggttccctcctagtcccgttcttgcctcaggtgggtccctgcccaagggcacaggcctagaagtgagtggcaggcaggacctggtttcctcaagcccccagtctctggctccatttgagctacataaagggcctaggtgggctgggcgcagtggctcaagcctgtaatcccagcactttgggaggccgaggcaggcagataacctgaggtcgagttcaagaccagcctgaccaatatggtgaaaccccgtctctactaaaaatacaaaaatgggagtggtggtgcatgcctgtaatcctagctacttgggaggctgagacaggagaattgcttgaactcaggaggcagaggtagcagtgagctgagatcgtgccactgcactccagcctgggcaacagagtgagactcttgtctcaaaaaaaaaaaaaaaaatgggtggggagggggtacctaggtggatctttctgcacttgggggaaaaaatatctccaaaaagaagctctacaaaagacagggggttttccaagggaagtatttgtagctcagaggctgataacagtgttcatgccctgactgaattaaagtctcctagaaatcaagaagaaaatcacagagaccccagcatggaaatgggtgcagcatgtgagctgtgagtgccccaaacacagatggcccaggaactcagcaaaggcttccacttcttgtttgacccaagaaatgtcatgcaaaggtgagacagaacaactgcaaccaactggaaccatgaaaaataactgtaaatgataatgccacagccaatgagggtggaaaacacaaactcaattttttaagggaaaaagaagctggcacatctgagggggaaatttctgtctgtcagtccagagtctgccctaccaaacactgaccttaaggcccttggtattcctcacctagaactgccttttcattttctaatttaaaagtcattttcattattatagccatggctgtggccatgtattgaactcttaagtgccagatgctgggccagaacatgcacattgtgccatttgattgtcataacaatcccactgagataggtgctattaaccctattttacagatgaagaaagcaaggctaggtaagatggaatgacatggctgaagtcacccaggcaggaagtggatcgggatccacgggctgagctcttaccatcagaatgtcttggtcttccccattgaggttgttgaagtcctgtgggggtgaagggagagaaaggcccatgaggccttttggccttaggcagccaccacccctcactgctgcaggccagtcttatccaagctactcaccagcaaaggcaaaggtggctgctttaagtgtgttataatttcatcgatcatgttagagcagttaacccagcttgtcttcaagggcgttgtctgggtcatgggagcttggagtccggggcggaccaggagttggagcaggagcaggacgggcaggcggctcatgtttggatcggcaggaggcactctgtcttgttctggtccttcgtggggctctgaagagttggcaacagcctcccgccttatatgtgcagcagcaaggtgcccacaaccccgggcaaggcggggggaggtggtggtgtggggcaggcgtcggaaggatctttatctgacatggaacctccatagaaaaccacagacgtaattattcatccatgactttctagtactcaagatcagtgaaacaagaaaaaagattacttaaacggtatcacttcatcttgtcaaggaggatgagagatgggaagcatggcagcaggtgagaggacccctgtggcaggaaggggaagcctgactcagctcactgaggcctcctgcccagtgggatctcatctgccatcacctggactaccctggccctctgctgcccgccctgcttggtcctggtgggtggccaggaggccactggaacagatgagagtttgtctggtagccggtcacgctgctaaacatccacgttcagcctcaggctctgagaagcacatctcttggtgccgcttcccaatacagaattactggtgttccagtccccagtggtttgtcccatgggcttcgggcagcttctccttgacactttgtttctggtggatggccgagggcgctcaggccccaggtggccattctcttactggtctgctagcagtggcatggctgttccctgcgtgtgggactcagcctctgcaggaggcccggctgcagcccctggcagtccctctggtagcaccgagagctgagctcaggtacctgaggacactgtcactgggagctgggggaggggctggcctgggaggtttaggaggcagaattggcatggtctgaggggtgaggtcaagggaggagaaaggagagcaactccctggtttcagactgggcctcaggctgctggggcagggattggcaggagacagttgtattgagaggtcttgatccccgtctgtgctgagcatggatttgccaggtgcaggcccagtaggcaaggtttgcagagaggggatgtgagtggggacagaccatggggaaatccacaagggacctgagaaactgcagccagataggaagcaggaaacccagaagggcgggggtggttatcccagagggcagcccctgagagaagaggggtcctcctgatacgggcctgtcttggggcctgcctgacccaccccatggggtaggggcttttggtaaagggatgagtgtgacaggggcatgtggaagacttcttcaagatgactggccccgggtgggagggagaggagagcagtaaggaaaggccagggtctgggtcatggtgcggtgtgttgtgatcagtgtgggggatgcgggataggaggttatgctgaggcagcggaatttgggtgctttgggcttctgagcataagcagatcaggtgaagacaaggaccaggatgtggctgtggggaggcaggtgaagaggctgtgactcaaggccatgctgtgaggatgatttctgtagctgatatgccctcctggctcagccccaggctgggccctggaccaggaagagccctaggttctggacccggagtggagtctgacaggcacaactcaacacacagaggggagccttagcaccagcttgcgtactccgtaggcacaattcattcaacagacgtctacaaagcacttgctgtgaataaaacagacatggtaacctccactagcagctcagtcttgtgaggagacagatttccagtcttgctacccttcctgtggtcccagacctgcaggtcagccctgcccgggagcttgttagcggtgtcaaccctcaggccccagcccagactttctgaatcaaaaatcgcattttgataagatcctcagtgattcagtgcatttgaggggctctgatctaactacctcagcaatcttagctccggtagggtcccctattgccccacggacccagagtttgttccttgcatactcaactgtaccttggtgttactgtctatgtaaacgttttggggacttgtgcacaa

SEQ ID NO: 318088 - DNA, 4001 bp, Homo sapiens
atatattttaaattatctgagtgtcatggtgcacacctgtagtcctagctacacaggaggttgaggtgggacaatgcttgggcccaggagtttgaagctgcaatgagctatgatcacaccactgcactccagcctgggcagcagagtgagactgtctcaaataaaaaaataaaaaatggcaaagaagagggagtaacttctagggccagcactatggccataagttcaagcacctgcagactcataacactgagagggaggtagtcaagcgatgcactgctcagcctctctcagtgcctcagaattcctcaagacccacaggacttggtttatactttcactgatcaagtagaagggtgccctgttctcagtctcttttaaatgtttatttggagcttgcagtaatgataatagtcgcagtaataatggccttagatttacaagcactttcatgtatactatctccttagattcttgtcacccttcaggtaaatgagacagatatttttatattttctatttatatattttatatttatagttgcatattttatattttatttctttttttttttctggagacggggtctcactctgtgacccagactggagtgcagtggtgcagtctcggttcactgcaacctctgcctcgcgggttcaagtgattctcctgcctcagcctcccaagtagctgggactacaggtgcctgccaacaggcccaggtaatttttgtatttttagtagagacagagtttcgccatgttggccaggctggtctcaaacttctgacctcaggtgatccacctgcctcgacctcccaaagtggtgggattacaggtgtgagccactttgcccggcctgcatattttaaattttatttctatattatgttttaggttaaatcaaatgaaattgctatttttattaagtcaaaaacagttaaatcttggcaatttcagcctaataaaataatgacatccttactttttggatgaggatattgattatatatacattgcccaagatgagattgcgagctgtcagatgactacctccagtttcaaagtctataaatccatttgggttgtgggctgccttcatttaaagaacattctgagacagccagtagtgagactggcaaaagcactatcatgttggaacagtgacagcctgcaaagtgctaactacactatacaaattacatcctgtacttctaaaaatccgtgtagggtttgtattactcatctctagtttacggatatggaatctgaggccaagagatatcatgtaaattgtccaaaaataatagtttgtaagcagcataaatgagattcaaactcacgactgtcttattccaaacctggactctttccactaaaatcatgtggtagctattagtgatttactctctctcagctctcctgccatgaaataccagtacacacaaggattttcctctgaatcctctaggtctaattttctctagcctagagtttcctgaaagataaatccattatttcagatattttccccaatccttcacctctaacactcatgattctccattctgatctcagcattttaaaatattgcctgccaaaagattagattcccttaactatcaacaaccagttcaaggagaaattcacgtggtgggtctgacccataatttcactgaagaaaacagaaaaagacttttataaagtagaaaaagatgatcaaactatcactcttctaaatgaattagcactcaccttcatgtatcaggggatgttccacagatgttctgctggctcaaaggatttgcatcaaaggcaactccacctcccacagcacaagtcaggacaggaagaacaatctggactttaatttatccacactaagatgtgggagtgtttccactctgattgtctgcgagcttttcttgtgcttttaagcccagcccaagtcaaagtggcacttacccacttatgctgggaaatggattgcattattgttaactaaaaacaaaagcaaaaacaaaaacactcaactctacaaaaaaaaaggatcatctgaaagaccagaaacaactaaaagaagtgactaacttttaaattttctcttcaggaagtccttacaaatgtggtaatagctgaaacagtgagagtatctttagcttgaaatgagaaatacgcaatcatgttaactgtctttagacaatgaaggagatgaaggaaagaaaataatggtagctgactccaaaaagaggcttacaaattcttatttacgtctaaaggaaaacatactgaactgagaaaccagagcttcagtttagccactagtaataatcatcattaataatttgtggagctcttactgtgtgtcaggcatagtactaagaacttcacattaattatctcttttaatcttcacaacaatcctataacatcaggagtatttttattcccactttataggcaaggaaactgaggtcaaaacagtaagcaacatgtcctacatgggtggtggagccaagacttgaaccaaggcagcctgactctcagtttcctagcaatcaaaggttcaaattagattatttctaggatcccttctagtaccacaattttgcaaccgtttgtaatggactgacaaaaccacgagaaataaatagaccggggaagagattatgatgcaaaaggaaagaaaactaagttttaaaacaagctatgctttccagccccacattttaatttttaacccattccccatcttccttaggcaatgttccactaagtaggaggaataagggtgagaaagagagctagtcttttacctagaagattataattatgagatatttaaaattccagccaggcgtggtggctcacgcctgtaatcccagcactttgggaggctgaggcaggtggatcacctgatgtcaggagtttgagaccagcctgaccaacatggcaaaaccccatctctactaaaaatacaaaaaaattagtcaggcatggtggcaggcacctgtaatcccagctactcgggaggctgaggcaggagaatcgcttgaacccgggaggcagaggttgcagtgagccaagatcgtgccattgtactccaacctggcgacaagagtgaaactctgtctcaaaaaataaataaaataaaataaaataaaattccattataatatactatagagaaaagctaaatgctagcacaaaaatagcaagcatttcttgaatttattcaaccaatacttagtaaacacctattacatgcataacagctcactaaaggtgttgtgtattaaatagaattctggttaagacaagaccaattgagcatatacatttatctctactctctcaggaaactccacaaaaattatggcaaagatatagaaccacaagacaaaacaaatgggaagaggcaacagcaaataagagatgtcaacaaatctttggaaaaagagaaatgaatcaagccataactgaactggtaaagatgagaaagcagaaacctagaaatgcctaataaggttgccaacaataagcaaacataattatgccacggaatctcatacggctcaggatttgagacactaggtaggtaaaatcaaccctcattactcacagcttccttatttgtgaattcacctacttgctaggaattatttgtaaccccccaaatcaatactcacaatgttttgcggacattcacagacacatgccgtggtgaaaaacttgagttgcctgatgcacattcccagctgaggtggaacaagctgacactctgccttcctgtctcaattttcatactgcacacacatgtcttttcatggtctatttagtgccatgctggttattactatttttttttgcaattttttgccttttatgagtgattttgctgtttcgaatgccccccaagcagagtgctggagtgctgtctggtgttcctaagcagaaggaggctgtgcctcatggagaaaatatgtgtgttaaataagctc

SEQ ID NO: 318089 - DNA, 4001 bp, Homo sapiens
cccaagtcaaagtggcacttacccacttatgctgggaaatggattgcattattgttaactaaaaacaaaagcaaaaacaaaaacactcaactctacaaaaaaaaaggatcatctgaaagaccagaaacaactaaaagaagtgactaacttttaaattttctcttcaggaagtccttacaaatgtggtaatagctgaaacagtgagagtatctttagcttgaaatgagaaatacgcaatcatgttaactgtctttagacaatgaaggagatgaaggaaagaaaataatggtagctgactccaaaaagaggcttacaaattcttatttacgtctaaaggaaaacatactgaactgagaaaccagagcttcagtttagccactagtaataatcatcattaataatttgtggagctcttactgtgtgtcaggcatagtactaagaacttcacattaattatctcttttaatcttcacaacaatcctataacatcaggagtatttttattcccactttataggcaaggaaactgaggtcaaaacagtaagcaacatgtcctacatgggtggtggagccaagacttgaaccaaggcagcctgactctcagtttcctagcaatcaaaggttcaaattagattatttctaggatcccttctagtaccacaattttgcaaccgtttgtaatggactgacaaaaccacgagaaataaatagaccggggaagagattatgatgcaaaaggaaagaaaactaagttttaaaacaagctatgctttccagccccacattttaatttttaacccattccccatcttccttaggcaatgttccactaagtaggaggaataagggtgagaaagagagctagtcttttacctagaagattataattatgagatatttaaaattccagccaggcgtggtggctcacgcctgtaatcccagcactttgggaggctgaggcaggtggatcacctgatgtcaggagtttgagaccagcctgaccaacatggcaaaaccccatctctactaaaaatacaaaaaaattagtcaggcatggtggcaggcacctgtaatcccagctactcgggaggctgaggcaggagaatcgcttgaacccgggaggcagaggttgcagtgagccaagatcgtgccattgtactccaacctggcgacaagagtgaaactctgtctcaaaaaataaataaaataaaataaaataaaattccattataatatactatagagaaaagctaaatgctagcacaaaaatagcaagcatttcttgaatttattcaaccaatacttagtaaacacctattacatgcataacagctcactaaaggtgttgtgtattaaatagaattctggttaagacaagaccaattgagcatatacatttatctctactctctcaggaaactccacaaaaattatggcaaagatatagaaccacaagacaaaacaaatgggaagaggcaacagcaaataagagatgtcaacaaatctttggaaaaagagaaatgaatcaagccataactgaactggtaaagatgagaaagcagaaacctagaaatgcctaataaggttgccaacaataagcaaacataattatgccacggaatctcatacggctcaggatttgagacactaggtaggtaaaatcaaccctcattactcacagcttccttatttgtgaattcacctacttgctaggaattatttgtaaccccccaaatcaatactcacaatgttttgcggacattcacagacacatgccgtggtgaaaaacttgagttgcctgatgcacattcccagctgaggtggaacaagctgacactctgccttcctgtctcaattttcatactgcacacacatgtcttttcatggtctatttagtgccatgctggttattactatttttttttgcaattttttgccttttatgagtgattttgctgtttcgaatgccccccaagcagagtgctggagtgctgtctggtgttcctaagcagaaggaggctgtgcctcatggagaaaatatgtgtgttaaataagctctattcaggcatgagtcatagtactgttattagccatgagttcaatgttgatgaatcaacaatgtatattaaataaggtgtctttaaacagaaacacacacaaaacaaggttatgtattgattagctgacaaaaatgttgtgaccagaggctcacaggcacctaactctatatttcccccacagagaataattcagtattttctttttttctttttttttttcttctgagacagagtttcgctcttgttgcttaggctggagtgcaattgcgccatctcagctcaccgcaacctccacctcccgggttgaagtgattctcctgcctcaggccagcctcccatgtagctgggattacaggcatgcgccaccaagcccagctgattttgtatttttagtagagacggggtttctccatgttgttcaggctggtctcaaactcctgacctcaggtgatccacctgcctcggcctcccaaagtgctgggattacaggcatgagccaccacgctcagcagtattttctaattcagtgtttgtggcgattttattgaacataattgccaggaataatgaaggaataatgagaattgactatacctctgaaacaaaaatcataagattggttgaaaatctgaaaaagaaatagactacctaatcctaaccccacaaagccaaattcattaaatttctcccatcccaacagcagatggggggaaaaaacttgaaagaaaggcaatgcagaaagcagaatattttttaaaagaaatattagttaaaccttcatagaaaataagaaaaaatgttgtacccacaaaatatgaataggatgctatgataaaggcataattagagaacaagaactcttggagattcaaaatatgagagctgaagtctaaagactagaaaataaagttgaggaaatcttccagaagatagaagaaaagacaaagagatgaagaatagccaacatctgactaccagcagtacagaagcacagaacagaggaatggagggaaagaaataatgagagaagtgatacaataaaattcccaagaattgaggaacatttgtttccagattgaaagggcccactgtaaacagcataataaatgaaaataaatctacactgaagtacaaaacagtgaagtttcagaatatcaagaataaacagaaaaaaaatgtttccagataggaaaaaaataagtcacatacaaaggatcaaggatgagaatggctttagacttaataacaaaaccagaagttagaaagcaatggatcaattcctttataactctattggaaaattatttctcacctaggatgctctacccatccaaatgatccatcagaaagaaaggtaaaacaacgttcttgaaactgcattttccaacatgccaagtttcaagaactttatctcccatgtgaccattttcgagatgttattgaaaaaagtgactacaaaaacaagagcataagccaaaacaaaaaggaaaaatgggctcccaaaaacagcaaatttcaaatagaagagagagaattccaagaatggtggccaagggagatcccaagatgataagagtacaacaggcttggagagcaactagcccaagtgagtggcagacgccaggctcaaggagggatatttccaatgaaaaaatacatggaggggacccaatggatctgacagatgttgaaacttgaaaagttttgcagcactcttagaaagtttggagaaggatgagtaatcggctcagtaagttaaggaaaccaaaaaatggcataattattaattccaggaaaaagaaaatgttatataagaaaatatatttaaagtccaatatgtggctcagctatgaataactatagagtcacaacaatgaaaacattaatggatttaacaaaagttataactatattgaaagaatggggttaggaaaggatgca

SEQ ID NO: 318090 - DNA, 4001 bp, Homo sapiens
atctcggttggatggacttggagattttatacacacacacacacacacacacacacatatacatacacatatatacatacacacatatatatacacacacacatatatacacacacacacacacacacacacacacataaactgttgcccaggtgcagtggctaatcccagcactttgagaggccgaggtggacggattgcttgagcccagaagttcgagacaagcctgggcaaaatggcaagactccatctctacaaaaaaatacaaaaattagccaggcgtggtggtgcacacctgtcgtcccggctacttgggaggctgaggtaggaagatagcttgagcctgggaggtggaggctgctatgagctgaaatcgcaccactgcactccagcctgggtgacagaacaagaccctatctcaaaaaaaaaaaaaagtgtgtatttgcccttcagaatctcatcctgtatcggactcccgggataactaatgaaatgagatagtccagctaaaggcccgaagagcagtttccctcatgaagcaggatgggccctgttctatggtctgggtgctggagtgtgaccctgcccaacacacagggcttcactcctggccatatcatctccctagtttgcatggaaagcaggtagttaggagaccactgtgaaattgaggctttggggctttcattctcagccgtgtgtttccatgaaaacaggaactgaaatgcacaaaactattgatacggctgtagtcatgtgtttgtcagagaaaatgcactatcagctgtcaaatctatctcctcccactacagatagaggggtgggggtgaggcagcacaggaggcagagaggcgaggtgcccaggcagcccgaagcagggatgtgctggacgctgcccagcaggatggttccagaccgagctggaggggagttcggccggccagagcaagctgaggagctctggacggccagccccggaacccagagggctgttaggtggccaggctgtggaagaggaggggctctggcgataccttttctgttgccataggaagtctcttagacaaaatgaaagctccctcaacctgtcatctcaatatctgtttctgtgagagtatttggtttttcagaaatgtatgggccagaaaaattctctcattcaacaggcatttattgagtgcctcctacgttccaggcactatgccaaagctaagtaaaacccaagagggcttttctttgaccaggatctgagtcaggactacagcatgtaagctttctattacatgtcttctaaatcaagtgaaaccagaaagaccaaaacatgcttaagagtaaagatcagacttctcgttctttgaaaacatctaacaccttagagttaatttgggcccgctcgttttccattagacaagtttcttgttcagacatttggggatggatctccccatttgctaaaacagaccgtgggacggcttcttaccttggaggcagcaaagatgtctgttacggtcaactcggtgcacagagtcttggtccaggcagaaatgagagagcaagagacagagttaacctccaaccggacagagaagtccttgatgagcagctctcactccctccaactgaggaaacttcctacaaaccctcagaaaaaagagtggcaggggagaagcctcgctgtgtgccctggactgccaccaaccaccagttccaacttctctagcagctgttaacgttttcatgcctagaaatactgagagcatcaccagaacatctggagagatggtgccagataggtactcaccttctgctctgtgaggctgttcaaagttttgatgatctcctgtaaggtgatatcgcacttgtgtccgtggacaaagttgccggcacatgctagcaggaagaacagagggggaagcagttgggaggtgagacccattaataggtgtcgatttgcagtgacaatgtgaggcaattagtttatcaggagaagctaacgatgcaatgctgacaaagatatctctatatatagatttaaaattgctgaaaccgagggaaaatgagtttacattggaaattttcgttacaccagattgtcagtcacttggggccaatcagcacctctcttccaggagaaaaaatgcctcacaaacaggtaaaatgttcctgtgaaatcagaccaataggaaaatgaaacctttttaaaaaattaactacaaagtttcagcataggaaattacaccataatttgctctttagattaatcttatcagcttggggctgctgctggctttttgctttgcatagaagggagaggccacaggtgtccgaatttgttgtaatgcagtcctcctggggaaagatagagtaatatcaagaaagttttacttgaaaagtattttaacctggcttcttccaagtacaggtggcatcttggaaactgtcctgtcatggaaaagctgatctggggctccttctctgcatagaggcagaataacaggcagactctcctaccccagcactgggggacaatgttctcccaagtttaggtgttttgagaaggacaggtcgtatcaggtgaggcctagtttgggtcccagcaggtccataaggtccttacccataaggaagcccttggcaaggtaggtctattctgaggtttcaggaatgacttttttttttttttttctgagacagggtctcactctgtcacccaggctgaaatgcaatgttgtgatcagggatcactgcagcctcaacctcccaggctcaagtgatcctcccacctcagcccccctagcagtaggtgcgtgccaccgcaccatgcctggctcatttttatttttattttttgatagagataagagtctcactatgttgcctaggctcatctcaaattcctgggctcaagtgatcctcctacctcagtctcccaaagctctgagattacaggtgtgagccaccatgcctggccaggaatgcccactttttgaatggaacctaaacacatcctcagctaattaggaaaaagagctacagtcttaccaacttacaaatcagccctcctagtcagtgccccaccacccgccctgcttgttttttattgaattcatgtggacacaataaggtgctcattgcctcaccccagcagtgaacgtaaggaccccaccactcactcaggtgcctgggccctgtgcaaggccaccccacctcccagtaagggctcatgggcagcaggattcttgggccctgcctgccccctgcttttctcccagaaccttcccttcccttggtctctgaccttcttttccctatgaatttcttttttttttttttttttttgagatggaatcttgctctgtcacccaggctggagtgcagtggcgtgatcttagttcactgcaagctccgcctcctgggttcatgccgttctcctgcctcagcctccccgagtagctgggactacaggcacctgccaccacgcccggctaattttttgtatttttagtagagacggggtttcaccgtgttagccaggatggtctccatctcctgacctcgtgatccgcctgcctcggcctcccaaagtgctgggattacaggcgtgagccactgtgcctgggcctccctatgaatttattctggaagatcatctaaaaatgtgtgttgctaaggttttgcctctgttccacttccccgcccccccctcaccaccccctgcccccatactctgtcacccaggctggagtgcagtggtgatcatagcttactgtagccttgatctcctgggctcaaggcattctccagcctcagcttcccgagtagctgggattacaggcacatgccaccacgcctggctaatttctgtattttttttttttttttagtagagatggggtttcaccatgttggctaggctggtgtcgaactcctggcctcaaaatgatccacccacctcagcctcccaaagtgctgggattataggcgtgaaccaccatgcccgg

SEQ ID NO: 318091 - DNA, 4001 bp, Homo sapiens
cataaatactattaagttaacagacattttacagaatgttaagttaaataagaaaaaagtatatcaattttgcctggaggaaaatacttcaatgattctgatatctgaaatatattttaagaattttatgctttctggcaaagtgtcagtatgcctgaaatatttactttccctctgaagttaaattatactgaaaattaaggcctgactctttcttggccctcattctcactgcagtaaaatgtccttctcctccaaaatctttggctgcaacaaaccagtttagtctcaactttctattatccactcggtgttcattacaccaagaaactcttgcaggtagtctaggaattggtttactctccgtctttcttctccacactttttctgtgaaaaaagaaaaatgacaataggtattacaggaaactgtcaattccatagaaataggcacagccagacaaatatagcttccattgaatgtgtgtaacttactttttggccgtcaatgtatttctttattaaggacaagtttttgaatagtctttccacagtacccccttgcacagtttgactctccagtgtgcctattccctgaaagatttcttcagtgcacagttggtgctaaatgaggaaaatttttaaaatgcaaataatcaagacaaggtataaaaatttggtccattgtccattctgcaatgtatacatacttcaaaacatcatattgtacacaataaatatatatactttttaattcatcaattaaaaaataattattaaaacaattttggtccacaaagttaggctttgttttgtggtatttacatgagttcccttctccaaagagttttttgtttgttttctaggcaacaaaccaccacatattaagataaaattttcaaaaagtagatgaagcttatatgattactgaggagttttataaaggatataacttaattatgtaactggaaaaaaatgttttggaagtgtaatgcattatacattaaactcatatcaatgtgtttctacagttctagctggtagttttattctatttagactaataaaactatatattttacattttaatatgaccaggacatattcaaatgcatacaacaccatcatatagtcataattatttaagtatgcagaaattattaatatagggcatttgttatatattttaatgtctactgatcatggttctaaaaatataattctgagttgctaatactttcagaaacacgttagagtgagaaagagtcagaactgcacggagactagcacgcacctctcactcagtgtggaatccttctggaaagaatccctgacacgatgctctttgggaggcaaactaacaacatcaccaaagagcctaatccacttgtttaaaggattctacttgataaaaagtcattcctcatatttataagtacagacattcacagccacccatatgaaaacaaaatatagaaaattaaatagttccaatgataactaatgatttacagcttaaaacaggaaatttacttattcatgccatcattttactgaatcataatttaacttacatttttatgtacaggaacaggaatcctcagagtctggagaggaaaggaaatacaatcatttttacagcacaccagcattcataacttttaacagaatgtttgctggtgatgtagttatcacccatgtactaatgtgctcagaatcttattatttataacagatctctatatatagtaaaggaaccatcacaaatgattacctatgcactttacagactgtaggaatcataaagaaaattacctcattggctatcagcagagttcgatgagtagaaagcagtgccaaggtctctttcaccaatgcacttgtgggaatttctgtggggatggcatacacgtaggcagctccaagagctagcaaactcaaatgcagaagcatcctcatggctctgaaacgttctgcgtttgcctttggcaaagaaagtgcatagtacaagactgcgtccccagtcaatttattgtctgtctttgaggaaatgaataatttctaacaatcagatagagaatgcctaataatggcatatcgtgaaactaaatgtttccaatgccttatatcttaaaaaataaatttacttttatcttttaataataaaaatccctgtttcccccctttaaaaacattttctattacgaagaatctttgggttaatacatcattgccccacatttgcatttcttaaaatcagaaaattaacttcctcttaaaagatgtgtgcaaaacaaagtataaggtagaccactaaacagaattttatgctaaaatacataaatattgggaatgtttttttcagatcggctatgttctactatgactgtggctagattaatctgtcttaaaagaaattgaaaatactggtgggaagacagtgattgaaatggaaactgccaagccttggcagggtcgagttctgttcactggggtcttgattaggatcctttctgttgccagtgactaaaaacctaacctaaagttgttgaagataaagagggaaggtattggctcatagaaccaaacagtccaggaatggaggctcttttacattttgatggcttcagtgactcttccttgactccatccttgggcacctttcccattgaggtctcaagatgatgtccagactcctggatctatatgtattctgttcatgagcagcaggaaaaagcaagctgtgcttttctgattgtttaatcaaaagctttcaaattcagtctctttctgacaagggtcacatgttcatccttgaactgtgaccagggtgtagtatatactgattggctctccctggagctagaggtgaccctaatcctacctcaactgcatagcttagaaatgtggggtcccagtagtaagggggacacagattctaggaaggcaaccaataaatatctgtcacagatacacaatacatggatgtgtcctctcctttatgtcccataagggtggaggtgtcctttcacaccttgggcgggccatgaaattaggggaatcagcctttgttccttaggctcagacctgtaatcccagaaaggtacaaatgaggccccctcctagatcacacacttcctttttccctggcctgaacacatatgatggaggtgtatgtggctcattgtttttaatagagtgcttcagtgagcatcccagagtggctctatgttgcagcctagaagcctgacttcaggcctgtcttgagcgtcaagaacagatggtaccaaacacaaactgttgcccagaacagttttccaaagctaggtgcagttgtgtaggagaagtagaggcagctgggaggtagacacacctttcatacatactcaatcccagctctgcactggaaagataaagacagtcttggatttcagtggcggccttcttgtaccacgtttggttttgtttgtgctgaagttttggactcttggttagatgtgtctgatttgcgcacttgagaaatgttttccttgagaaatgtttccttgagactgcagaagtttggctcacttcagaaaatctatcgggagtgagattttcgggagtaggaatcacaataggcttggtcaaagtgctcttaaaatggtattctcagaaaagaagctgagttctggcaggagctttctcttcccagagaatatgagagcgttctctctgattccccctgacacctttatgttacactgaggaagttagggcttaggtgaaagtttcaggggaattgccaaataacttgttattttagtaccttaaatacacaaagttctgagtgcttaaattctatcataggaggctgggcaaggtggctcatgcttgtaatcccagcactttgggaggctgaagcagaaggattgcttgagcccaggagtttgagaccagcccaggcaacatagtgagactccatctctagaaaaaataaaaaattgggctaaacacagtggctc

SEQ ID NO: 318092 - DNA, 4001 bp, Homo sapiens
ttgctgtgtaaaataataaagcacaataggaacctcaactctgatcattctgcctttgcaatcaaagaaacggagaagctgtgagaacattccatgcttctctaggagccaagctgcaaatgtattagggccagagaattctgactcccattaaaatgagcagctctgaaaggagggagcggggaatccctccctgccactgtagaggatttatgggttgcccttaagttcccaaaccaaattgtggcactggggtttttatgagaaacgtgtcaacatgacaaaatgattcagagcacaggatttggagtcacacagatctagttttcagcgagactcctgtttccttctctataaaggggacattttaacacctacttcacatgtatttaactttcgccctaacactgaactgaagtgcaaagccttggaaacaaatttaaataaattgaaaatactgcaattcacaaataagagtgagaacaacatttttagttacgtaagactatattatattaaattaggtggcagcagtatttataataatctaaattgcctgtgagaaaattaaactggtattgtcaatacatacttaaaataagaaaaaaatcccactacagtctgtcctttttgacactttctccttcctgtaatttttttctttcactcaagattaaaaacaaacgttcaagattatccctaaagagaaatagttggaaagcacaatttaatagcaagttggttctataaatgtaatatttcagttcatagttcaaaaatacttccaaataggaattaacatgaatttaagaaattaacataatggcacacagctaaactgatgatctgagtccgtaatttcaaattaagagttgttccaacttgaagctggcagtcatacacagtttaaagggtttgtttacagcactgtcaaaagcaaataccacaatctttcagaaaattcaccctggcattctaataactagttattttaaggcagtataattgttgaaatacttcacaaactaagccaaaatgcgtttccttctgaaggcaaaaaaaaaaaaaaaaaaaaaaggtgacgtcttatttttaacctgtgattttttttttttttcagtttcggattatgaaataaaatgctgttcatccactgaagaacagacccttgcttcctgcactatcttcaaaagtttaggtcggaggaggtaaaattttaaaaactgatttgttctccttgggatacagtgagatgtggaattcgttaggaatgataattattaatagaaaagatcaaaagaaggaaagaaacgttaatagtgtttataagcattgtgaactttcaacaaagctgaaacgttacgatttcaagatgaaaaaacggctttggggaagggaaatccacctcgagaatgaagacaagtgcggagcgaatagaatttcaggggagatgaaaaggggattgggaaaaacgtgggatctggtaacaaaaaggggggtttgttcttgaagggcgttctgcggggcgggcgttaagaggggtgcgtgcgtgcgcctgggtgaagtttgtactcagggctgcgataatcgaggtgacaaagttgtggaagtagaattcggaggtccgggagcaggaaggggaaggaatgtggggatttccaggctgggctgacaagttccgggcgctgctctcagggggaagggaggtctcctcgagtgccagatagcccgtccgaaaccaccgacactctaactccagctacgcgacccagcacccggcccctcctcacctcaggccgcgccgcctcgaccctccgcgtctccacagcgcacgaaccccttggcgccaggctgggccagacccgtcggcctggcaggcgcggcccccggttcagctgcgccggggcggcccagcgcgactccgcgggccttttggctgctcgccccggctccggaacactgtcagatccttctccgcagaggtagcgcgccaccccagtcccgcggcggggcggggcgctccccaatcccgcccagctgcgcccccggccggccaacgctgcgccccgccccctaccgggacctaggcgctgattggcccctgagagaccctttgcgcccaggcattggtccagtggccgcctgtcgacgagggggcgggactccgaggggtagcgattcccgtaacgcggctcttcgcgtcccggattccggtggctgcgtccgcgtcgcctctcccagactagatcgaagggttccccccacctcccctctgtgggcggaaagagcggaatgttccatttttctgtggaataacggggtcatgaactggagcccgggtgctgcccgccgcccgctgcccccgccctcccttctcgccagggcgcctgcggcctctcttcgcggccttccccgagggactcagagccgcgagggaccgcctagctcccttggggatggggaaggcgtgggagcctcttggggaaagtgaagagctcggtggccgtgactccgcacgagactgcggcagattgtggcggcggcttctctccaagacttacgtaaacgagccttgccacagtacttttttaaattagtaaatgagtttgggtgcgattgatcagtgagccccagaggtggtggcccaccaagcgactagtgtttctttgcggtttgtacctccccgtttatgataaaaaataccgggtaaaaacctattcatcccgcctccgcccccccctttccctcagaaaatggacctcaaggctcatgatgtttgtttctccccaaaggaagatgagaatcttgagttaaaagataaggcatgtgcgtgcgtgcgtgtggggtgtgtgcgtgggtgtctgtaaaagtaaacacccaaaggtagaggtttttgtggaagaatgagaggatataggaaggaaataatggtttaatgaacttaaattatatccataaattaacaattataaagttcttcattatattgaggattcagatagagtaaaacatagatcgaattttaatctcttagttgttgatcagataatttataaaagggcaaagtgggcctgctaacggagtcgcaggcaaagtagatggtgctgcagctgatgtgttcagctcttgctcctccctgtcatcctatatctaacctatagattgtgaccagattctgttctagctttgccatttagaggggtgtttattttaaaacaaatttttataaaaatttgttaaattgaaaattttgtatagatccaggaaacttgatttttttgttgttgttcacagtctcactctgtcacccaggctggagtgcagtggctggatcatgctcaccgcacgttcaaattcctgggctctagcgatcctcccacctcaacctcccaagtatctcagactacaggtgcccctacaatacctggccaatttttaaaatttttggagagacaagattttggtatgctgacccggctggtcttgaactgctggcaacaaacgatcctccggccttagtggcctcccaaagtgctgagataacaggtgtgatgcaaagatgtatttaggggagatgtatagtggttaaatgtaccctctggttctagattgcctaggtttaaatgctgatgcctctatttctcatctctgtgaccttgggcaagtcttttcaaatttcttcatctgcaaaatgagaataacaataccaacctaacaggattgttgcaaggattaaatgagttaaaatacatacagtgtttggcacatagtaggtgctctgtaagtatcagctataatcattattgaatgtctactcggtcaacacttctgaaatattttagtatcacaacatatattaaaaatgatgatattttgctggacggggaagggcaggtacacagaagtggattgatatgtcacaacacaccagcctgccttggcaccattaggaaaacaaatgactgagttagtgcttttatgggtgtctttttattggctca

SEQ ID NO: 318093 - DNA, 4001 bp, Homo sapiens
ctctgtcaggtaggcaacttctctaagacatgtgttctaatatgtaaactcgtgctatgagcaatcactgaatggatatttacaaagaggtagcttagaacacagtaaggatttaatagggattagctatgagtataatattttctgagaaataagtaatgaaaaggtaaaataagaattctaattctgaaaatatacatgaaacatttgagcttctctttaaaaagtttatgtcaattgacggtgttataattactatggttttgaaattacatagagcttttgaataatgagttaatctattattctttaaatgctcaataattaatattattcatatttaaataggtatctagacatatttatccataaaaatttaaattgtgtggaatatgtatcataggcaagccagtgtcatctagaagtcttcttcctactgaatggagttagttgattaatagtgtaaatgatttggatttttaaaaagtatccctttcttctcttgatcatccttgtgatgatcagaaaattgacaactttcaacaagcagcaactgaatgtgaattcctataccccaaactgggaagtattttgacgtaatcatgtgaatagggtaattatacatcttctaaaaaatctgaaacttaaaaagttggagtgaaaacccagctttcaactagcattcttatatattttaaaaatagtatgatcaccagggtgaactagtgagtatagatgacatgaaagagagtaagatttatgtttcctgcctcccatcagtctttgtggaaatccaaggcaaagtttagcatagaataataatcatcccccataaagtgagtcatatactgtaaaaaatgtcaaactctctgacaattcccttaatgagaaaattctagggatttccatccttcgtaattacatgactcaaaatgcataagctgagtcattaggctgatgtgtttgatattgtctatagccaaatagtttttaactcttaaagagaaagggcttaatttgcaggagcaagttgatggtctaaattcccacatgcctcctgctgctgttagaagcttctgcctagttttgttataattacaatgtgtttatgtatgggcagggttggcttctcggtactaagttttttagatcccaaaaagaattattacatatggccaatttgttggtgtggaggcaattcagtgtatttcaatgagtaaactcatttagatctttctctagtcagttatttacttaaaatctcacataaatctctcaaaactaaagtattttgaaaacactttcaaaagttattggatgtctactatattctagccactgatttaggtgctgaggatatagcactggtcactgaagacaaagctattgcttctgtacattaccttatcctgaaagttatgctttcaggatttcttaaaaagtcaaacaaaatgaatccagtttgatctcctgacaaggtaaaattactttggacattttcctacaagtacagtcatagcatctacatgagcattctttttgtaagagcagagtaatcattcaacatttaagatctacacttgggagtgaaatgcattccttcttgagaatactgaggtcttataaaccacccatagtattgatcccctgccccctgtcatggtggttaaacattaaaaaaaatgactgaatatgtgggaaattctcaaactgcattcaaacccagtgcctgactcaggtctgttagggaactgaataacctgaaaccatgctacagataatccaaaatccataagaaaacttagaaatgactcaccattttgagcatagccactttctccagaaacgacttgaagtaaagaaaaaaccatgccaaaagttgtacctagaattgtcattctgagagagatagagagagagagtagatgtgtgagccagtgtgtatgaaatgaatgagagtaagaggaagggagggagggaggaagacagagaagcttagatctagggctttatacttatctaaccacagacaagggaagtataaacacagcaaaaaagaaggcaagttccagaaacaggaagtctgagtaaaagtattgctgctgtaagcagaggtcaaggacatgaagagacagagcctctgaaattattgttcctcctggatattccctgcagcccccacacttactgtgcttacatcagagtaaggcagtagattcacacctaggctcaagctatcttaggctagaggctactttatttttttaatttttatttttttgagacagagtcttgctttgttgcccaggctggagtacaatagcatgatctcggctcactgcaatttccacctcccaggttcaagcaattctcctgcctcagcctcctgagtagctaggactacaggcaaatgccactatgccagcctaatttttgtgttttcagtggagacggggtttcgccatgttggccaggcttgtctcgaactcctgacctcaagtgatctgcctgcctcagcctcccaaagtgctaggactacaggcatgagccaccgctcctgactaagggcccactttaaaagaatctgaagacaaaaattcaaacttacaaagtgaatcaattggttgtttggagtgagttttgatttaaagaaacagtctgcactatgtgaagtactttattgtgggtttattttaaatagcttacctccaacttccaagtttcacaagaatagcagtttttctcttttgttctctgtgtatccctggtatttactcatatcttacacaccacagtaggcattcaagaattatttgtttagggcaggggctggcaaactatgacctagggaacaattttttaaaaaattattcatttattttttctttttcaaaagatctttttttttcccaagtaagccttgggaccaaatttaatctaccacctgtttttgcaaataacgtttcattggaatacagcctcacccatttgtgtatcatctacagctgcttttatgcaacaatggcagagctaagtagatgagatagagattgtattgtacaaaaggtgtaaaatctttactatctgaccctttgtagaaaaagtctgctgacctcttgtttaaaggataaagtaggtactttcttagtgtatttaaaacaggattctatttgtgaaaatttgattgccacacaacttttcaggtacacatagtacatatgaactaaattagtgcctaggtatatggggcagaaatctgagaccatggcatagaaaattcagactcccccaaacctgaatgccagtcaaaagccttcctaatatggcctcatggttaaagtggtgatatttgtaaagcctgactgcttcttggtaactgttagatttttttttctttttcttgaaaaaaataatctaacctggattcaggccataaaactctatgcttgattcacagtggctctcttttggaaaaatgccacaagactgcagttataaggtgaggagtgcagagaaactaagtgatcagtgagttatgaacttctgttggattcactgtcattaggtagaattgctcccatgggcctgtgaaatggctaaaattagcagagacaagcaacaaccccccaggtgtaaagcaaatcgaagagactttaaaagactcatgatttagcttgtcccatcattacaattatttgacaataacgaagtaacaaaaaaaggaggtgggacatttgtaccagtctctggatcctccttttcagttttaagacagactccgtctgcaccagttataatgccacactttggagtataggctcaaggaatacttcggagcaagaatccaactgaaggggacatattccatcttctccatttgtcagggccttctctgggcatttcaaaacccttccaagccaaataaagagtgacaattttgtgcatcgataataatttatgccctcatttctaatcttgttttgaaagcttggttagaaaat

SEQ ID NO: 318094 - DNA, 4001 bp, Homo sapiens
tcactttaattctattgtttcagtggatctcactttaattatattacttctgattaaaattcttagatgtcttttatcaaccttgaactaccaattccaactttatcatccttttgtgttcaaacagggttggcatcaccattcacatagaaatcaccaacaggaacatatcacatatgaaaacaaacttactggacacttgttgttctttagtacttcaactgattttttcacccgactgaaaatcagtgggtatcttgtttgcatggtggtattggtcatctgagacagtctctcactgaagcatggtctggtgcagttgtcctggtaaatagtaaggatttattcaaagaaatattctgaggacagctttggaaatatatcacaaagagcaatataatagagatgatttttatttaatcaccattactcaaacttgcattatttttagacaggtcccttgccaatgtaggaagtgatctcccgtatttaaaggggatgccatttttccacagtgacatcccctggaggagacttcctgtatgttacatccaggaaacatgagggctctgggccctgaaatagtcggctctgaatgttcttttcaacgggtgcttcccggcttcaaggcttgtaagtctgaaagtgcagagtgaggaaaagccttttcacaccagctaatgggatgtgacaattgaatgcagctggtatttcagcagcagctaaaaacatggacggtactccaagggacaggggctgtgctgtctgcctggttcctgcccagaaggcactctatcctcttctcatctaatggatggaccgcgatgggtgcgatgtcttaccctagccagggcaagaagctcagattcttcagattctcccaggccttgcatgagaaagaataaagcactgcaccttggagaagtgcctcctcctcaccctaaccaggagtttgaattaggaatcagaactttcctgccacccatccttcctgccgtagtgggcagtggccctctggaagccctccttccactcacaacctcagatcctctacctgcccagagggcagcattcaaaccaacagtcactctaatcagctagacagacaacagggtggtggggaggaagggaggaggcagggagggggaggtatagcgcatagatcattcatgacagatgaaagataaggagttgtcattttatttacattgtttcacaactctagagttatcagtaaatgagttagaaagcaatatgatatgagctacagcaattattatatccttagttccagttttatttaattgtgcacatggccacctatctaaaaagatattcaggattctttttttaatgttgaaaagtgttcaaacttctcaagaggcataaagttaattaaatacaaagaaatgttcataatataggatttcaagatcgtagttttaaaagggaataatttgtaacaatgtggttttaacagggaatactaatctgtaacaattaaattaagcaacaatgtataacattaaatattaaataaagcaacttatttttacttaaaaacaaaccaaaaaaatccaaggtcaacattatgttatttcactatacttacagagggaatgcccaaacagagacaactggtcacctgcaagggaaatttcagagtgaagattccagatgtgaaaattaaaattaatttggaaagttcttaaagagcattcactcacattagcactgcagtggcacttggaagctggatcttcctaaagtagatagagagataagaacctttagtcagccccgagttttttcatcctcatacatatttcactttgtcagtagctgtctttcccatgggctccccctgcagcctacctgcatcttgttgatgaggaagttgatgtccaggatccccgccaaggttggacacccctggcctgccacggagcacaggagcagggcagaggtaaggaccatggccagaagcatcttgacagcggactggagctcgcttgcagacaccttcaaatcgagtggtatttaaagctccctctcaaacacggaaaaaccctgacatcaaactgataccaagagcccactttttctctgtaagttggggccactttatactaacaaacaaaaaaatcaaactgagtcacttgacagagatgatgctgtgccaggaaatatcattcctcagaaaagatgattttcaaaaagttgagtactgaaatgctgaaggaaaagttaaagatctaaaaaccaagaaaaaaaattcaaagacagggattctggttgtgagagttagaatactttccatgaacgcccaggtctgtattttccctttttacattatgggaaatgctgatataatatagccagtcatgggtgttctaacgaaggggggcctggggagacagagcgggttgggggagggtgcatgatattgcagaacttcacttatctctgttggggttttcctttagtaattgcaacctcagtcttactatgctttattcccaaatctcaatgtttttcatacccaggatgaagtttgccacctaatgcaaatgcatcttagaagtatccctttgtgcaagtgtctgaaagaagaaatgttcaactataagcacaagaatgcggcaaccatgcttgttaaaattggccttgaggactcctcagtatctttggagatcttatataacactgtatgacatcaagtaaaaacccagcacttgaaagagtatagtagctaacatttactgagaacttactacatactagtaacatttcttttttttttttttttttttttgagacagagtctccctctgtcaccaggctggagtgcggtggcacaatccaggttcgctgcaacctctgcctcccgggttcaagcgattctcctgcctcagcctcccgagtagctagaattacaggcaccctccaccacgcccggctaattttttgtatttttagtagagacgaggtttcactatgttggccaggctggtcttgaactcctgacctcgtgatccgcccgccttggcctcccaaagttctgggattacaggcatgagccactgggcctgaccatactagcaacatttctaagtactttacatgcattaagccatgtaatacactcggctgccaaatgaggtggggagtaatttgtcatcaccattttttaccctttaaaacactgtctacatcttagcttcctggcccttcagtatggctgtgtttaatcactatgagtcaaaaaagcaatctcagtgtaactctatgaagtactataattattcttattatcttacagatggagaaactgaggcatagagaggcaggtaatttgcccaaaaccacaaagccaggaagccgcagaatttgtattcaagcccagaagtctgcctcctgatttcagctcttaatcctcctgaactcctgtttttctgcagatcttttatctgcctctcccaccaggatatatactccagggctttatgggtccagttcacccctatattctcagcacttaaggaggtgcctggggaactgtgggcactcactaaatgcttgttgaattaaaacactaatttgaaaagtagttcttgaaatacgaacttcctacttctgggatttataagatttcaaatctgatttctaggatacatatttggaggtatgtgcaggtaagtaaatatagcttctacacagtagattgaaaaggtgaggggttctttagcttagcactctgaactataatagccagtggggacaaactcataagatttcctcgcctccactgtaagagtatggcaatactgttttttttcattttgtattgtttcttaggagtgatgatggctcgtcagtgttccactgcactatggggaagggagtgtcttggtggtaaacaaggtaaagagaaacaggtgttttgctaaattcccttaagccatcccacatctctgacttccatccctgctctttgcaga

SEQ ID NO: 318095 - DNA, 4001 bp, Homo sapiens
caccacataaaaatggcggctcacgcctgtaatccaacactttggaaggctgaggcgggtggatcacttagagtgcaggagttcaagaccagcctgggcaacatggagaaaccccatcactactaaaaaaacaaaaagttagctgggcatggtggggcacacctgtagtcccagctactcaggaggctgagatgggagaatcacctgagcccaggaggtcaaggctgcagtgagccacgatcgtgccactgcactccagcctgggtgacagagtgagaccctgtctcaaaaaaaaaaaaaaaaagtttcagtcagatatggaccacatatatacgacagtgatcccgtaagattttaatggagctttaaaattcctatcacatagtgacatcatagccatcctaagtcgtagtaaatcacattactcacacgttagtggtgatgctggtgtaaactaacctactgcactgccatttgtataaaagcagagcacatacaattaggtacagtacataacacttgaaagtgataataagcaactatgttactggtttatgcatttactacattatactttttttttttttttttttgagacggagcttcactcttgttgcccaggctggagtgcagtggtacgatcttggctcactgaaacctccatcgcccgggttcaagcaattctcctgcctcagcctcccaagtagctgggattacaggtgtgtgccaccacgcctggctaatttttgtatttttttagtagaaacagggtatcaccatgttggccaggctggtctcaatctcctgaccccgtgatccacccgccttggcctcccgaagtgctaagattacaggcgtgagccaccacgcccagcctactttttttaagagttacgatctctgtcacctgaggtagagagcaatgccggcatcataattcactacaacgttgaactcttgggctcaagcagtcattccacctcagcctcctgaatagttgagacttgggactacagggatgagccatcatgccatgctaatttttttactttttgtagagatggggtctggctatgttgccctggctgatttcaaaccccagacctcaagcaatcctcccacctcagcttccctaaaccctgggattacagaagtgagccaccaagccccactactatacttcttatcataattttacaatgtactactcctattaaaaaaaaaagttaactgtaaaacagcctcagacaggtccttcaggagataattcagaagaagtcattgctatcatagaagatgacagctccatgaatgttattgcccccgaagaccttccagtgagacaagatgtggaggtggaagacagagatattgatgatcctgaccttgtgtgtacctgagttaatgtgtgtgtttgcgtctgttttaaacaacgtagaactacacaatgtatttgtgttttaagctaagtgttactgcaacagagacaaaaagtttataaactaaaagttacaataagctaagattattgaagaaaaaaatttcttaataaatttattttagcctaagtgtacaataatgccctaggccttcactttcactcaccactcactcactgattcatccaaaccaatttccagtcctccaagctccattcgaggtaagtgccctgtacagatgtaccattttttacttctacactgtatttttacagtacctttctaagtttagacatgtttaaacacacaaatacttaccattttgtgacaactgcttacagtattcagtgcagtaacatgctgtacaggcttatagcctagatacaataagctatataccacatagcccaagtgtataataggctgtaccatctaggtttgttcatatgatgttcatagaacaacaaaattgcctaacgacccatttctcaggatgtatcccagccttaagcaactcgtgactgtatcttctatgacccagcagtttcacacctggtgctataatcacagaaacccctgcacaggcatataagaataaggagacaaaggactaggttgtctgcatgacctagttatctatattaacagagacttggagacaatacgtgaacatctttagtgaaatatgtataaaatgtatcttatcccttgtacaatttgttccctctggctggaaagctctggtctctagataaaagcatgtcttgctctttgacagcattccattctgctcaagttgtcctctatttaaagaggtctccactaactgccaatctaaaagggctcactcctcaaccaagaatctctatgttcccgatatccttaatttttctgcataatgctattaactatatgaatgctgttcatagcactatactgttaatagcttactgtactggaaacacttacattttaaactatatgatatgtgttggctgggtgcagtggctcatgcctgtaatcccaatactttagaaggccgaggcaggtggatcacctgaggtcaggagtttgagatcagcctgaccaacatactctactaaaaatacaaaattagccaggcatggtggcgcacgtctgtaatcccagctactcaggaggctgaggcagaagaatcacttgaacccagaaggcggaggtcgcagtgagccgagatggtgccactgcactccagcttggtcaataagagtgaaactctctctcaaagaaaaaaaaaaaaaaactaggcaggcgtgggcatggtagtgcatgcctgtaatcccagctactcggaaagctgcagcaggagaatcactcgaacttgggaggcagaggttgcggtgagacgagattgcaccattgcactttagcctgggctacgagtgaaattctgtctcagaaataaataaataaataatggctagttggagagttggaaataaaataattagatagttggagagttggaggaggggttacacataagttaataaggggaaagaattaagattttgggcttttccaactgattggtgcctgcatggctcataggaggaaaacaatgtcaggaaggttgaaatacacaacgtttttgacatgaatgtcaagtattttaagacaactacatatgtcagcgttgaagagagacctgtgctaaaaagccagatttgggagtcatcaaaatagaggcaatagttgaagtcacaaatgagaccattcatgaagagtgtgcattgaagtccttatttcctaaactacgtagtttggatttttatctgaaggttttcagaagagagcagggtagtgcctcagagtcaaacatctaaagtggtcagagaaaagagaaaaataaccaacaaaagactggctaaaacctaagaaggaaataaggaaaatatggtgtcccagaagtataagaagaaaatttcaagaacgaacaagtagttaaaatggcaaatgattaaacagattccattagatttagcaacaaagatatcaatggtgatcaccactacatcaaattcagtgactgctatggactgtcagccttcaaaataccaaaaaaaaaaaaaaaaaaaaaaaaaattaaccaataaggaggtgaagaaaatgaatatagagaattctttcaagaaacttaaaggaaataagctgggcatggtggcacacacaagtagtaccagctactcatgagattgaagtggcaggatcacttgagccctgaagtttgaggccagcctaggtaacaagagaccttgtctcttaaaaaaaggagaaaaaaaaaaactaagaaaaataattatagataaagctgaagaggaatctaagaatctaaggtaaggagcgtatatttcagataagacttgatttgaggccaggcacggtggctcacccatataattccaatacacttcaggaggccaaggccagtggatcgcttgaacccaggagtttgagacaagcctgggcaatgtggcaaaaccccatctctacaaaaaaaaattcaaaaattagccaagcatg

SEQ ID NO: 318096 - DNA, 4001 bp, Homo sapiens
aacttgttaaaattgcagattttgattcagcagctctggattgagcctgagatcatgcatttctaataaactcccaggtgatgctatataccacaatttgagtagcaagggtaaagaacactgatgcaacttaagctctacaaagcttataactgtggacttatctgtaataagtctgatagtcagcaaaccaaacacactacagactcacaccagcactaaatgtgttttgccattccttaaacgctctgaaattaacagtccctatttgaagctgataaagaaaggaaaaaatattaccatcaataacactaaattagaagtgaggttacatacatacacacacacaggtacaaatatataacacaaaggtcaaaatccaaataatcaaacattaccttacccaaaatttgaatatttttattgctgagaaaaaaaaattttgtttctggaaaaatcttcagtgtattttaatagccacatgcctacaaggatcatgctgcattctggtttgattccaaatgcaaatatattcaaacatcacaaaatctaaaaattgttctattaatgatcagataatctttacatatttgtttaaaacctctaacattaccacagccaaatgtgtttgtggtgaaaattctctttggccttagaagttcaactagggcggagaccaccctcctaccctgagactataatatatggccacaagccactactataattaattgtttctactataccctgtgctaggttactgcagaaacagagaaaataccagtcccatcataaccaaaagggaaaatgtttctactttcaccgaaattttcctcagtgatgaaagatgtaatatgtgtcatgcaatggatgtctcctatagaagagtcaccctgcccttaatctgaagctcctctactgaacagagaagtttgaaataacatgaaaatggaggaagaaaattcctatcccaggagggggaaaagcattatggctacaaactattcttccttctgaagaataaccgaaatctgaagggcactaccgcgctacaactgagctcgtttaaattatggaggggaggaggtatgtcaactgcaaccttggcactagtaggtaatttaccagtccttgctatttagtcaaatcactttcagatagtacttctctcattcaccaacatgtcacaaaataataaagaaaaaatgacacacgtaataagcaaaagtagttttgctgaatcacaaatacccccaaatataaatctacaggagtcgctgagcttgagaattggcggccatacctctccatgaagctcctctctataaacggacaactaccttcactttttcattaaaagcatgtaagggtctaatgtttaaagctatcacactattgctattagcaacaaggtcgcgtgcgcagtaacaatgcacaacggtcttatactcgagataaccactttatctcaaaatttgcaccacctatcccccaagggcaaatgcatcacccaggtccgcaaccgcggtcacgatgggtacactcgcctctgctcagcctagcatacggtccctcccaccccgcaccctgattgctccactaccatgctgcccactcccgggctgcctcggccagcccccagttccccgggttcctaaggttgcgcaaacagccaagtctgcaggccgcccttgcctcgctaccgttatccctcatctcctggtagccccactttcctcccgcctctcgggactcgggtgcccaacccactcccttccactcccgcgcgctcggtggctctcgggccggggcctcaccgtttggttcggtcgggaattgcccggccctcccgctcccacttcccaacacgaagtggcgtcggttggtccctctccccacgctgccagaccccacgccgccgcctactgatgccgaaagcggcttctaggaacacgccatgtttggcgtcgcagctccaaacgacgcggacgcgcgaaaactacgtcacaggagaccagcgcgcatgcgaccggcagagagagaaggcgataggcgaacggcgggaaggggaaggaggggctttgtctttgaaccaaaaggcgcggggtatccaaatcagttgtgtgcgcttgcgcagtgcgcttgcgcagtataaagagccaggagtccggactagccggatctgtcaccatggaaaccataggtctggtttctccgactcccagggagctcaattgtttcctgcgttgattgaagcttcaatcagaaccatttcacgctttatattctagatatcaatagcggatccgtcacagcagagaagagttatttaaagaatcttactcccatcagtccaccctccctcccgcaaatatttattttttaagttacccaaattgcttggcgcttactcctgagtaatagcaagagtggaaaaatgtaaaaggacataaatccagttctgcttgcctctgctaaaagctagcatagtcacctaaattttcttatccttaaaaagagaacttactcaggcgcagtggcgcgcgcctgtagtcccagctactccagatatggaggcaggaggatcacttgagcccaggaattcgaagccaacctgggacatatagagagttcacacacacacacacacacacacacacacacccatttcaaaaataataaggggtgggcacagtagctcacacctgtaatcccggcactttgggaggctgaggcggccggaccacgaagtccgaagttcgagaccagcctggccaacatgatgaaaccctgtctctactaaaaatacagtaattagcctggcgcggtggcgggcgcctgtaatcccagctactcaggaggctgaggcaggggaatcgcttgaaccctggaggcagaggttgcagtgagccaagattgctccactgcactccagcctgggcaacagagcgagactccgtctcaaaataaataaacaaataaataaataaataaataaatagactccgtctcaaaataaataaattaattaaaaatacacaccaactatatatttcttaaaaataataatagtaaggccaggcacagtggctcacgcctgtaatcccagcactttgggaggccgaggcgggcagatcaccttaggtcaggagttcgagaccagcttgaccaacaaggagaaaccccatctctactaaaaatataaaaaattagctgggcatgatggtgcacccctgtaatcccagctactcgggaggctgaggtaggagaatcgcttgaaccctgggggcaaaggttgcagtgaggcgagatcgcgccattgcactccagcctgggcaataagagcaaaactccgtctcaaaataataataataatagtaaaagaagttgtaaggaaatagagtgttcaaaaatattaataatagaaaacctttattgctaatttagaatattccaggtacagttttaagatctttatgggaattatctattttaatcctcagaacaacccttatgaggtaggtattttctttatgtccacttcacagatgaagaaactgaagcacagagaagtcaagtagcccacctaacgtcaaacagctagtaaaaggccatgttaggatttgaaccaagctctgcattccaagaatgtcgatcacacaagggctgttttttaaagtaaaaagataaaattacctaaacaaccaccaatgacacaaatgattaaatcacaatacatccatacataataaaatacaaattgaccatttaaaattatgttgaggtcgggcacagtggctcacacctgtaatcacagcactttgggagaccaagacggacaggtcacctgaggtcaggagttcaagaccagcttggccaacatggtgaaaccctgtctctactgaaactacaaaaattagcctggcgtggtggcatgcgcttgtaatcccagctactcaggagactgagacagaagaatcgcttgaggccgggaggcggag

SEQ ID NO: 318097 - DNA, 4001 bp, Homo sapiens
tgaattctacaatagcaaggaccttatctgtcttgagaggcatctaacacaatggttgaaagcacacacacacacacacacacacacactccagagctcgacgcctgagactgaaccaaagctctgccacttaccagttacgtgccccttgggtaactgaattaatctgagtctgtttcctaatctacaaaatgggataataatagaactgcttccaagggctaataggagaaaagcactagaacagtgcctggcatatagtaggtacctttcatggtagctattgtagtttttactgctcaccaccatatcccagaccatgccccgccaatatgattcactgttcacacctgaccttcagcagtatttgtttagttcagcactgtttagccatacagacttccttgcgcaggaagtatgccagcattttgactatcaaacatgccttcttctcccatcccagtctgttgcaccccctgaacaaatccactcctcctgctaaacacatcctattgccttacactagatacactcttaaatggcatttagtaggggctatgtaaatatttacatatgttcaggagagccaggtttctgctataatgagactcccactctactgataatgccaatggcaaacaattgcagctcacatttacttagcacatggactagcacttagcaggtacttggcacttatatgaatgtattctcacactaatctgatgagattgatatcactcccctttaatagagaaggaagaagaggctcagagagttaagtaatttgctcaagattacacagctagtaagcggctgagctgtgatttaaattcaggttgtcacctctgcaggacacctctctgccactctgctctgacaaatcacttaagattaatagggtgaacagggcttaagctcacttcctaggaatgctctcttcttaagcagaagccttaggtgaaaccttttctaaaactaaaatgagccaattcagatcttgataaactatgctttcccaaagccaggtgtgcctgtgctttaagacagatgaaggtgaacatactcttcaggactggctgaagaggctgtggtcactttcggaagtgtctgtgggggtacagctgtgttcactggaccttggatctccaaaaatctggcttctaacttggttctgcaactgtattcatcttcattactttggggtacaacaatctctctgggccacaatttcctctatcagaaaactgggtacaatacttgctacctcacagagaagtcatgagaatgaaaacagatgctaaatgtgaaatcacccaggaaaaaagcacccagcatgcaacaggtcctcaagaaacaattgttaacaaaatgaaattaaaaggaggtaggcaagtggccaccagtttaaagcgtaatgctaccaaggatttatcacactgttctccacagagcagcgtggctacactgatctgaacatatgagatccaatgtcttccaggtggagactactgtgggatgtgacaccctgcaggaaaataagctgaccaaagggccttggagaactgagctcaaaaatgggactctgccaacctgccttccctagaacttgctacaggggagactgagctgtcatgtctgtttgcagtgcaaagcaccttcagttttacaagataaccatgagctggggtgcagaggtaaagtaaagaagaaagaaccgaaagtactcagcagaagtttcctggcacatcaacagtcatctgaggcttacgcatacattttggtctaaataacaacttaagacttgatgaagcagattctccttcctgggtttgtctacactgtgcacatgctctaaccacaaaataatcactgttcttgcacttttaacacgtctttgccccaacgtaggcaggaaaatgaaagcaacaagcttaataagatcattgtaaacttacttaaattgccacaactccttcctacacttgacttccctcttctaagccccaagcaagtattcaatatggaattgttaaataatggacattccagaacaccaagagaatgccataaagccagcccatatttcaacatagaagaaacaaaactggcaaaagctgtatccagtatgaatttccttccttctcttcctccccttaaactacagttatcttatgtccaaagttaaccctttcttggaggtggtgaatgagggagagttacacagactgattcctctacagcctaaaggatcaaaagagaatagctcgcagcaggtagtgtgaagtaatagcacagtgaaaaattcaactgtgaggaatgtcatcttaataccatatttgcagtgctttcttcctctagctatgtcctttgtccagcccttattgatttcccccacctccactaccagctgtaccaaggaagtgacaaacagggactcactagatgccgtcaatcattgtcaccaagaagagaaaaaaagaatccaacatatgttcttgcaaatgcctcccactctccactcccacctcttcctcttcactgacacacagtctttataagcagtaggccactttttaatatccctcgagtgaaaacgtttgaggcacagataggaggagcatcccaagcaccattctttcctgacatgtgtgtccgtagttacagttcacagtgcaagcggcaagaccaaggcagtgttgcccaccaatgagttactgccaatcctgactacagagagcagaagggctgctgatgattaaaccaatgctgctcttgtgccaggcgtgacagaggaacagaaagatgtacaatacaggtagcagatggtactctctgcaactcattctgacgacataacaggagtttcctatttgtctgctgaccaccatgacgcctggtatatcaattcctatggcaacagctctaagtatagtgcactacaaataaaaagtggtgtattgttttgtttttttgaaatggagtcccactctgtccctcaggctggagtgctgtggcatgatctcagctcactgcaacctctgcctcccaggttcgaggattctcctgcctcagcctccggaatagctgagattacaggcacacgccaccacacctgaccaatttttgtatttttagtagagatggggtttcaccacgttggctaggctggttttgaactcccgacctcaagtgatctgcccacctcggcctcccaaagtgctgggattacaggtgtgagccaacacacccggccaaaaaggggtgtattaaatggatatagacacctgtgttcatttctggaaataaagcaagaggtaaaatgtggccacttccatcacatgctataggagaatttttctctggctcaataattccctattgggcatctgttctggcttaagaaaaagaaaatcaacaaagaccaatgatacgcatgtaaccacaatgatattaaaaataaaaaactcagatgtctgatgacaggagagagtgtgaagtaataactgattatataaatggaatactatacagccattaatatttatgacaaattagcaaaatggaggaaagttgaaatagtaaagtgagtaaaacagtaacacaaaagtacatgcactttttgtcatgtgtgtcaacatgtgaaaaaacctgggtaaaaagtcacaaagattgcttcaagtattttccaaatctcagtttggccctacaaagacagatagcaatgaagtggattcacacctagtaaaatggatggaactttcaaagcctagtaaaaaaaactaaggaacagaatgagatagccataccatttgcataaattaaaaatacttacacacaaaacaagatccattgcaagaatacacacaaatctaaatgatacattgtatacatatcagaatgttgcctatgggagggagggaaccagggataaaaggaaataacttttaggggtccagcacaaaccagagtccaccatgtgcccagagatactgtgtacc

SEQ ID NO: 318098 - DNA, 4001 bp, Homo sapiens
aggagcaaagtttctaaagtcctcaaaggattcccttcatcaatagcttcattgatgtaccctacagctacaactcctagaaaatgaagaagtagttttccttttaagtcacagtacattataacttctttagtatcaccgattgcaaaaggctaattaactagtacagcaaggctataggatgcaagatgcaagcacaaaaccaattatgtgtctatacgctcataataagcaatctgaaaataaaattaagaacacattcaattcataagactgcaactacaaatacattataattataaataaatatttagacataatttaatgaaagaaacataagacatgtacactgaaaactatacaacaccatgggaaaaaacttaaagacaaataaatgaaaagagccaatgttcatgaattggaagatttagtattgttaagatggaaatacttcttaaattgacctacagattcaatgcaacttctatcaaggtcccagctgctggtttttatttttattttttttttttgagagattcttgctctgtcccccaggctggagtgctgtggcatgatcttggctcactgccacctccgcctcctgtgttcaagtgattcttgtgcctcagcctcctgagtagctctctacattctgaccaacacttgttattgtctttttcattacagccatcctagtgggtgtgaagtggtatcatactgtggtttggatttgtatttttctagtgactaatgattttgagcatcttttcatgtgtttattttccctttgtacatcatctttaaagaaatgaagtgtctattcaagtcccagctacttgggaggctgaggtaggagaatcacttgaatccaggaggcagaggttgcagtgagccaagattgcaccactgcactctagcctgggtgacagagtaagactctgttccccccaccaaaaaaaaaaaaaaaaaaaaaaaaaaaaatatatatatatatatatatatatatatatatatatatagagagagagagagagagagagagagaaagagagaacaagactgactatagggttcacaaatgaaaagcacagaagtcaaactatgaaacctgcttttacaattctaatgaaacggatctatctggaggttacttctcaataccttattattaaaaaataaactatcatccattcataaaaaaatgcatttagatagacatgcacacacagacacacacacacacacacacacacatatatatataaaacacacatatacacacactgccaaggagcttttgcttcctaggttagtactgatggataagaactgttaaagaaactagatattaatgaacaataagcttagaatataagcatttttaaggtcaaacttcatatttctcattttttccattagatttaatctaaaatgatcacccgtcacttcacaactgtgatatgccatgaaatagaatgagtacttctcatttttaaaaaaagtatctccagcttgacattcaagtaaagataaaatatttagctaaatatttcttgaatagatgagcccataaccaccacttcgttaagaatgaaaagatttacctgtaagaagaatgaaaccatctaaaactcctagaaatcattccagactataatacttaaatatgtttgaagaaaaagcagaagtatttctctaatgtgcaggttatattatctgtaaacattgacagaactctggaaagtctaagtattatctatatacaaggtactgtcgttttaccctataggatttataaactggagtgcatggaatatttagtgccattctctggtcaccccccttgggtaagctgttctaaatacctttaaaacaccccatccaaaaatggtcttaacagaaccaaggccgatcacctggaagtgagtgcatttcagctgacttgattgaaatcacctgctaaagttgctgtctgctgcgtttctaagaatacaagctgctgaggtcatagtgaatgacatcataggagctgaaagattacccagaagccctctgggaacatatgcatcacttcctctgtttataaataaaagggaaatcctatttgaagaaagattgctgagcttcactcagcccacggtccacttctttacatcaacacatgttactataacattctagtccacaagagagtgggcgttcttttagagttcatgtatttgaggcagcagatgaggtaacctacacagaattgtacctaccaaatttaaagagcaaaaactcaaagaagaaaacttcctgatgtaggctataaggttaaaataatgctcctttatggttctactgggaaaagtaaacttttcagtaagaaatcaacagagcctgaggaaatgcattcagcagctagcttctccattaaattcaccttctatatttctcattttccattagctgcttacctcacccacatcacaactcagatatggaattagatctcagagcatgtggcaagaataaggtggggaggcaagagtaatgcaccttcaaaacgtccatgaaaaattctcagctcctcagatgacttaattactatactgagcaattcctgcctggttacaatggtgtattttagaaattttagattttgaagaattgcctaaacatgatatcaaactcaatacttcaggaactcattctgacaaaagaaaaaaataaaaccaagacacagataaattaaatactctgtattaaagttcccaaattccagaaaggaaatattagtgtctgaaataccttttctggttatggtatatgtcctttatgacaagatacttaacagaagtgttatagtggctgtgtgaaatgtcctagggagaataacttagtagtgctgttaccttgatagataaaagccacagcaatcaaatgagatttttgcttaaaaataatatctacttacaaaagactattttctaagttatgcaaatgttacttgctttttttccccccagtaaccaactaaagcaaaggctgtacttgatagccaagaacaaaactggcattttccccctgttaatcaatgtcaaccctacaatctttcagcactgagaactaacataccttcatttgtgtaagcagcacatacagaaataaccaaagcagaactgaagcatgggtattgccaagaattggggaaaaagttagaaagcaaagatgggacgtgagtctttgttttgcctaccaaaagaaaggagtcctacttcttgggtggcagttgctgtagcaaccaaaccactgctaaaggagattcagagcattaagacggaggttgtggagaagggcagaagcctgggggactgagctctgtagcgggacactaggagcagtggtggtcccccaacccccacctgatgatgttgaacatctgctcaaattagagcttgcgtcttgactaacgtctggcaagaaccataaactcccaagccaagtatcagaaaagagctaagtggggtgtgagcaagccgtctcaccgcagagactttaaatgcttcactgaaaggaaatgcagaggcaacagggaagctgtgccgtctcgaaagaaatttagatttgtgcacaacttgaaaaggacaaaatgaaagtgtccagggatcagtgtaacagtggtacatccatggtaccgtatatagggtagcacacctggatcctgttttatagtaggggcttaaagtgagaatatgtttaaaaaacaagaaccaaaactggccttgacttttggcccagcactcacaggaaacagcaaagaaaaagaagaaaactttgcaaatgcaattaattaacaaagtcatatgttttatttcaagagtgatcttagtattcctaagttaaatacagcattagaagaccagacctaagaccttacccaaacacactaaaataaaacataataaactgtgagagaagtatctgcccactctatccgcgagcttggagcaaatgag

SEQ ID NO: 318099 - DNA, 4001 bp, Homo sapiens
acacagatttattccgtgaaaatcaagcagcatcacagatgcacatgcagggactgacagaaatgctgcattcatgtaccacattcacggaaattttgcactatttattgctcatgagggccgacatcaatcatgtgatagcaagaaatcatttgttcatgtagattcacctagtttgcagaagtttgtggttatcttatcatttgacacagtgaagccaccatatattctgagagctggtcacattaaagtacttccaccaacctgaggttggcactgcaaacactgaatgagcacagcattcctccttgaacccaacgggctctgctgtatctgtggtttaccaaaaggcaaaaagctgggtcccacctgaggttggcactgcaaacactgaatgagcacagcgttccctcttgaacccaagaggctctgctgtctgtgtggtttaccaaaaggcaaaaagctgggtctcagtcaactgctgaatgcattagagtacagaggctgtagtcctcaggcctccccctcactgcaagggtaacacaggaaagataacctcccatctttgacacgccagcggggaggaggggaaagaacctacacaagttgaggagccctttttcagttaagcaagtcagtggccttacgcaccatccaaaaccacacacacacacaaacaaaacaccctgctgaaggtatcaccaccttaacccaaacctggtacctctgccaccaaggccagcctgggcaaagattaacctgtggtcttcggccttgggttcactgacagggccaccttggagagacagcaggccaactttctgtttgttttaaaggaaatgcttcctggcacatgtttaggactctgaactctgcacatgaagccacgtggttggtgttaatctggctccatccactcacgatcggccaaagcaacctatttccgagggcagcccctggctgggtaatcgacaccatctcgttcaagtcacgcgggctcccgccggattccccggagcctagtgccgcgtcctctccacacagcaatcctcccgcgcgaggggagcgggggggaaaggggttggggggtttcagaggggagggacttacacctgtgaggccaatggctctagcgggtcaggtgaagttcgagggcgcgggacaggaggagactcccgcccttccagtcaagccggctttgcactagcagagtgcgccggcgccctacttgcggtgcccacctgtagccacagcaaacaaactttcctccccttctgggttggaagaatccggtgccttacgccaccccctggcccaagccggcggcgacccggagctccgcggactcctcacctgatacccctaaaatcccaacctggtctgtcccagagcgcaatccccgcactgcccgcgcaccccgtttgggtatgcggagtggagggtctgggttgccagctggatattaggaattggggggcgggaggagcggggggacgcgattcactgccctttgcaactccagctcccaactttgccagccgcgcagttgctgccttccaatttcctctgcgccgcgcaaccggctccctcggcttctccaacgccgtcctcggggagggagctccccaaggccagcaggaaccccgcgcgcccggcgcacttacagccatagcggggtctctgcagcgacggcagctcttcgtgtggcatcctgcgcgtctccgggggcccgcccggggcgcgccccccgcggctaccctcgctggccaggctcgcgggctctgcgccccgccggcgcgctcggatcccgcctctcgccgatttcccctagccgcccgaagatctgcgacccactccctcggtgctctctcgccagagccagccacggccgccgcgcgctgacactgaagtaaaagtgaactctcctccctcgctccctggccggtcgccgccgcctcccgcagcaggtttcctttctcctccagccaggccccgttattcaccgcggtgggagcgcgcgccgagacgcagcgacccctaccgcgtgtcgggcgcagcgcccaggccgcgtggacccgccccttctcccccgggggagagggaaggggccgagagggacgctgggccgggaccccctgcagctggggcccccgcacagctggtggcctgggggtggcggccaccccgccttatttctcgcttctggagagtttcgagggtggaagtgaaccaacgcggagaagtgcaagaaaaaccgcagaagtcacagggagcccttcgtgtccggggtgttgctcagttactgagggacaaacagcgcggttccttttcctctggggagatttcacgttgacttttgttcttcttcttcgtctttttggttttgtttttttttgttttttttttttttttgcttcgaaagttgcttctgtcactttttgtctacaaaataacagggttccccttatgacaagaaactgagtgtgtgtgtgctggaggaacaagataacccaaggcaaccactcaaaacacaactgcgagtcatccccctccctccgatcaccttgtgcccgcccccgccccagtgtgcagagccttctctcaagcccagctggggtcgcaagccacagaaaccttttccggctaagcttttaaggaaattaaactgcatgtggctgttttgaaatcggggttttcatgcggtcgccaggagctatttttctctttgtgtctcagcgtgataaaatctggagggaatgcgggacgcttccgtacctgtgccctcacctatttgacaattgtggaatgtgtgggtgacccgataacaggaaaaacaaactgagggagggcgataagaaattatttagagccgggcgcggcggctcacgcctgtaatcccagcactttgtgaagccgaggcacaaggatcccttgagcccaagagttccagaccagcctgggcaacatagcgagaccccgtctctccaaaaaatgaaaaaataatattagccgtattagccgggcgtggtggttgcgcctgcagtcccaagctactcaggaagctgaggtgggaggattgcttgagcccgagaggacaaggctgctgtgggttgtgattgcaccagtgcactccagcctgggtgagagtgcaagaccctcggaggcggtggggggatggaaattatttcgctgaggaaatggtggcatagtgacactaatcattttttattatgcaaggatacagaggatgagcagctgttttccatttcatataggagacgcagtccttctcaaacttgttgaaactcacattcttgggccccaccctcagaatttccgactcaatgggtctgggctggtgctcatgaatttgcatttctaatttctagcatactgccaggtgatgctgacactgcagagcgtgcttagggtggctctgtgagtggtagatgctcacagggacgtaaactgtacacagggaactctcaattcagacgggatagcaaaatattttttttttttccctgatggcattagattctcacctgtttggaatgggatgaatggagttttcctttcttaaaaagcagatgcctctcagtctaagaacaattcagaggcgaaatggccacatttgaggctcggcaccctgtcaattgatattcacccaaaggagaaatgtggaaggggattttcgtgcatgtcaggagatgctgaattaaatgatgtctaaagttcattccatttctgttgttgcatttgtcaagtgttaacaattaagtatttacacataacaattttcgtatgagtgtatgacttagagcccaaataaatgagtagtctatatatttagaggtgggtgaaaaaatcactctgaactaaaatggtccaggaaggtgacagggtttgaaagtgtggcttgaagtggaagtgtggtaaaagctggatggagagcatccaagggaaagaaacaatgaggtggagcacaaggttgggttgga

SEQ ID NO: 318100 - DNA, 4001 bp, Homo sapiens
gatgacattagtaagatctaacccacaggactactgcgaggattaaatgacacaatgtaaataacatacttagcaggtgccaggcacacagggagtgttcagtaagcattagctattattatgaatactatcattgctactaagtctatagggtctatgttgccccaagtgcaccagctataggcttcttgggccagagtgactggtgcaagattaactcgtttgtcctctgctaagccaggcacgtttctgcccagcagcatccacttctcagtcttctatttgttcgattggagccctgcagagtgctgtgtatgtttgtaagggtctcgcttagaggagagcagaactccagctctgcagatgctggaaagtcttgctgctggaaactggaagtgccttcaggtgggtgccctacctcaagaagggaagaaggcaggagtcatgcaagtgaggcccaggctgggccgtgcacactccctgcatgcaggacccactgggagaaacacctgcttgtcccgttatcacttccctttttgagctgcatctgaagctttggtccctccagaagtacatgggttaaaacagtggcaggaaaacccaaagagttacactcactttattaatccagatgagccccgggatttggttggaattaatctgcatctctagccagggtctcatgcgcatccgagtgatgggcatgttggctgtaaagagaacacagaggctccagtctggaatctgttgaacagtacctgggcagtgacctgccccacccgaggtcacttagttaccctcccctcacctcagccagctgctaggtactacactcagtgcggaggggagctgcgctggaataaaactgctctccaaattttttcagcatcttaggcaaaaatgcttttgccccttccttcagcccctcccagccagtctctggaggagacaggcatgcaagtgatggcttcaggattcatatgcaggaaaagagacaaaatgcacagataccctaatttcagaacttttcgctcaaaattcaaatcctttgggaagggagggacttcttttgcttgatgccaagaagaaattcccttgacttgagttgtaaccactagctagcaaagggctagccgtcaccctgaacagccccctcccgcccccctgaatccattctacgccttcctgacagccacagcgcccacaacgctaagaccaggacgctaacccttccggcccggtttcccctcctctggagaagtggcccaaggaacacctgtggcgcctcttcccgcagtctccgtaggtcacgattccctccagccacctgggcagtaagccagcccttgccaccagcacagggagcccaaaacctgtcgcctgggcgcggagctgggaccgccgaaagccgggagcactgggcgcccacgcgtgggctgacactcggtccccggcacggcgtgtggatgcgcgggacgaacatagcgggccacctacaggcccctggcggctgcgcgcacgcagatctgcgaaagctgccgggcgccggcagcctcgtccgggtgggcggtccacgccgcgtcccgccctccccgcgccgcggcccgcggctcgcagctcctccggcgccccccggagcccgcgcggaggcccgggcaacgccgcgcgccggcgagtctccagcctggagctttcgaccccccacttcctggtgccccgcgcgccttttattcgacgccgccggtgccccgcgcctcaaaggcgtactcacctctgctgcaggagcgattcggcggtcgcgcgcgagggtcccggcgacgcaggggctgcagtgagggcgcgcggagcgcgactccgagtggaagagggaagaaggcagaggttgccgggttcttaaggccgccgggcacggccggcgtggactgggcacggctccgggtggcctcggttcggcggggctcgggcgcacgtcttgcctcgactaaggagtggcgagctctgccagggcagcggcgccaccgagcaatccaaacacttagcgggattccccagccctggccggccccgcccccggacagccgcgcgggcgcccattggccggctgcgtgccgtcatttcggggaaatcaggctgttgtagagctagcggcgaaggggaagtacagggcggctgctccgccccaccctctccggccgggcgccaccgccccggggccaccgcgggcccgccccgagcgctcccaatccacccctgctccggcttgcccggaggagggctgcccgggacagcccagcgcccctggccccagcctgtcctctcactccgccttgtcccagccggctggctcctggggccatcttttcaccctcctggcggggcgggggcgggggtatatctcccgaacgcaggtgaggggatcgcccgggcacttgccgccctctccagtgggaacactgggccgaatctcccgactggcagcctggctcctcaagcttgccagtgggatatcaagaagggagggtttcagtcctagcactacccctgtttttaggggtgaccccctccctccaggtcactcacctgccctggggaagtgaagaaggcagaaagcctaccctgccccgtgtgctgtctggggctgctggaccaggggaaatcccaacttggccgctgctggcacagcccccaagggacgcaggacctctgtttttcaaccataaaataatagtagccctaccttgatggtttgctgtgatgggaagagattgtaaagcactatgctccactcgggcaacagacgctgagtagttttcaaggtcgccgttgcagggtctaatagtgaccaggatgacaccccaccccttttcggtctgcctccctgggactccccctggctggctttagggaacagaggaggagaaggggttcagagaagcccagacggctgagtgagggtaggggtgggctagctctgatccctcctagcactcttgcctcaggccgcctccagagcctccctgtggcccgcgtatgggagttccgcaatggaagcattgctgtcatctctgagtccccagggcttggcccagagaggttctgggcagcatggaggaattagctcagggctgatcaacgccatggggctagccaaagggttggggagcccaggtcccatgctccttggtaaggcccctacttaactctcgcgcacaactagtccccgccccacgtatagtcctagagacttgactgggtgttcattttccatccaaaactctggcccaggaggcttcttccttcatctccctaaagctcctgcagaagtaagttactctcccaggcgtgtcatttccttcaccccagctctccctccagggcagcaccccattttgcaggctataaatagacacacccatgcaacattcgacttgccagtcactctacctccctcccgtagaggaaatgcatgggttaatcccattctggcgcattgcaatctgagtgctgtgaccaatgccaaacctggttcccaggataccagcaggaatgggcaaaactgtctaccagatagaggtgggtcaggagctaggagaggaaaggaggtaggagaaactgaggaaggaacctaactgagtgttaagcaaagtggagggcaatgacactctggaatggaaaggtgggttttggggtactttaagtgacaaatggaagtggggacttgctacagggaccaagaccttctgagcaagaataagagaaaacaagtgacccctgagtcgtgggatcctttcttggtacagcaaatagatgcttgtccttcccctgagaacctgacacatccactggaaaattcaggatgagattagggaaaggaagtttgcatctttgtggtctgataagttgaccacagtgaccctgtgaaggcaacaggacactataaaaaatgctttaaaacaaaaacttaattttaattcacagatacaggtataaatatacccgta

SEQ ID NO: 318101 - DNA, 4001 bp, Homo sapiens
cggttttggcaagcatcacatgattcatgctgaattgtgcagatgcaaccatgatgaagtcataccggttgaactgcatttccatcaggtagttctccagggttgtggtggcagaccctgtgccaggcaggtcccacaacaccacatttgaaaagtgggaagagaaataggaggcacatctttgggtagcttttaccagctcagtaggaggtgaggccttaccctcatgtcctgtgtttcgaagggcactgatgaaggtggacatcccattgccagagtcccctgccatagtgatgttaactggtgtcctggacactatcttcagagtctccttgatgttagagatcacctctggcaagttcccatctgctgaggctttctcaacattcatggcttccatcttcaataaaataccccaatgctggccaggcgccgtggctcatgcctgtaatcccagcactttggaaggccgaggcgagcagatcacgaggtcaggagattgagaccatcctggccaacatcgtgaaaccttctctactaaaatacaaaaaaattagctgcgcgtggtggtgtgcgcctgtagtcccagctaatacaggaggctgaggcaggggaatcgcttgaaccctggacgcagatattgcagtgagctgagatcacgccattgcactccagcctggcaacagagcaagactccatctcaaaacaaacaaaacccaatgcttatggtgtggcaaaaagaggttaaggatgcagctaatagagtgtgaggggcacttgggacactctgtcgtatctgtgggcactggagtaagctgcggaagtagaagagcaggtgagttaggatggacagggtacacatgaatcatctgacttttagcatccccagccctcaacgaagactgcagcagacgatcttgactgagtgttctttgattgtttttattcaagcaatgtgcacatttcttcagggagcaagaaaggtagggtccctgaggaacgccctgaggccggttgtgcctccgagtcagcctccaaagcaggcatgtggccatgagatggcttgaaaagcagagaatgaaccaagtctcctgaaaagcccaagaggtttttgtctttccctcttttactctatcctaatataggtctgctccttcacaagtttcagtacatatttcaagaccaaaaccagacaagtaaaagtgacctatatatttctctgctgaagatggcgccagaggacataaaacatccaattcccattgcttacttgaagctgtgatcatccctgtttaacacttacctcatcaggcgggggagcacacgtgcagagcagtactgaaatgctgcaatatacgtgaagtaagccaccagcctttgacccccgagcttccattaagactgtcatgttgggcccaactgaagtgagggagaggaggagacagcatactcaaatgctctgctctttttcaaggcagtgattagacaattgcttatcattgcattcgccaaacctggctcttgcaggttccacaaggggccaggtatttgagactgattaaaagaaggtgatgtgatttcctactcctaccggaattggtgggttcttcgtctcactgacttcaagaatgaagccacggaccctcgcggtgagtgttacaattcttaaaggctgcgtgtccggagtttgttccttctgatgtttggatgtgttcagagtttcttccttccggtgggttcgtggtttcactgactcaggagcgaagctgcagaccttcgaagtgagagttacagctcttcaggcggcgagtctggagttgttcgtttctccccggggggttcgttgtttcacaggtttcaggagtgatgctgcagaccttcacggtgagtgttacagctcataaaggcagtgtggacccaaagaatgagcagcagcaagatttactgcaaagtgcaaaaaaacaaagcttccacagcatggaaggggacctgagcaggttaccactgctggttcgggcagcctgcttttattctcttatctggcccacccacatcctgctgattggtccattttacagagagccgattggtctgttttacagagagctgattggtccattttgacagggtgctgattggtgtgtttacaatccctgagctagacacaaaagttctccacctccccactagattagctagatacagagtatagattggtgcatttgcaaaccttgagctagacacagggtgctgattggtgtgtttacaaaccttgagctagatatagagtgccaattggtgcattcacaatcccttagctagacataaagattctccaagtccccaccagattagctaggctcagagtgctgattggtgcatccacaaaccctgagctagacacagggtgctgattggtgcatttacaattcctgagctagacacaaaagttctccatgtccccactagattagctagatacagagggtcgattggtgtgttcgcaaaccctgagctagacacagggtgctgattggtgtgtttacaaaccttgagctagatacagagtgctgattggtgtatttacaatcccttagctagacataaatgttgtccaagtccccaccagactcaggagcccagctggcttcacccagtggatcctgcaccaggccgcaggtgaagctgcctggcagtccccggccatgcgcctgcactcttcagcccttgggcagtggatgggactgggcgccgtggagcagggagcggcgctcataggggaggctcgggctgtgcaggagcccacggagtggggcaggggagagaggctcaggcatggcgggctgcaggtcccaagccctgccctgcggggaggcagctaaggccggggagaaatccagcacagcagctgctggcccaggtgctaagcccctcactgccaggggccatcggggccggatggctgctctgagcgcgggcccgctgagcccacgcccacccggaactcgtgctggcccgcaagcgacgcccgcagccccagttgctgcccgtgcctctccctccacacctccccacaagctgagggagccagctccggccttggccagcccagaaaggggctcccacagtgcagcggcgggctgaagggctcctcaagtgccactagagtgggcgccaaggctgaggaggctccgagagccagcgagggctgcgagggctgccagcatgctgtcacctctcactagcatggcctggcaggtctgtttcacacactcattgtgaacacacacaacactgcacacagccactcatacctggtgtgcacactcacccatgcccagccatgtttacttacccccccacacacacactctcactcaccctcggcatgcacacatacacttacttgcattctgtgcacaggcccacacatactcacactgacacacgttcacacaccctaacatacttaagctgacatgtgtaaacatgaatacatacatccctgttgcacacactacacttgctcactcaggctgcaacatgttcacttaccccacacacaaacacacaaattcactcgtggtgccacgttcacacaaacttatgtttgatgcacacatgctcacacactctgtgcacatatatatacactcatgtaggctgacacatgttcactcacctaccctcatgcttcgtgtgcccagtgcccacacactctctcacatgacacatgttcgtacactcatgcacacacagaatcttgcctcctgagtgcccaggacaatggatttgtccaagtctttggcccttttagagggcccaggaagcagagaactggctccagctgtctatctatgaaatatgaagaaaggccctaatggaggagatggatgagagaggccctgttctctggaatgtatatgagtcttcaatttctcggtgcctcacttgtcttgggaagattttataacccaccatatggcgagagcagcaactga

SEQ ID NO: 318102 - DNA, 4001 bp, Homo sapiens
ggaataatttttacatattatccctctaggtgggaaaaacaactcagaacagcaaacatctcccttccccagctctccacaaagggtgcaggtcctcacactgaagctctctccctcccccgcaaacacaggcagggttcccaaatggcacacaactgcattcgcaatttctgtaaaaaatattcatcctctgaaaaaatggtctagttgcaatgttagcaaagggagttccggactctgagaaagttgtaaagaccagaagatttcttggactaattagtttggtgactgaggccgcagagaaaacatttctgcggctagatttcgtttttgcccaatcgttccaaaatgtactttgcgcttttctaattattttggttgtaattgtaaagaagacgtttcagcctcgtctccactgggaattctttttgaaaggacaccttgtaaatctctcatcgcgtcccggcctccccgccgcctgaacaaaatgggggctgatctttttcgatagtaagagacctgaaaggcagccgggccgctttctttcaaaactacaagaaaagttacagggaaacccgctctttgcttgtgcacacttgaggggcgtttactccccgcttctcctgcggggagcggggagatatcgcgggtgcttggaaattgctttatcccgcgggcagcgacccaggagggggctgcctcccagggccccgcgcccgccgcacaattcaccagccgtccgaagtttaagcaccgaccttgcagtcagaccaaggaaaatggatgatttggaccggcagacaggccaatgcccccgcggagaattaagtgtgcagccgcctgccccgacatctaacgcccactgggacgggagactaagaggacaccatttgttttaagccaagggacactgttttctttaatcctccattatgtaacgcaggaagaaaagtgcttttctttctgtgcaaatgaaatgaaaacttgggcaacttacaaaagtaaaatcaaacaccgtttcagacaccagcacattactgcaacttaatttttgtttaatctcaaattcgcactcacgccgtggagagacctctccatccctttggacctctattgttaagattattttgattgactctaccaggcttagaaggggtctgtctggcaaactcggatacaactatctcggagctgctaaagagggagaaaaccaagttttccagactcggttcgaaaactaaagaggccgcgcgagtggaacccgcggccaggaagggaagtcctgctacgctacgccgggccgacctgcaggaaccccgtgggcctgcccgggcgccctggccgagccaggcgagtttgcccccgacctccagcgcgggcaccgctccacgggcctgcttctgcggcctctctgaattcactcgctacccgctccctggcccgggccttccgctttcccaggccgagatggcccagccgtcacccgcccggcctcccagccctcttgcgtccccgggggccgcggcctcggccaccgggaacctgcccccggacctttctagttcctcttccggaccaggtccacccgtagtctctccctcccgggcgacccgccacccttgccctggcgcgggtgagacagaggagaagcgggggaggccgggcgcactcaccatctgcgagaagaggctgagatccgcggcgtagggcaggaaggcgctgtagttgggcgcgcccgcgtacggccccgccgccgcgtacatgcccagcaccgaggtgactgcagccgcgcctgccccgccgcccagctccgcggcccccggtcggcccgacgaggcggcggcagccgccgcagcggccgcggccagcacccccgggcgctcgccgccgtaggcgcccggccccgcggcgctcaggtactgcgggtagcccagctgcgggaaggacatgtccgcggactcggcgaccgccgcagcgggcgagtattaaaggcgcggggagggaggcggaggccggccggagggggttgcagggggcgccgcgaggggtctagggaggagcgggcggccggccgggcgcgctcgggcgggccgggagatggaggccggtcgcggctcctctgcccggtgctcgcaggcgcccggctcccggctgcgcccggatccgcaatcgcgcgccgactgcggcggccgccctccgctcggcggcggggctttcagacacaatttgaagttgatgctttgattggcatccccttgagcgcaggccccgcccctggctcccctcccgccccctccctgcctcccgcccgccctcgccggccgctcccgcccctcccgcgagcacgtggtgccccgtgccggcccggccagctactctcgcggtgggcgcgcgcgtcggggcggcggggtgtgggcccggaggccgtgggctccttcccgaccagcccccgcagctgtctgacaacctgtcgacacgggtttacagctgtctgacaccgggtttgcagtttcgcggccgaggtgtgtcccctttttaacaaaaacaacttggcgcctgcttttctactgtttgggcagcggggaaggggccggcggcctggacgctggtgacagcgaggggggagcggcctctcccccgagtcccgcgcggccggggcctccaggggacatctttggcagaagtgcacccggacgctctccgcgagccactgaaccggcgtggcgtgacacccccgactccagatgcgggttcccgtgggcccctactgggtagtaaccgatcgtctgccaatgaccggcctcgccgcccttggggaagcggggagcggccgagctctgcgggctctttcaattgtgcaaactttgagcgagggcaaatcccgcggagaagtcgccagctcgggggaagcaggcgcagtcggcgccgcgggttctcggagggaggggtgggggagacgcggggggaggggctttctcttcacccagaaagccccctggcagccggagggaaacatcccccgcgcccccgcgaagggggaagacggtgtggcctggacgcccggtttgtccaccaggtgtgcagaggcagacaggaaacttgtgtggaacgcgcgaacccgagtcggcgccgccgccagaccggcaacggagcggcctcttgggtccaagtcccgcgtccctcttctccctgcgtctcccctctccatcctcagcctcgtcgggctacaggacgcggccaggcgcggcgcacttgagatgggctccgtttcgccgcggccctggccgtgcggctcccgggagaagatgccaagtgcacgggcctcctcgcctccctgagcctgggaaggcgctggcaggccacttctgcgcctcgtggctggagagctccggacggtgccgtggggaaccgggtaccagtcccggctcccggggccactttgcgaaccacctcctacgcagagacggggccgggagttcaccccgctgcggctctccagcacaccggactccgcgggaatttcagcagcgcactctggcgtcttctcggctttaggccgggttggggctacgggatgaaggcggccatcgggccagagtcggcatgctgttctgctggtggtttgagccacccgtatcctggacaccggccaggcggtcccttcaccccctgcctcgcttccctctcttcacggagcctcgaggcccagggacttcagcagcatcaggaggggctccggttttccgggcctgaggacagacactgagacatcgcctataattagcaacaataatgcccgtgatggtagtaattactaataaccagctccgacatcgggcttgatttttccctgctctgagtcagattgtcttgctagtcatgctgcttcccgcgctcaattcgcccctccacactccaggatccgcctacaacctccagggttcctttcctgcttttacatagattccgggctgggtttgtggggacgccgagggttggtg

SEQ ID NO: 318103 - DNA, 4001 bp, Homo sapiens
ggccgtggcgtcccgcgtggcgttcttgcggtacgcggggtcgttgagctggtacgggtaggccgcgctgccgtacgggtggtagctgatggcgccggtcatgccggtggtgtgcgcgtcgtagggtgcgccctggaaccaacaagagcctgtgagtggagtatgcggagaccccgcgggcaaccagccagaggatgccacccctccgcccgcccacggccaccgttccccccgtgagtctggctctggggctgcgcttcccgccgcaaaagagcaggaaaaacgcagtgtgattcgggaccagctgttgatcacaaaaagtaccggagttttattctcgaatttctgaactatttcactttcctaaaatgacccatcttcccctaagtgttccggagccgctcgtggcaatgtacacaaacccttgcacgtgcgcgcacacaggcccacaggtagctctttgatatctaaatttctgcagatgcttggagtgcggctgcctccccctactccctcttcccctcccttatatggttaaaaaaacaccccagagcccccaattcactattcactgctctaaagctgggcaaatccaatttgcaactcagaagccagtcaccgtttcgaattcttcaaatacgccgtaattagcattttaattcatcctttaacgtttaaattcgaggcatttgcagccttcgccaaggccccagcgactcggtcgctgcccagaaattccgccgagggccggcagtcgcgacaaccccgtaatggcctcaatcgcccgtaacgtgcttcgccgcggcccgggcctggcccagctcagtaacctcgagactcgcgagccgcccccaggtcgccggagcaggagctgcgctcgggccacggaggactcaggcggcccttagcgggtcacgcgcccgcaagcacgatatttgaaagcatggtccgctggacagagtaaggccgaaacctgggcgcctcgggccggactccggagccgcagctgaatgctcggctcctgggcctaactcggtgacccccaccgccctgagccccgcgagtgaatgcgaaccgcccggccgtcggctcagaggccgcagtgacgcggaccctcgcgccccacgccaatgcaggcgagcacacagcccgctccgaacgcctccccaggctgcggtgcggaaaccagggacaaacggcgccagaccccggccccggcggagacgcacttcccaggctctcagagaaaatcagccggcgagccgaggggacgcgcggggggcgcgcgggtcccggccgggctcagggacgtccccgcctgccgcgctgccctccccacccggggcccggctcagcctgcggggcggccaaccgagccggcgactcctgagtcgccagccgcgccacattcccggcggcccccgcccgccgaacccgagccccgctccgcctgagccccgtctgggtcccggcgcccaggagtcccgcgtcccgcccgcgcccggttaccatgtaggacgggaagccggcggcggcggcggcggcgtcggccgagtactgcagcgggctcccgaagccggtggccgcctgcgccgtgaaggccgccgagcccgggtaggggctgaacgccgagcccgacgccgagcgcgccagctcctcgctgcgcggagccgccaaagccgacgcgccgtaggccgggcacgagtagagcgccagcgagccgggcgcctggtacaggtagccctgcgggtaggacatggtgggcgcggggcgcggggcccgcgtcacgccgagcagcgggcagggcgcgcggcgccctccatccacgcccggccggggcgcggcgcggcggcgggcacccggacggccggcggaggcaggccggcccgggtactagcctgggcggcccgcgggccggggcggcggcggggtggcggtggcggcggcagcagcgcggagccggtgggcgcagccgcgcgccaggccggcggtcggggtttgggggagtctggagtcgggagtgaggagttgaggaaggagcgctcgagtttccgagggacattggaacgcgcagctgtccatcacgcgctcatctgcatattcgggggcccgcccctcccctgctccgcccgctgcagcctccgggccgcggccgggggaggggcagagagacgggagggaggcgggggagggcggaggcgacggaggcgggcggcgggagggaccggcaggcttttgtggcgcagccgcctctctagcagctccggccccagcccgcggctcgcggacctgcagcccagcccggccgcgctgcgtgccccggcgcgcacccctcccactcccatccactcggagccacgtcccctgcccggctccggccggctcccaccgtccccggccaccgtcttcgcccctgcccggcccccgccccttccagccactaccccgcccccacccccttctccaccctcacggactaggcagaggccgcccgcggtcaggccaggccgggtccaattaggggactcacagcctgccccgctgtgcaccccgaggaggcccggcccctgtgtccaatccggaagtcgcagggaagtggggaggtcaggatggtggcgcccgcggctcgggtcttcctccgggcagtgcgcgcggctctcacttccacggtcccggacctgctctgcctcctggcccgaggctccccgcgtggcctcgcgtctggtcgcctacccctcgcggtccactccgcccagcatggacctggatccggggcgccttggttgcgaattgccaggagggccctgaggtgagctttctgcccccaaatccgcagcgcaacccccggggccctgaacgttacgactttccactgttgggaatgacgccagggcttcagctaagaagacgccgtcccctaaagagttttattttattttgtttttctaagttgactcctctttcagatttgtgttgtcaaaacactggggggatgattgttacctgacaaaccgcctctggcaggacctgaagcctcccagtcacgtcgagaacgggcaggagctcaggttggcgccgccggtgcagtgggcattacaggtagctcaggtgacgcgcggctggagtaggggggcggttgccttgcggggctcagaagcgaggcggttggcgagggttcctaggaccccagcttcctagaaccctctccccatcacgcttctccaacccttttccactcggggatggccgaagagggcgtctggctgcccactccgaagggtcacctatggggggcgctcagggggatggaagagtgtcaggtctgtgctggcctattgggagcacccacccagcaggtgcctctatcctcggaagccgtctcgggtgggtgcggtggagaagagagagcgcagtggcctggggcgggcctcagctcaggcctgcagccgactcctgcacccctgctggccctgcagcctgcggagcagccttagtgatctcaggacgcagggcatgttgcggcctccctgtggtgcggctgcagcggcgcggagggagcggagcccgggttgccagtctggtccagggcgcaagagaaacactcacggcatcaggctgtctttccccaggtgcaagggaaccagttgcaaactgcagtgctgtgcttgaggatggctcctcctgagccggcaggctcccggtaggcgcggtccaggcacgttacccctcccgccaggagctcccgagccgagccactcgccccctaccagttatcccacccaccccttcgcccacactgctcccccaccactcttcctacaaaccacacccccatcctgcacacatcctcttcaggccatctcaacacacgcacacgcacacacacccacgaccacctctccctccacccacagacaccccgttcccacaggctgggccccctgcaacgacccagcggggggtttcaaccttgttgcgactccacatgggacatcctaatt

SEQ ID NO: 318104 - DNA, 4001 bp, Homo sapiens
agacctgaggctggtgcatttccttccttccagacccggcggggcttaactggagccgaagccccagaacaggcggccattcatcttctgagcagagtctgggagaagcagcctccacttcccagggcagccagtacgtgggggccctttcgggggcttcctttgaccaccaccgccaccttctcctgttctcttttgcctttccagcctgtgtgcataaatcgacgctccagtccccaccagcgggcgaccctttctccgtgacccagaaacctggcctctgaatcggctttcccaggccgccgcacacacacgctccacttcctgcccgccagcaggccccagcgcctggggtccgggcccagtcacagtcaccctgcctcgggaagctcgcaactgcccaggaggcctcctgacccgcccggcctcacccaggccccactactcattccaggacacagggtcaatccagcctgtggattggcgaccaccgggacatctcactgaaaccctgtagcctggcctaggcccgcctgcccaaaccggggattctcactgggccacccttctcccatagataatactggaatattttccaagtgccttcaccaaaaggccaagcctggagcggaggcacccagtgtccctttcaccaacgataggacgctcagcatctcaggtatcagctgaacgcgtctgcatagactcggagtgctgagccttcctccctctagggacccccggtactaaatacacccgtgagcaggtgggccagaagtcagccggctcccggagtacacagcaccggctcagcttcggggagatgaggtgctcccgctggcctggagcgctccgaagagcggaggaccagggccggagcaggccgcaggggaggcaggggatggtcagcccctaacgcgaagcgcaggcgggtcgcctattttgacggggttaccgttggccgtcggaaccatggaaggcctccggggagacaggccgggccctgacccttcttcggccagcctagccctggtgcttcaggagttaccctgggggccaccagttccccgcaccaagagctcgtccggagggagctccttccagcccagagaagttaactccagccaaaggcgaagccgggagcccggggcaccaggcaagggcctttctttctgagacctggggccagagaccttgggggcgcctgtgcccgcccaccgctcgggacacccggctggggtgtgggtttgagaggcctcacggtcgctgacgccgcactggcgaacctcgaggttggcaggtcatttcctcacagccccgaggccccctcggagccagtggtaggagaaggagccacagggacaagcggtgaatctctggattcccaaccgccctccatgggggcccgcggccctctccctcctctctcccgctgcgcccccgccgcttgctccctgggtacggcctgaggctggacggagcgccgtccgggcgtccaggactcaggcctggccactccgagccccccaccccccgccccgcgccggcccgcgcaccctgcttcccgcaacttgcagcaaacgcagcggcctctggagagcctagcgacgggtagcaaactttgtccccttaagcgcaagagcaatcctcgcaaagtttgtgcggcggagcccactccctacctgagctggggaagctcccgcccgcgccgtgtggctgccggggccgcggggagcagctcgcagcccgggacgcaccggggagtcgccgcagccgccgccgcccgctcccctcggcggccgcgcggagcctccgcctcctcggaaggggggaggggtctcggaaccccggggcgggggcgggagcgggggacctcacctacctgcggtggcgctgggccgctcccggcagcccgcgagggctccgcgcggaagctcggcgcgcgcgctccagcggggagccggcgacaactaatggagacatttccaggcggagcacctggcgagcggagcgcgccggcgtccccaggcgccgcggtcgtcagccgagcccgcaccggcgtgacgtgggcgagcgagcgcgctgctcccacccggccgcccattaacgctttctcccgcgggcgccgcgctcttgccaactttcccctccgtccggtctgcgcgcggcgcgccgggtgcaggagctggggtgagggcgccccgggtgccagcaggggcgctgggagctgtttgggcggggacgtagggctccgggaggtcacacagccctaacaggacagtgggaaggcgcgcgagccagatttggccaaacgctaagctcgctgcggcctcgggccctcggcccacggggcccctctccccgtttgggctgccccacccagggacgcttgggccgggcgcgaagagcccggaaatagccacccttgtcgtcggcccggtttccctccgaggtcttagtatttcccccctcccccaccccccaaggcctgtggagggcgaggctgctgctccagccaaccctcggaattggctgcagggcgctcaggtcctgcctttcttcccctgcccctctcccaagcccctccgtgctaagcggcccagttctgggttctctcctggtgcccacgctagtccctagccggctcactctcaaaacagcaggctgtggcaggggcaaagcctaggtccgggcaccaggacccgggcaagtgggcgcgaatggaccacggtgataagccgcccgaggaccaatgagtctgtgacctgcccgggctaaggggggcatgccctggtggggagcctggtcccagccgccagggttaggggagggcatgggggctggacctctggcctggggtcagactagggctggagggtcttccgcttctgcagcctgaggccaggacccagtcagggaaggtgcgcctgcgtgcagcttgccctgcccctccctcagggagctggggggcccctaccctgcccccgccacctcgcccccgcagccgggcacaggtctgtttgtcatccacagagccgctgctctgcagaggtcaagacaggccccgaagggaagctggagcagcaggtgaccggctgcccaggtcagagccagaagggactggaggatgatgcagccccagggctcctgggggatgaaggaactagggccctgagagggccactctcccaggcactggcctggctggggctgcagacgcgccccctggttcccatgctgcccccattagtggcgatgtgcggggcagggcagcctcactcctacctggaggatgtccttttgggcagtgccatggggtatttggggcaatcctcacatatatttgcttccttcctttattctaccctcctcctccatcatttttacttcaaagaaccatgaacttgtttcttgtcatctgtggtcatgcaatgacatttgagatttgttgacttggacaatctctgaaaaagttatttgcatcgttttcttcagctctctctgtagctgcgggaaagggaacaggcctctgcttgcctccccattgcacagggaaccatccttgtctgcaagccttgctcatccttcttttcctccacccgtggggcttccacggggaaagaagagggcccagagtgtccagcccaggtgctggatcgagagctccaggggctcccccgggaaggacgaggctttggtctctggcctgctctggcagcagggaggtggagtgggccgtgaggcatggtgcggaccgtgcgtgtgagtcaccagtgcagcccatgggcggactctggggcacagggaagggggctctggttctaggtttctaccctccagcttgcttcaaagcgtgggggacagatgggcgggagcgagcgggtgtgccctccgtgtcagatggaatcgtcctccttgggaggtggggagagcgtcttcaattccagccagaaggaagttgaggcccagcaggctccaccccggaagggagaggaggcccc

SEQ ID NO: 318105 - DNA, 4001 bp, Homo sapiens
aagggctgggatggggagtagagacccccagaggggaggcattcagctgtggcttgtcctttcctcacctatactcggggacctggcctcggcgactgtgagcactccgccggctgagggggagagccagggcccaggggcccagccacctatgccctgcacctctgggctctagtgcaacagctcagcccacccagacctgaggctggtgcatttccttccttccagacccggcggggcttaactggagccgaagccccagaacaggcggccattcatcttctgagcagagtctgggagaagcagcctccacttcccagggcagccagtacgtgggggccctttcgggggcttcctttgaccaccaccgccaccttctcctgttctcttttgcctttccagcctgtgtgcataaatcgacgctccagtccccaccagcgggcgaccctttctccgtgacccagaaacctggcctctgaatcggctttcccaggccgccgcacacacacgctccacttcctgcccgccagcaggccccagcgcctggggtccgggcccagtcacagtcaccctgcctcgggaagctcgcaactgcccaggaggcctcctgacccgcccggcctcacccaggccccactactcattccaggacacagggtcaatccagcctgtggattggcgaccaccgggacatctcactgaaaccctgtagcctggcctaggcccgcctgcccaaaccggggattctcactgggccacccttctcccatagataatactggaatattttccaagtgccttcaccaaaaggccaagcctggagcggaggcacccagtgtccctttcaccaacgataggacgctcagcatctcaggtatcagctgaacgcgtctgcatagactcggagtgctgagccttcctccctctagggacccccggtactaaatacacccgtgagcaggtgggccagaagtcagccggctcccggagtacacagcaccggctcagcttcggggagatgaggtgctcccgctggcctggagcgctccgaagagcggaggaccagggccggagcaggccgcaggggaggcaggggatggtcagcccctaacgcgaagcgcaggcgggtcgcctattttgacggggttaccgttggccgtcggaaccatggaaggcctccggggagacaggccgggccctgacccttcttcggccagcctagccctggtgcttcaggagttaccctgggggccaccagttccccgcaccaagagctcgtccggagggagctccttccagcccagagaagttaactccagccaaaggcgaagccgggagcccggggcaccaggcaagggcctttctttctgagacctggggccagagaccttgggggcgcctgtgcccgcccaccgctcgggacacccggctggggtgtgggtttgagaggcctcacggtcgctgacgccgcactggcgaacctcgaggttggcaggtcatttcctcacagccccgaggccccctcggagccagtggtaggagaaggagccacagggacaagcggtgaatctctggattcccaaccgccctccatgggggcccgcggccctctccctcctctctcccgctgcgcccccgccgcttgctccctgggtacggcctgaggctggacggagcgccgtccgggcgtccaggactcaggcctggccactccgagccccccaccccccgccccgcgccggcccgcgcaccctgcttcccgcaacttgcagcaaacgcagcggcctctggagagcctagcgacgggtagcaaactttgtccccttaagcgcaagagcaatcctcgcaaagtttgtgcggcggagcccactccctacctgagctggggaagctcccgcccgcgccgtgtggctgccggggccgcggggagcagctcgcagcccgggacgcaccggggagtcgccgcagccgccgccgcccgctcccctcggcggccgcgcggagcctccgcctcctcggaaggggggaggggtctcggaaccccggggcgggggcgggagcgggggacctcacctacctgcggtggcgctgggccgctcccggcagcccgcgagggctccgcgcggaagctcggcgcgcgcgctccagcggggagccggcgacaactaatggagacatttccaggcggagcacctggcgagcggagcgcgccggcgtccccaggcgccgcggtcgtcagccgagcccgcaccggcgtgacgtgggcgagcgagcgcgctgctcccacccggccgcccattaacgctttctcccgcgggcgccgcgctcttgccaactttcccctccgtccggtctgcgcgcggcgcgccgggtgcaggagctggggtgagggcgccccgggtgccagcaggggcgctgggagctgtttgggcggggacgtagggctccgggaggtcacacagccctaacaggacagtgggaaggcgcgcgagccagatttggccaaacgctaagctcgctgcggcctcgggccctcggcccacggggcccctctccccgtttgggctgccccacccagggacgcttgggccgggcgcgaagagcccggaaatagccacccttgtcgtcggcccggtttccctccgaggtcttagtatttcccccctcccccaccccccaaggcctgtggagggcgaggctgctgctccagccaaccctcggaattggctgcagggcgctcaggtcctgcctttcttcccctgcccctctcccaagcccctccgtgctaagcggcccagttctgggttctctcctggtgcccacgctagtccctagccggctcactctcaaaacagcaggctgtggcaggggcaaagcctaggtccgggcaccaggacccgggcaagtgggcgcgaatggaccacggtgataagccgcccgaggaccaatgagtctgtgacctgcccgggctaaggggggcatgccctggtggggagcctggtcccagccgccagggttaggggagggcatgggggctggacctctggcctggggtcagactagggctggagggtcttccgcttctgcagcctgaggccaggacccagtcagggaaggtgcgcctgcgtgcagcttgccctgcccctccctcagggagctggggggcccctaccctgcccccgccacctcgcccccgcagccgggcacaggtctgtttgtcatccacagagccgctgctctgcagaggtcaagacaggccccgaagggaagctggagcagcaggtgaccggctgcccaggtcagagccagaagggactggaggatgatgcagccccagggctcctgggggatgaaggaactagggccctgagagggccactctcccaggcactggcctggctggggctgcagacgcgccccctggttcccatgctgcccccattagtggcgatgtgcggggcagggcagcctcactcctacctggaggatgtccttttgggcagtgccatggggtatttggggcaatcctcacatatatttgcttccttcctttattctaccctcctcctccatcatttttacttcaaagaaccatgaacttgtttcttgtcatctgtggtcatgcaatgacatttgagatttgttgacttggacaatctctgaaaaagttatttgcatcgttttcttcagctctctctgtagctgcgggaaagggaacaggcctctgcttgcctccccattgcacagggaaccatccttgtctgcaagccttgctcatccttcttttcctccacccgtggggcttccacggggaaagaagagggcccagagtgtccagcccaggtgctggatcgagagctccaggggctcccccgggaaggacgaggctttggtctctggcctgctctggcagcagggaggtggagtgggccgtgaggcatggtgcggaccgtgcgtgtgagtcaccagtgcagcccatgggcggactctggggcacaggg

SEQ ID NO: 318106 - DNA, 4001 bp, Homo sapiens
taggcggcagcggctggtgccaggcccccatgcgcagatcccgaaccatccttggaatcaaagctgttctgtgggagccaagagtctggggtcgcagtttccagggaggcaaccccactccagcctctctcctaggagccccccactcccaaaggcttggcaaggattcctgggcagccctacgccccggcaggaaggagctgatttcccgcttgctttaaaacctggtctcgcaaacctgaagtggggatgttctgagttgcagaagcagtgtgtggtggagcgcgggccggtgggggggggcgggggggaggaggtgcagtgtggggagcggggatgtggagtaggaggaagttggagggaagccagaaagaactgggggccggcaatagggggcagctgggagaaggagtggggattgttagggctggggatgccctgggatgcactcaagtggggaggaaaaaggggtggagaaaggggaggggctgctgagcgaggggatggaagccaggaggggagaagggaggagagaaatggggaggcgcaaggcggggggaggagcaagggtgggggaggagcaaggagggggaggaacaaggagggggcgaaagcaggggagagggaggaagagggagataggaaggatgagtcagagaggggctgggaggacaggaagagggaggccaggagcctgaaggaggcggggagaggagaatggggtcagggaatgagggagggaaatctaccaggagggaagaagcgggaaacacacgcagaccgaatctgccagctgatgaggatttagtagggaaccaaaaacaagaaacgcagtggccacctgccgggtcatctgtcccagggggtgggggtggggttctgagggtctcggctgggaggcgcaaagttgaaggcagccaaggtgagcgcctcccctctgtgacagtccggggacccggactggcgcgcctactggggcaaaagtgggcttggcaaatcgagggccaggggcagggcaagggctagggatgccccacttaccagcgagtagaaggcggacgcctccgagccgtaggtcacgtagttgccatagccctgcgatccgccatagggacccccatagacgcccagcgccgcggccgagttgagctcgtggcgcgcggtggccagcagccggctctcgtagaccgggcagtagaccggcgcctgggccgaggcggcgggcccggagtccgccagcgtgcggcctccggactcgcagcacgtgctcagggagttggtggccatcaagaactgcagagagaggccgcgaggactggcgggaagccgggctggaggctggggccctgggccttgccaatcccgcgcgccgcccacgagggcgtgccccgagtacccccgggcctcccgccgtccacaccaggatgctcgcccctttccactagcttgtgcgcgtctggcctcctccgccacgtggggcccagccgagcacctacacccttccccggagggtttccaaggcctctgacgccatttgcgcgccaagcctccttccccaggggttccttggggtcctaggactcccctggggcacagcctgagccttgtggttcaaacatcagggaacccgggcccggcccgtcggattttcttagcgcctcggcctttccccgggggtttggggagcaggggttgggcgtgaggggcgcgcgacccaggccttgctagctcggaagccgcaggcagtcgtaggtcggacactccccaccccccgtccccgccccatccgccctaccggcacctgcggtggcctgggcggggcggggctccgcttacctggggagccgaggagtaggggtatccaaactgcgggtaggacatggcgggcgcggcccggggcggacgggcggggcctgcagggttctgcgcgctggggccggcgtggcgcggccactgctccggagctgcaggcttctaggcgctgggagggcgaagcaggagagccggttagtccatccccgcgctccgcaaacttttctaaccgggtaacaaagtgagcagcggtggccgccgcgattcctttaacttcgcattccggaggctcgagggggctctgggaccgagcggcctcgcagcggcgacagaaatacatattttacgaaaaagaaaaaaaaaaaaacgagtcgcgcgaacccgtcaagtcagatgtgcgcggcttgaagcggaggaggctctgacgtcagccccacctcgcgcagcccggcctggccgcagactcgccggtcactcgccggcggctcaggccgggaggggccaggacagtcccggccgcgcggtggacggaggggccattcctccgggcgttagcaaataaattccatccgagtcaatatcgcccagcgaacggtgtttctctttagtcacccgagaacgagaggcacttttaattagaaattaattaatgagcagctgctccttcccgccccactgtaatcattcgtctcaattacaaatgagacctatgaaaggacacgctgaagatgtaatcaacagttaaaattagcccggcgctgcgcaggcggccggcccggcctcgcgctggcgcgctctgctccgagtggcaggaaggggctcgcaggcgccccgcacgcgtctcgtcactattgtttaatcgagaatcagcaacgcctcccgccggtttccaccctacgccggaatggactttcagaacccactgcggccgcaagacagcccgcaagagctggtcaaaatgccctcaggtgcgtgggggcttcggggccttagttggagcccgacaccctgagactggcggcccgagggctgtagggccgccccgggcgtgcgcccaccggctttgcacctctgggcagccgagtgtcgcggagaacgccccatcttctccaccgcggtcttttaagttcccgctcagcccaccgcccccacctcgcctccccgactttcctccccgatcccctttccgccggccgtgctccgccggcttccccctgcccctcgcggctaagccggggactgccgggcggccctgcgcgctcggaagagcaggttcctcaacccaggccccggcccctcccgctaagctcgtccctcccggcgccccgcagggctggctgcgagggagggggcgttgggtgcctggcggaggcgccctcccctgtccattttgcccagctttctgtctggggcgcacggagcaatcggaagaggggaccgagcgcccaccccaggactccctcggccagtaccctccctgggaccttgcccaagttcaaagcggaggccagtgagcaggcggcaagggggcggcaagggggcgcccgggccatcccgaacccgttccccgccttctgcgccatcgccctccgggaccgggactcgccccggttgccctcgccccctgggccggcctcccgtggtaagttgggaaggaagccgtgcaaggcagcgttgtgcagacttgctcagaaagattcctgggttcagacctgtgaatcgccccagggtcaccctctaattaatgatgacgtcctcgccctctccccagctgcaagcctgcctcccagaaacgaaatctgcctgctcttttgacagctcggttgaaggtgattgatgactatctggagaccacagtacacatcatataatatctgctgcgtaattgctttaatttacagatgaaaatacgagttctccgatcgcgttggaccggagcgggccacgtccgagctgcttgcagagggaaaccatcggaaataatgaatagccgctccatgcaaattattcagacagtttagcgtcggtagccgcgagaaatatataaagaacacgagtcaaatgacattaataattgtttctgaattctgtattgatttcgcggcaggccgcgtttctttctttctcacctgaatcgctaatatcaccttcctgtaaataataagaaactagccaccggggtttctcgc

SEQ ID NO: 318107 - DNA, 4001 bp, Homo sapiens
ctaaaacaaacagaacactgcactatacaacaaaaatcaaccctattttaaagctaaaaatccaaacttctccatctttttaaaattttgttttgtaagggggagggtgaaagaggaaaataatttgtgcatcataaactccaagagtaattaaacaagcctcaataccccggaattatgaataccactgttaagggtttttgtttttctcaactaaagaatgaaatgaacagcatagcttgatttttttaacacatgtacagggtaactttggcttgtatgactacactgaggcaaacttcacaaaaagacaaagccacaccaaataatacataaagagtggggagattcagggaaatcccacaaaattaagaaagaagtgtaaatgccatacctgatataatctcttttacagtaggttttcccatccctaacaaagcatgtacagctctcgtccaaatactgattacactccgcacatttcaaacatgccgcatgccattccaaatccggagaaaccctcagaatatactgatcgtgaatctgattgccgcaaccaacacatagggaaatcagacgtttttctgaaatgaaaataaatacatgattgactaaccgtttacttcctacagagataaacacacttttagtgtcgttctcttatagggcgtactctgggaggtttttttctttctttctttctttctttttttttttttttagagcattgcactttgggatggtaattgaaatgtgccatcaaaaccttgactcatttttaaaaggaggtggaatatatgtaaaatgcagattggaatagtctacatttgtacgcctagcacgcaatcaaacccgctcattttgtatttctccccccccccttcctctttgctataatcattgggaaagattatggataagtcaagtcaaagaaaaggttttgactagaagcgttaagtgaacgcagggatgtctatattttccgtgaagcgcgctcttaaatagcacacaggactggatattgttagcaagagcaggcataaatacagttgtcactcgttctcttttgcaagtctaatgctaattcacatctctgggcattgactgtgcaggcagacctttgcaacataataaccttctcggagagctcaggattccccaggaggaaatcaccgcttagcaccagaaagctagagctttggagggcacacaggcgaattcacacacaaggtacaatcagtttcccgaagataagaaccgacagtaagcatgcaggcgtggcggcaacaagaaaaagccaccttttctctttctccaggcaatgactccaactccaaagagcccttggcacctcagcctgtgcctgagagagaaccccgcacaagaacagcacaccgagccccacaaggtaaaatagcctcttactttttggtggatctcccatgtctcccatatctgtaagagggagtaatgtccacagtgaaatggtggttgtacagttggtgaacagcccacagagaggatgctggagctgtggctaagtgggaaatattggcccctggggttgccaatgctgaaagagccgctgctcggctgcgccgcgccctcgcggatctaggagtccaatttaagccggcggagttggcggagcggaggcgctgcggcggcggcagactcggcgcggctcgggcacctctcttccttatctcttactcaaacttctctgctccaactcagctccatcgccattggtctgacgcagcgcgcggggacgtcaggcgagcgccgcgcccattggctgcagggcgcgcggcgcagctgttctgattatcatatttcagcctcgccgccgctgagcgccactgaccgctcggcgagccagcgggagaggattagggctcccgaggcaacttgctcggggctcaggccgttctcccccgaagctcgggctgccgggctgttctggctctggcctccctctcctcctcttcctcttccttctgtcccctcccgcgttccttcccggccgcgccgcctgcgccctcgcctcctgtggcgctgctcctccgccctgcgctcctggggtccccgcagtccggctggccgcgttgcgcgcggggctcactttctgccgccggtggcgagtggctggtgggtaggtctacctgttgacgaggtccctcccgggctctaggaaaaggggggaacttggagcaggccgttcagcttggtttggtccccacgccgtggtgcacatccccggggcctggcctgccttggctgctccggagggctagttcctccagaactggctgcgctcggcgcgctaggggaagaagaatcgggaatgggatgattaaacccagaggaactgtttcctgactgctacaccattactccgtctcccccaacctcagatatctaaaaacgttgggtgggaggaaaggggcgcttcttgctgttgggacaatcaggttggaacgcaccggtaaaccgaagttgactccgcggactgactttttgtctttcagacccgcgaggtctgcttctcagtttaactctagaattgaagctcactaacccgaagccaaagagcgaaatgatctttcagtagtctaaagtttgtaagatttttatatactgttcaattcttctcactgctggtctcctgccctttgtttttaagcaaacttgtgcaactagctgtggtattttggtaattataaggacaagtctccatgactttgtggagattttttaaaaatgcattagtctaagggcgcgagtagggagggatttattacagaacagtgaaagacctatttcacgtccccaggcgttaatatataattttctctcgagaaactacttggagagagaagactgttaggtgcaactcgccggtaaccttcttcaatcattcttacatgttcccatcatctgttacggtctcccaaagacagtcacaggaaggccacgaagaacccccgcgcttcccccaaagcttctaaaaagccatttcttatctaatggggctgccagttttatctaaaaagtcctacagacacaaaccatagaaggcttaatttcggtgtcttgttgctgtgagaagacccggtgtgttaggaaactcctttctttatatctttcgcaaaatctaacccttgataagagctgtaaatcctggccggccgcattggctgggcttgaacgggtaatgcctctccaaagcggaaagggaatcaaagatgcgtaagtttcctcctgacctagctgaggctttcttccccaggaactagttttgatttgttttttctcaaggaggatttcaaattggatctgtcttcccttccatttttattataagttgttttagagcgcgtgtatgaaagcgaaagttggatagacctaggttgataagtttaccagttgtgtggtgtgtgtttttttttttttttttttttggtctgtttctagtctctggtattagatgtatggagccttttgtcaggctgcttttgcaaagctgatgctgttaatctcaatacgaagcaaatcttcctagtatttgtgtgtgtttcccatagagataaacatgttgaccctagtaaaaaaaaaaaaaaaaaaagataccaccacaatgccagaaaatagagttttacctagtcatattccatcatgccacttttataagatggaattaaacaccagaagccaccagaagcctgatgacttacatttgagatccacaaagcaccctcactatccatcctccttcaaaccagcccccacctcccacccacagtgtggtattttaactccctaaaccaataagctattacaaagaattattgcagatgatagcacttccaagtagaaaagcttgcatgcggcttgggggaaacctttagtaatagacaatttcaccttaatggtgaagacaacattttcctcttttcattctgcaccattgttgtaaacaagtattttcttaataagtt

SEQ ID NO: 318108 - DNA, 4001 bp, Homo sapiens
ctccgcagttagtatttggattctagcctttataaatggacttctcaaaggtgcatccaacatctgagtattctggcagcagtaacgtaaaaggactgacaaggaaggctgcagagaggtgtcagacacgaaaacgcttgaagacataaaaatgaggagtcttaagcacctaagaactgcaattccctatctgagcagcaggtaagattctggggtatcagatcactgtatccagttccaggttctccactggcagagagtgcagtctctgactttgtcctctgaatgcaggaactttatcgaagctaaagtacctgctttggacacttctggcacaggtgttggggtgacaggaaacatcatcaattcagctgccaactacagcggaaaaaaactagggaataatcctcagaaaatggcactgttaatgggtacaaaaaacacagataataggaataagctctagtgttcagtagcacaatagcgtgactatagttaacaataatttattgtatatttcaaaataactacaaaaatgaatttggaacaaagaaataaatgataaatgtttcaggtaatggatattccaattaccctgatttgatcactacactgtatgcttgaatcaaaatatcacgtctcctataaatatgtacaactattatgtgcccataaaaactaaaaacaaaaaagaaagaaaatgacacttaaatattaaaataccttttatccccgaatcccacatttcagtttggtcttctgaaaaaatgacttatcagtttctcagctaaagaaatgatatcgacagtgtactacctaaattataccttatattctttcctttccaaaatataaattcgccagtgaacaatctgatcctaaagagggcggaagattaacccgcctagcatgagagcacagcttaaaataaatgctgttaagtagtcctcaggtagaacaactttcccagccagcaggcccaggaactcaaggtctagcttaagttgggtatttgtattcaagaaggaattacaatcatggagtcaaatgactttttcaatgcagacgacaaaacgtaatcaagtcagtagacactttactaagaggaggctaagcaaatggttatttgcttaaggttagggaactcttaagcccaaggacctgagagcctgggaaggcgggggggaatgggtttgactcccaaagtttgcgtttccgcaagtggttaacacaactctaggaacaaaccctaagaccaatactccccacaatctcatttccccccattctgcatcacccatcaccccaaaataaaaacagctactacagcacagccctttggttacgcaggaggctgggacctgatcctggcataaaaagcggatgcgggcgaccgaggaccacacacgtgggggcgttcgcgggcgctgaaaccagctacgaggcccacgcccccgccggggacagctggtgaccatcacctttggacaggggcattccccagccggccccggaacttgcgaaagacgcgcagcccttcggactcagccactcgcgcagggcccgggtcccgggcggctcggggcacctgaggagcgcggcgaaggcggggacagggacggggacggggacgactcgggaacagggaagcgcgcggcctcccgcaggacccacctggatctgcaacggcacgaggcgcaccttgcagcgctcgctcaccgcgaagcccttgggcaagtccacgtactggccccactcctcggcgaacagctgcaccacgaatttgcggtgcatgtcgatctggtcgccgtacaggctgaggaacttctggatgagcagctcgtagcccgccccgtgtggcaccgacgagggtcgcgcgaagactgagaaacagaagagcaccgggactgtgcccgacggcgcccccgcgcccccggcgccgctgttggggagcgcaaggaccgccggctccgcagccgccatgttcccccgagcgtctgcgagctccgaggccgcccagtcgcacccagccggctgccgcggccccgcctcccggcgatgccagcccgcccgccagctcgcggaggcgaaggggcgtgtcctgacgaccgctgctcgcgcgctctcttacccgccccggagggcgggccgcggcgtaagggtgggtggtggggccggggtgcgcgcgtgagccagggagcgcctgcgctcgccggccgggtccgccccctccagcttcccgggccgctgcgttcccgcagttccccgctcgcgccctttctgccgcggttctgactgccggcagaacgcctagtggtctcgcagacccaagacccgcctgggctgcccgttgttcttgccccggtgctgcagctcacacaagggtttgtaccacccttcccctaacgctggccctcttcgcggcttcgctcgccttcgaatgagcagtgttcttggcagtctagggttgtggttgggtacacagagccgccaggacgagttacctgttggctctgtgcagaagcatgcagtcctcctcgagatggcagtggtatcttacaaccaaagggacagtccgatagataccctaagaagagcagcagaatttaatccttagagggccagtcaaggttcaagttttgtcttttttcggtcccacagaacacaatatctctaggaatggatttgatatctggcctcccttcatctcaacctatttctgggaggacttggatttgggaatataaatactattaaaagcaaaaatctgaactttatattgaaactaaggatatctgtttttaagtaagtaaaagggatcactttcaaataaaacaatcctctgccttctgcacactgtaaggcgctataattaactggaattagaaagcatgcattatgaacagaatttccttggaattgagtcctgcgaagataggcatgggcctaaacataaaattagattttaggtattaaagctgtcctcttctaagaaaataacctttaaagcagggtttcccaactgacactgttgacttctggaatggacatttctctttcttggggatggggcatcttgtgcatttgcaggatatttagcagcatcaccggcttctactcccgctagatgcctagtgaccgctcctccctctagttatggcaatcaaaaatgtttccagacattgccaaatattccccagagggcaaatataccccctacttgagaaccacactgctttaaagttatgaaaagaccatcctttggtgtttcttgctcaattgtaccgaagctactagaaatagccatttttttctggttctcatcacactttgagagatcccatttaaaagtgttgtctgaacccgtcagacccaaaatgatatttttttccggataccactccattgcaaggtcttctatatgcagatatgctgatttgtgctaataagtgtaccccctcaagacctgattaccaaaaggtacctacctattttgggtggactaataaaagtgttccttccaccctgtaaagcctcctaacacagagtaggttggagattagagattggcctagacttcagacatcctcagcgaggaccttggcatctacacagtcttctgccgtggccctcatggccgtgagtcaacatacttcatttccctttcatgtttttaaattaggtttctgacccttcagtaaggaaatcaacttccatatatattgtgctgtctgagattggtccttgacaacctagtttaatggtgcaatcattgtggtaatagcatgttaaataacattaataaaatagatatttgatgggcacatttaccatttattgaatatcaactgtgtatcaacctctgcatcactgggctgcaaaagggaggtgaatgcacatttcagtgataaattattatcctcagaaatacaattattaagataatttttataaatgttaccagaaaaagtgagtaagaccccataaatgaatattcaaat

SEQ ID NO: 318109 - DNA, 4001 bp, Homo sapiens
gagaattttggattttatcttaaaggcaacaaagaaccaccaaagatttttgactaaaaacagatatagtaaaaatgatgtattaggagggtagactggaagttgggttcaaattgaagacagaaagataagctctacagtagtgtgcatggataagtatggtgatgagtccccaggttacaaacggactctgaattgatgagaagtttccaaatctgaaagagattgctaaagaagagcctacagaatataatgactgatgggaaagcagtccaatttcagatccctcatgtgttgcgaaatgggcataaatatagtgcacacaaggtttctaaatattttaagtctcttcctggattcaccaatgtatatttcaccaacatatatatgaaattgtaacttgttaaacttctctgttacttcaagtttcactcttgtctttttagaggatacgcaaacctcatttcatcatttctactctagagactgcttatttggtagaatgaaaaagtacaacttggatagtaaactactgtattcagattttgcacaaaaacaacaaaatacaatctaaaaaaatttgagttggagaagaatcataggtcaaatatgtgtaaaaagtagtggcagtagctggtaagttaaaccactcaccggctataatgctgttcagcagttaccactgtttggattattggacatttcctgagtagtgggaaatgtttggatgaaaagccagtagctaattattaactctctttacattacctcccttctgaaaaaagctctgcttgctgataatcaacttctaaatcatcttcataaaacttaacaatgcttggccatctaaggcaggtctaaactagctggctctaccctgtttttagtggtaaaaatgctaaattaactagtactaataaccatgccagcagtaaaaacactgaacaattgaatatcaatgatatgttaaagccagctgttaattaacccattaataaggtgattttctttcacacagagattctatcgatacactttccccccaccttcttccatttttcaccatttcaactttcccccaccccaatcagtaactggtaaaaaagatctgaccatgagttcattattgggaaaatcttacaaaatgctatatttcaagctttttctaaattggatacaactttgcatttccactatgtttttaagtcccctccttaaaaatacacatttatgtacaaataacaatactatattttgcatcttaaaagtagactgccctgtgatatttacagagaaaatgttcaccattcctttctacgtttcaaaatatccctcctcttgggtgctgacatagaaacatcattttggaacaagtggcagtttcgtcttgcatccctgccttttcttgttctgcatgggaaaaaagcctaaatagtagacagcaagaaaattcaataatgtccactctggaacaacccgagggtaggaattttgcatatgtatcaggcgccctataagcatcaccctcccatcccatgccataaaaaagggtggaggggaggaaatattcagcaaagtcctaatatacaatgtgtattgtaaaaacaactttaattttaaaagtgaattctaccttctaaggttttcagtgctgcctcactcctactcctagggtgaaggactttggagagacacgaaaactaattcatatcaaaaccagaacgcgaaactcctgcctgccccgtagcctggcctgagtacctggaatgcccgaaagtggatgggcgctctctcttcctatctggcccatggctctgaggacctccctccccgctccaagccccaagcccgcgagcaggagatgctcagagaaaagcgagtcgctcaccagtgaggagccagcagcaggcgacagcgacccctgggcgggcgcggggccgaggggccatggccggagcagcctcagcgccagggggccgcgctggttcgcagggcaggaccgggcgcgggagctgcgctctctggctgggccacttatcccgctgccgcggttcccagtcctctgccccagtggcagcggcgcccaggagcgggagaggagtgatttcctgtgttttcgtcgaattcctctaaatgcgctccacgcttttcacatcccagacggattgccacatcgcccgccccttcgcgctcttggtctctgaaatctcactggcagcttcccaggctctgtccgagacatggacaaataaagccagcttcgcgggtccgtgtttaggctaaagtccacgggctgtagaagcaaaccttaaagggacatctgcctttcattgagagggtgatctcgttctccgggccaaatcccctaaggtggtaggaaggcgggtaagggctggaccttcgggagggtgttgccagcccagtggctccgccttcacaccccttacttctcccggcccgggcagggagggcgctttgacagtgcctgggcgcccttaacgggaggcagctttcccgggtccattgcgcagagggattaggccgtctgtgaaaatgcgaggatctggaatccccccttccatcccctgcggacacttgaaattcaccgtgaagtcgttttgcacgaaagggggcgtccccaccaccccgacaggctccactgagggctttgctttcgcttatgggggggtgggggggttgcttcgtttatggtaattcgtggttaaagggtggttgcagataagcttttctttgagataactaggataaggggagaaaaggagaagcaagacggaggaaaaacagtaagagggagagcgagaagggaagagaggaagaaaagcagcctccttggaaatggaatgtgtgtgggctattttgtttaagtgaattaggatgtttgtacgctggtaattgaatctaataaagaactcggggcactactttatttttttcttgcttgaaactttcacgagtgaaaatgcattaagagtccagaagtgcttaggaacttgcaatgcttccctttcctggtgagttgaacaacctctctgagtcaaaagccatattcaccctagcttcaaccaatgctggctattttcaaaatagctgtgtcttagcggttttgagaatttcaaagacagaaagaataagtggatttgtgtttagaggaatctgagggaaacagttcaattcaattcttcaactcaacaactaattgagcatctctagcagaactagggctaggcaggacaagagtgccacccaaaggagggttcgttgagcagaacgcaacacaggtagcacagaacaggtaacacgagggacaggaaggaagaagcccacagggttcactggatacattgccagatagaggatcacagcaactaaaagctggagaagacaaaagttgaagaagtttaaggagcgtcaaaaatggggtgggcagacccaaggaggttgaaggccatcagatctcagtatgttgacccattaatcaagaaattccttttctattatgtatctgaactgattcactatttagtaaatacattaaaaatctcgttctcccgtttttagtttttataatgtcatttctcagttctgtcttcaaatttacacaaatgagtctctagaaaaattgtattatgttgggtcacagttcaatcccattggactttacttaagttcctttgtttgtgttcaatgctctcataccctgccaaggaattcatttcctgtgtatatctcgtttccctgttggtagtatcagttatgtcttatgcctctcagtatgactctctgtgctttgaacagtaaccaatagatattgattaattcgtagacatttaaaaatcatagtaagtactttcccaatgatatttctccaaattgcttagttttcaaaaacatataatagtgtgtctatatatacacaatcatgtgtatgtatgtatgtgtacatatatatgtacagcatatacatacatatgcaaatacat

SEQ ID NO: 318110 - DNA, 4001 bp, Homo sapiens
aacctgggatactcatggtaccaaaaaacgatgctgcttctccaggaacctcaagtgatatcacaaatgagagagctttcttatgaggatcttaaattaagagaaaacctgttccttgagtatacaaatggctggagtaggaggagggaataaatgcacaaaacttttgcagatgttattttcgatcatctctgcttgcttgccctgaggtgtccttattaactccaggttaagtctctgttcctgacttcatgccttgcagcgttacattccattaaagaatttctcactgctctttacataacaagcctcaacatttcaaagataagaaaatgatgttatgtttccacagcttattttaatactgggtaattacagagagatgaaaagcttgggtttatatttctattagctctagttgtattccagagactcattttcaatgtcaagtacaactttacctgaaatccgtagattagggttggtggcccctcaaaacaactcatctggttcccggagaaagtatctgaagcacccaatacaggtgagacagaaaacctaagatgcccattctctgctcgggctggggacagtggtgctatttctctcttatctctgacctggagaaaatgccaccaggttgacgtggactaggattcattcctccacaataaagaatagcaagtggctgaatgtcagtctcaaaggaggacagcttaggaaatatttatcttctttgtaaaaaaaaaaaaaaaaaaccacacacacactttaaaatcagagacaacttttttgttttgttttgatcgctgttcaaactacattatacaaacgtgtctccttctccctccaaataaactaaaattcttaaatttgaccacactctagctctgcctaatggtcagggaaaaagtactcaggcgatggtcccacaaaagctctccaccccagccttatttcctcctcttagtgtaaaagaactcaggaggtgggcgggccccactgccacagcactacagttagagcggctgctccggcttattctctcattgcggcatctaggatccagaagtgaaaagaacttttcctagcctaagtttacattcgtcgaatagacaatgttacaacaataagaggaaggcagaagggaaggaagaattcccctctgccaagtatttaagtggcgcttggtttattccaagtccccccgggaagaaacacagcgcttcgtcctcaagtaagaaatagaggcattattcacatccttgggttgaaaaataagcattttggggctcgcaggcttctgcaaagccagcaagcaccgcgctggggagctgcaggccgccatcagcaatggattccggatttccctggtctctggcaggcgcggcacctgtctgagccaggggaagttgggctgcaggactcgcggtctccaggacacccgcggatccccacactgtccatgcttgagtgcgtgcgtgtctgtctgtgtgtgtgtgtgtgtgtgtgcgtgtgtgtacctaaaacaaagcactcactgagatgactttggagggtgcttaacagacagggcgagacgcgcctaatggggacgcaaggcctgggatagcaggaagggaacgaagaagtatctctttccaagcaggtcctggtggctgggagcccgagtccacgtggaatccgagggaacacacggagctcgctccctagttccgcccaatccctccagcgagccccaggaagccgcgcgggtccctcctgcagccgatgcagagcgaaatccccgcttaccttgactgagcgctaacaccagcagcagcggcagcggcgcggcccctgtccgttctggccccatcctgggtctgaccgggggaccgtagttgcgctgggtttgcagaggtttgcagaggatacccttggccgagggatacgagaacctgcacactctagaagctgtccagagggcttctctcccccgcccggtgagagcagggaaaagtttctgggcagctcctgcagcgccgagggcccgccccagcccgcccctcctgattccgcaaacaccggatctgctccggccgcgccccgccccaccccggccctgcggccccgcgggctgcacctcggctcgtccacacgcggggcaccgcaccttggctcccgtacagcggcccagccccggcagcctggaggcggtggggatggggatggcgccctggcaggctttcctgccctggacgggacgggtgggcatatccgacgggcgagcgcccgccctggcaccactccgcccccgcagcctgtcgccagcacgcaggagatgccccagtccccgggagaacgtggcccctccgcagcccttggcagcgcccggctcctggcagcgggtgccgagggcactagccctaaaccacagtgcctaggggctgcgcggtgcgtccctttctctgtttttcctaagtgggtggagaaagggacaaaaataagcgcagaatgaccaggttagaaactaactcatcaggaaagaagatctgctcacaagttatgattatccaaggtgatatttaagcaatacctgctgcaagagctgtgtgtgtgtgtgtgtgtgtgacagagagacagagagagagaaatcatcattacttcctctcctccgagataattaagagctgatttaatgactgagtttaggagattaacttcaaggccagagaaaaggctgagagcccatacatgcacttgtgactctccctgtctacattacaccatgacatagactgtgaccattttcttccattatttcagtctcacatctggaaagagaacattctatatccgagatttttagttaaaaacctaagaaataggatattaatttttcttgtctgaatcttatgttttatccaaaagtttggccacaaatttccagcacattgctgaaaccagaattcttccagtgactacttttgtgaaggaacgaactgttttcataaatcaagcttaaggagttatgagtctaataatcatcattattgtcatcattccagatcttcatggaatgctactatgagctgaatgggatgcctgagatactgcctctaggaagcaaagtggctcaaggtgggaaggacttaataattcataaaaatcaagctcttctctttactatagatagggctgatgtgtcacattgttaaagtattaaattggtatgcatcagatgttgctgctgatggcttatgactaataccctttgaacccaaattatatagtcccaggctctttcctgttttcttatcagtcacttactggctgcacttactcaccttgacaaacacctgaaggcatttttttctgaattgtctggggtactcacctgcttactaaaactccggctatcacctgagagctcttaggtggctgctcactaaccggtgacacgattttgacgctccttacagactttttgaaggaagtcagccaggtttcagggagatgaatatctgtctgtttccttctgactcactgaaatgtgagtaagtgtttggaacagacctgtgtttgggaggcaggacacttcctttaatgtgagacaggaatttgtgttttatctctgggggtggggggaaataacatgcatccttcttggtttttgttctcagaactggacaaattaacattacactgtcatgaagtgcagaataagtcaggagctacgattttccagagccaggcaaaacttttagaaacaaagaacaaactcctgcctcacattaattttaagaggataaagtgttcctgagacaaagtagtttgagaaccccttccagggtgctctcctgcctagttgcagttgtgagggacaccacattcagagcaggaaatatggaaggttaagctggggcttctcaaactctttggtctcaagagccctttactcagtaagtcctttaacaaaaatcctattatgtgtgaacataaataatgtacattttatg

SEQ ID NO: 318111 - DNA, 4001 bp, Homo sapiens
ctgaattaaggccatctggttttgtgattacttacaaataatattgagctgaattcacaatcagttcacaaatagcagttgggctaaggaattattaatactaactaaatgagatgatactatgttgaatcagaaaaacgaactggtgaaaactgcaaaatggactttgaaaaaaatatttaaaggtacatgactgttctttcaatatgaaacaaaaactttaaatgttccattcacaaaaaagcattgagtaatgccatgcgatttattagctctacatgataaatcccccaagttcacaaactgggctcctggccacctagcaaagaggacttgcacgtaattccatgtgttttctgattgactggtaaattgttatcagtaagagtctgataataagacaagcaattcttttcacttctaaagaggcagagctatttcgcctgcaacttttttgttttctgtatttttttaattcacaaaagacatgcaacacctgcaactttaaaaagtgaggcatccataggctctatacccagcctgacctcctctggagctccatctcatgaagtgctttaaaccctggcacaccaaagaatcccaaactcatgccaccacctactaagtcagactccaacaaagaactggagcacttttgtttctaagtgaccatcaggcacctaatattattttcccttcagtaaaatataagtgataatccttgtcctaccccactaatgatgtaaaaataatataaccatacagtaagaaatcaaacatgctttgaaaaattgcagcatagggctaaacaagagccactgcataaagcaaagaagttttgaagaagaaagggatcttgaaggttgttatttccagttttttcattttatgaagaaagaacctgaaacaggaggtagacatttgcccagactggatcacctactgagaagtagagtttggtctcctgaccctttgtccaatgctttttctaccaaactacattattaggattattcctgttgcttttgttattagtgatgttaagaagcacaagactatttttagataaagagatagactgacctagcaaagcagccatactccttctgggtaagaaccgctggtctgcactgcagaaactttgttcttaataaccctggtgtcctaagaagtctatcaagagatgaagaggtttgccattgtgccttacaacttttagataattaaatgcctgggaaatcttatttcaagatcaggctagcgacgagtattgagacaaacagagttattcatgaaaacgttaacactgaacccaaaacttaaccattctaaacaccagtttcttccactaaaaaataagaaagctggggtagatcatcccattgaatgctagtgttgtattaatctatgtttcattaaatttagtatgtttcattaaatttagtatgtttcatagaaagttcaagttttatcgaatcataatacttgctacctaaaatgttattcataatttaaaaaccaaacataaccttgcagggggaaaaagctgatgaatgttaaatttacagtttttagaactgaaatcacctagcaccaccatttcacctcttgactgctctctgcattctcctctgattacttttactgtactttttatgttgttacaataagcatgtttgtgtttcctgtgctctattttatgctatgtatatatttttgcattagcccagtccaaacataaaatgctatgcgaaaaaagacaaatgaaactgctcacataccccatgacgatcttcaaagtatgccaggctggctttggttaacacaaagaagcggactttaaagttcgagggagaagttcttctcttttgttgggatttcttgatgagctgttcttccaggaggataaagttgttcatgatccagttcttgaaaggtggtgcaccttgggcatcacctcttagcacaaccaaaggaaagagttttggggcaaagaatgcaatgtggaggcagttgatcttcagagagctgctcaagggcaacttgccttcaacgttatctttctatcaacgttcagccaacatagctgagcttctcctctgatgtcaaaggccgaaaccacatcctttcaaaattcacaaaacgaggaggcatatgtaaaaaatacatacagcctttgctaatggcttgaaatgatatttgaaaaactgtaaactcaaaattgtggtaaggattacagtttaatctttatagttcctggtttaatccatccagcagttaaatcatgtagcacaaggagtaaggacaatgtgtggttttgcttaccatgatatactcagcaaccatcacagtacctgacacataaaacagatgttcaagaaaaatttgttgaatggatcatcaccaaattgggttggacaattaaaagaggtaatgagcacaaaaccctcacacattaaagtgaagaaatatgttgctgaagtttattagtttttaagatttaaattaaagcccatagaaatttctcaatgctacatatagatgactgcctttctgtcctgacgttttgtggaagagtgaaaaataagtgaatccttcagaatggcataataaacaaagtatatgtgggctttgaaaacagacaaacttgtgttggattcccagctctgtcacttactatgctgtttctctttgagcaagccatgacttctctgatccttagcttccttgtgagggtcctttggaggactgaatcccatacatcttatgaatggtaggtgctagtcatacatgtcaccttagagttagtacatagttgaagtataatgtgtgacagttacctctactatgttaataatcaagagattttagtgtaagcagatattgcatgtagtgggtagggataaataataaatgaaataataattattgctgtataggagtgaaattctccaatgtttatttttaaatgtaaattaccagacaacagcctaattttatttcatatactggatgccccagcataatcaagacacccaggagggtacggtactggtatattttaaattacctcccccattctgagattcttaagacatatgtgtggaaatacactgcccaaacaagatagtattttttttttctgagtatgggcttgaggtagggattgctactattcccaaatagctactctctccttcttactagagtaacagaatccctgacagttatctgggcatctggccagcaagaataaagactacaaattttagcctcccttgtagctaggtgtagttgtatgactgtcttctggtcaactgaatgtagcagaagtcgtgtgcacaacttctaggaaatttccttagtgggatctgtcatccccttttctttcccttttcctcctgccttgtgactagaatattgaggtaacagttggagctgaagcagctatctagtatcatgaggtggaaattgaatgttgaggacaatggagtataagatagaaagagcctgggaccctggtgaccatggatcttccatgccagccctggattacattttttaatatctattttctaagtctcagttattttgaggtttctgtcactaccagcaaacctagataatacagtgctatcttctcaaactagactacaaactcctctgaggaaagtacattttacacctgcttggttcagatgaaaagagttatagacttcacaaagtgttctcatccgggaaaacaaaatatcatcagtagctgttgcaatacttaggagtctttcgtttgctcagtctacatggagtgtcatcgtaagtaattttattctctttctcatagagccatcaaacccactaactgagactcatctttgccaacttttaaatgcaaacttaggaggctcaatatttttttctcactttaaggaaaacataaacaaaaacaaatagtccctttgtttgttttggttttaaaaagttcacttcataggagccaaatt

SEQ ID NO: 318112 - DNA, 4001 bp, Homo sapiens
gaggagccggaggaggctgcggggggctccggcccaggcgaaggaagggcaagaggctgttcgaccgggggcggcgccgggaggtgggtgggcttaacacccaggtcgggggaggggtttaagagacaccgggaagggcagccgagccccaggggcgggtggggtggtagctgtgtgtagtaggggacagggctgggcctctggaagctagagtgaagccttcctggctgtctcgcaggcaaccccatcctctggcagaacagctgcgaatcgccaagttgacccctctcgtcccttggccgagaggagaggatgtctcaggacccagggatgggcgggaagaaaccatggggagccacaagtctgcacccaggcggggaggaggcgggcgggcgccgctccgcaggcgcaggcgagtgggtgggaagaagggagggagagggaggaaggaggtgaggccgggaagatgccactgccgggggcggggcggggccggggatccggcaaagggactgcagcagcgctaggtgggggcgggggctgcaatgtcactcatttgagagtcaggtgtgtgcgtcccaaacggggtccgccacaagccggcatcttcctggtaccacccatggtgcagggccctaggcagagggctggggactgcggatccgtccctgaagcgggacgcgaaccggcagagttgggagaaggtaaacaagggccacgccccctgccgtcgccccgcgggcgcgcacccgccgctccggccgccgccggtacatttccactctcccagcgcctctccccagctggactaccgcgcggccccggaggtggaggctgcccccgaccccagtcctcacccctggcgccgaggctccgcaccctccacactcacctggaaagggtgtcccccgcccctccaaaaaaactgtctaatttgtgcagagcctccaaccccaggagccgagcatgctgcccccgcgtgcagcgcccgcgtgcaccgggccgggagagggggcgacagggcggaggcggtggcccccggaaggtgtctgggaccggaccggctgcacgtgagcccagcgcgaggtcatgtgcaccggctcagcccggttcggcgcccggacgtgctgcgtatcaacaaaatgaaactcggggagacaggagggcagatagctccaggttctcggagcccccgcccgggccgctcgacctccccaccgtacccatctcccgccgcagcccctacgcccggccggagcccgcggggaagttgcagccctggcgcgcccccgcccgcccgcgccccctcgccggcccgggggcgctttgccgcagtcattaataaagaaggtcgccaagctcacccttccaaaagttgttgttgcatgcgcccctctcagcctccccgcactgtactctttaaaacacgactgaccaacatgcgcaatctctctcccctgtgctgtgcatcccccccctctccgcgctggcttcctagaacaggcagccagcaggagagagagggagcgagcgagcaagagagagcgagggagcgaagagcgctggcagatctgttgcaaaaacgccaaataacgtcgtggagatgcgcagggcccatccgccgggggctggatcttaccttgctccgcggtgcccccctgacgggcgctgccctcggctacgcgccgctgcagggaccggcgcgggaaggatgctcccgaagccgggagctcctggggccggcgcgggagggcggggggcgcgcatccatccggggtcgcggcgagggaggcggccgggcccgcggcgtcccaggccccacgccccccgccggggacggtcggcccgcaggacctaagccggtgccgctaggagtgggcgcaaagtaactccatggacgctactcaccccccccaaaaaatagcctccaactgcgatggccgcggtcggcaccattcaccaaccccctgtgtatgtttctgtttctttttaaaccaagacttccttgtgatctctttagaaaaaaaaaatgtgttggggtgggggtggggtgggggcgggcaggaggagcgagggagggggagtagccacttttttcttattcactcggatctccgctcccgacacccccgtcgccgcccccccaaccccccgcccagttgtttggctccggcggggagtccaggtagcgttgcgggccccgtgggggaagggtgccctccctcgcagccccaccaccacgcctgctggcaccctgggcccggactccccatggactctggggcgcccctagcccgccctgtccccagggccgggcccgagcggcggctgcgcccgtgcaagtcccatcaggtctgctcacacttcacacactcacacacataccccgcccctccactctttcactcacactttctgctcacaccccgccccctacgcgccccagacccgggcggcgccccccgcaaccttaaaaaaaaaaaaaagcgagcttatacttaaaaaaatcttttggcgccatattaatgacgtacttaaaatttgccatttctccctgcgtcaaaaagacgtttctttgcaaataacagcctggaggcgacactcgcggagggaacgaggtttgcactgagcaccccgccccccggggctccagcgctggaagaccctcgccctaggccctgcttctgaatcgctggttttaaaatgcgaatcgaataaattgcgtggcgttttgcagcaccagaagtgagcagaaagtgctggcaggaggggagtggaggggcgaacgcgagtcttggggagggggcgcggccctcctccccgcacccactccaaatggaaaactaacattccgggcgggggaacttgaaattgtaggcgacctcaagaaaagaggggcggtccgtagagagggtccccattgggctcgtcgccccctcccccctcccgggtgcctcctggcgcctagcgctgccccgcatttccggggggtggagaaggcagtgatgagcgggtgggtgggtggttgcacatcctggccccagcaggattttgccccggggcgaccccttcctccttgctcttccttcccattaccccgaaagggttaaaaaccgaggggtaacttccaaaggctggcacatggcgaggaagcggggcgcccctctccccacccttcgcctcctcgcccctcctcctccggctccacttcccgacttgaccttgtggtgcacaaacagtacgctcggatcctcgcagtttctggaagaagagcctgcgctcgccaggcgggcgggctgtcgggctgctagccggcggtggcggggccttgggtctgttcccggagccgcgggccacacccacccaacccgctgcgcccgccgagctcaccttctctcgaggaaggagaaggactggcctcctggttggggaggaatcgggggtcaagctccaacctcctcggaatgcctctagctggggagggggtgggtctggcctcgggaggaggttgtggggagcctggcccaacatccccaaagcatcgtggccaactttttcttccccctcatggtcggctgcccctcagattatccaataatttttcagctcacctttggctttgaaggcacgtgggtgagttgtgaatggacaccggagtcgccttccctctccaagactgaagattgtttattcttcctttcccctccacccccttccatgggaagataaatattcaatttacataagatgacatttatgtgacaattaagaagattccccgatggaatgttgtgaacacatttgcttataggagaaataaatctaataataaacaaactcataataacagcacaaatcctccgacagggcggattgtctacccaacaaagagggagatgatgaatgctgaaataagcagtttttgcaacaagaaagaaatatgagctcaaagggagtcactgcaacatttcttcttccttggccttcattcacaaagtctg

SEQ ID NO: 318113 - DNA, 4001 bp, Homo sapiens
gatcagagctcaggggtcctccttccaacaaaggcaaggcagcaggtcccactcagccccttcctagacgctttggaaccgctctgaatggaaacatgacacctctcgatgaccccctacaaactctgacccgggatacaactttgtgcctcgggatcctgcagaagatgacccaggggtgctagacgcagcggcgaggtttggaaatctgcagagaccagaatcgccggccgcagtgtgccttcggcatacggcaaagacacccagtgacccttcacctcccccagcctccagcaagaggccagcagccaagctggtaaaaaagtgcccaggccagcggcagtggctgaggggattgggaggggagttgcgcgcgcctccagcccgcccctggaggcagtccgcgggaccgcaggctggaggcgcgccggcgtgattccgaccgccggagccgggaggaggagccggaggaggctgcggggggctccggcccaggcgaaggaagggcaagaggctgttcgaccgggggcggcgccgggaggtgggtgggcttaacacccaggtcgggggaggggtttaagagacaccgggaagggcagccgagccccaggggcgggtggggtggtagctgtgtgtagtaggggacagggctgggcctctggaagctagagtgaagccttcctggctgtctcgcaggcaaccccatcctctggcagaacagctgcgaatcgccaagttgacccctctcgtcccttggccgagaggagaggatgtctcaggacccagggatgggcgggaagaaaccatggggagccacaagtctgcacccaggcggggaggaggcgggcgggcgccgctccgcaggcgcaggcgagtgggtgggaagaagggagggagagggaggaaggaggtgaggccgggaagatgccactgccgggggcggggcggggccggggatccggcaaagggactgcagcagcgctaggtgggggcgggggctgcaatgtcactcatttgagagtcaggtgtgtgcgtcccaaacggggtccgccacaagccggcatcttcctggtaccacccatggtgcagggccctaggcagagggctggggactgcggatccgtccctgaagcgggacgcgaaccggcagagttgggagaaggtaaacaagggccacgccccctgccgtcgccccgcgggcgcgcacccgccgctccggccgccgccggtacatttccactctcccagcgcctctccccagctggactaccgcgcggccccggaggtggaggctgcccccgaccccagtcctcacccctggcgccgaggctccgcaccctccacactcacctggaaagggtgtcccccgcccctccaaaaaaactgtctaatttgtgcagagcctccaaccccaggagccgagcatgctgcccccgcgtgcagcgcccgcgtgcaccgggccgggagagggggcgacagggcggaggcggtggcccccggaaggtgtctgggaccggaccggctgcacgtgagcccagcgcgaggtcatgtgcaccggctcagcccggttcggcgcccggacgtgctgcgtatcaacaaaatgaaactcggggagacaggagggcagatagctccaggttctcggagcccccgcccgggccgctcgacctccccaccgtacccatctcccgccgcagcccctacgcccggccggagcccgcggggaagttgcagccctggcgcgcccccgcccgcccgcgccccctcgccggcccgggggcgctttgccgcagtcattaataaagaaggtcgccaagctcacccttccaaaagttgttgttgcatgcgcccctctcagcctccccgcactgtactctttaaaacacgactgaccaacatgcgcaatctctctcccctgtgctgtgcatcccccccctctccgcgctggcttcctagaacaggcagccagcaggagagagagggagcgagcgagcaagagagagcgagggagcgaagagcgctggcagatctgttgcaaaaacgccaaataacgtcgtggagatgcgcagggcccatccgccgggggctggatcttaccttgctccgcggtgcccccctgacgggcgctgccctcggctacgcgccgctgcagggaccggcgcgggaaggatgctcccgaagccgggagctcctggggccggcgcgggagggcggggggcgcgcatccatccggggtcgcggcgagggaggcggccgggcccgcggcgtcccaggccccacgccccccgccggggacggtcggcccgcaggacctaagccggtgccgctaggagtgggcgcaaagtaactccatggacgctactcaccccccccaaaaaatagcctccaactgcgatggccgcggtcggcaccattcaccaaccccctgtgtatgtttctgtttctttttaaaccaagacttccttgtgatctctttagaaaaaaaaaatgtgttggggtgggggtggggtgggggcgggcaggaggagcgagggagggggagtagccacttttttcttattcactcggatctccgctcccgacacccccgtcgccgcccccccaaccccccgcccagttgtttggctccggcggggagtccaggtagcgttgcgggccccgtgggggaagggtgccctccctcgcagccccaccaccacgcctgctggcaccctgggcccggactccccatggactctggggcgcccctagcccgccctgtccccagggccgggcccgagcggcggctgcgcccgtgcaagtcccatcaggtctgctcacacttcacacactcacacacataccccgcccctccactctttcactcacactttctgctcacaccccgccccctacgcgccccagacccgggcggcgccccccgcaaccttaaaaaaaaaaaaaagcgagcttatacttaaaaaaatcttttggcgccatattaatgacgtacttaaaatttgccatttctccctgcgtcaaaaagacgtttctttgcaaataacagcctggaggcgacactcgcggagggaacgaggtttgcactgagcaccccgccccccggggctccagcgctggaagaccctcgccctaggccctgcttctgaatcgctggttttaaaatgcgaatcgaataaattgcgtggcgttttgcagcaccagaagtgagcagaaagtgctggcaggaggggagtggaggggcgaacgcgagtcttggggagggggcgcggccctcctccccgcacccactccaaatggaaaactaacattccgggcgggggaacttgaaattgtaggcgacctcaagaaaagaggggcggtccgtagagagggtccccattgggctcgtcgccccctcccccctcccgggtgcctcctggcgcctagcgctgccccgcatttccggggggtggagaaggcagtgatgagcgggtgggtgggtggttgcacatcctggccccagcaggattttgccccggggcgaccccttcctccttgctcttccttcccattaccccgaaagggttaaaaaccgaggggtaacttccaaaggctggcacatggcgaggaagcggggcgcccctctccccacccttcgcctcctcgcccctcctcctccggctccacttcccgacttgaccttgtggtgcacaaacagtacgctcggatcctcgcagtttctggaagaagagcctgcgctcgccaggcgggcgggctgtcgggctgctagccggcggtggcggggccttgggtctgttcccggagccgcgggccacacccacccaacccgctgcgcccgccgagctcaccttctctcgaggaaggagaaggactggcctcctggttggggaggaatcgggggtcaagctccaacctcctcggaatgcctctagctggggagggggtgggtctggcctcgggaggaggttgtggggagcctggcccaacatccccaaagcatc

SEQ ID NO: 318114 - DNA, 4001 bp, Homo sapiens
ctgtactgacaatgatattgttagagaagagaataatggataaaactataatagcccatgtggtaaatgtaatattactaatacactttacctacataattttttctggctttaattcaatgaaatccattatcctgggcgggaatggaacctcctcatctcacgcatctttagtctcctgaactgccttaaagccttgacataataaaaggtcaagcagatcccagtaagcatttgtaaattacaatagacccccatttcagctacaagccacacattctcctgctcgctttgctcactctctggtttcatttcattgtataagcagactaatttggaaacggctgggctagggtgcttgggaatacctagattttcaaaacaatcctactttcctacttaattatttacagaaggagacccttaatacaacatctgagagaactgtgaaatggttcctggatactgaaggaatgaacatcagatagcagcactattaaataaaatgaatacatttcaccttccagcttagctgtgcttcctgggacacaaggcacaaacatgaaaaggttggggtggcatttcaagaaaactgatttgcttcaacattgatttggtaagatgctagacacaaaataataccacaaaccgcctcccattcccatcattgtaaattcagagtcctcaatatcatcccccacaaacccaattaaaaataaagaggcaggctacaaatttgcatctagttctatgacacagatcaaacgataggcatctgttccaatcggtcacaatgaaactaagggacaataaccagagtaaatttcacattaatccaaataaagccaatgaataataatataaaccagaagcatagtttcaaaaacatgcaattacttccaggcatgcaaggacatatgtaacccataaaaatggttgcaaagcacaccctacatataaatatgcttcataaatgcaatataaatgctaagtgacatgtgtatatatgatctgtatatccataagatatacatgtgtaagttcacagtcaaatctacgtataaaataaaactgggtcttgcaaatgatttctcaacaagagtatattagaatataaaataaaatgtcaaattctggggccactttttctaagcaatcaataaaataagcaaaaccaccttataatgagtctggtaagcttatgagacaccaaatgtatttctgaagaaggcccaaccctgtatgtgagagctgcaaatgaaatgattcctttcaataacaccctcttcttgttgttagctctttttccaacccctgatgctgttgctaagcttaggaaaaaaggcaccaagtggctcagtctgcattctgagccagttagagataaaatcagaacaccattttttttttttaaacacaagaggttgtcttctcacttctctcttcctggcaagcttcctctccctccatcctcatctctgtctccacatctcccccttctagtctgaggcacgggagtcattgttcaagttcaggccagaaatgtatacacaggtcaaataagaacactctaaaccaagaagggagccctactgtttcctactcaccatgctgagacccggagaagctgtttaaaggagggagagatgcaaactgaatccattttccttgtgaccgagtcggatgcagcctccgaacccaacatcagcagtggctgccggttttttttttccctctgtctctggttggcgatggtgcgaataggaaccacccttccagccccactagagtatcagcaatagaggcggcggcggcggcagcagcagcagcagcagcatcaccagttgggcctcctccctctcggaggatggggtgagctcggaagcagccaggaacttgcagcagacacctcctctggctcctcctctctctctccccctcccccagtgccccacccctgctgcggtagaggctgctggcccggcagctgctggttgccatggcaatgaccaatgataagcgaccaagctcagggggaggggagatgggcgaagcaagctgcagggtctggaggggagtgaatttgtgctgctgccctctaggatgctcttgatgtctcctaccctgaactccaggtctttttaaaaatggggcaaggggggctaggcacggggagagaataattaaaatttaattgaaatctagatagaaacataccaacggcttagctattttttgcattttctgtggttttccaataaaaagtatgaaatttattatcagaaaaataacaacaaatgtggagaaaattatgtcgcataatagcagattattattacttccaaacgtgttcgtcctttatagcatcttttactcaataccaggcaacaaggtttttagaaagcaaacggagtggctggactttgtaataaattaagagtctggttgattcctttgcactactcccggcttgttctcaggtgagttacttggtttcactgtttttccagctacccttctgaacaggacttggaggtaattgacacatccctgaggaaaagtaagtttggatagagaccgaaattcctttcaacaaccactattctcggtagcacaagttggtggacagttcccaatctttttagtgtcaaactcctggagcattcaatttcctgcaggcaattcctgtcgttttcatggatgcctttttggagttccgaagtcagttggcagtcagggtggtgggcaggaaaagggggaagtgaaatcagcaatgtccagttctaggcgagttctgtttctaactataaattatagatgacaccagtatttatctcgtggaggggttgtaaagattgaatgagataatgcactaaaagcacttggcatatagtaagtgtacaataaatatttactattagcagcatagtagtacattgcagccatctcttaatctaagggtttaaggggaataacatggcaatttcaggtaggagaaaaaattaagatgagaaaatccaaagtacgtaataaccatgatgatgatggcaaagacagagaggccctaagagattaagtgttctctacatcttgatatttgaggacattgtaaatctcagaggagttagatacatttcccaaattcacaactgataaacgacagaaccggaatcaaaatggactcttctaacacttacatttgctctcctaaccaccacacttttctgccactcctccataaaatggaaataatctttgttcttaatccacagagttatttacaggttcaaatgggtttaacacaagttccagagtcagacgatctaggctccattcctagcgccagtatttactataggtataatctggaacatatttattaacttcctcaaatctatgtttcttcatctgtaaaaagaaataatcacagaacctcatgagtcattacaaaaattaaactagatgacgtgtgtaaaatgtacggtctttagcagataggaaatgttcaataaatgtagctacagttacttgttactcatttgtaagtaactaatattaaaacatgagaagactttttcctgcatggtgtcactcttaatgtcaggggcttcttctaataaaactggcttgaagataactaggtgatgaggaaagagttgcagcagttccccagcacgtgacactggctttccatccacttggtgggaaagcctgcaacctcctttgtgcagctagtgtcccctgccttctgtcaaagtctcagcagccacacaacctgcacacacttccaagtcagcatcacctatgtgtaatgtgtaacataaaggaatgggatgtgatcatctcgcttctttttgtattcctgtattttatcttctgctttctctgcagagatgttcttgtaagtaagcagaccaggaagctgcaggctgtagaagttatgacacactagatgacagaaccctccacactgtcctcgggacagcatttcatccttagcg

SEQ ID NO: 318115 - DNA, 4001 bp, Homo sapiens
tttgctccgtaagacaaactattttaaataaaggtgacaaggacaaagaagagttgacatctgggcagttattgctggaagagctttaggggtagaaaaatgctcaggtagcccatgcttacagaacacttttcttagtggctttaattgcgcattaccagtactgagtagtacacagagcgcacttactacttttgataaatgggggaggaaataaagacgaaggtccttcagagagtcaattaagcagccaccgagagggatgaagggcaaggtagatcaggaacccctcttggtttccgcttgtccagaaaaacaaccgtcctactgcgcacacccgacaccgaggctccagcctttggtttggccagtaaaccaaaagcgaccagtagagcccagactaggagctcactcactcacctcctggatgcgcttcctggcccgctgaagcacttcttcgtagcccttctgccgcagctcgctgaggctttcgtaatactcctcgggatcatcggtctcggtgaagagcacctgggagaggatcttccagccgcaggtgtccaggccgtggcccaggtagacctggagctggtaacacagagtgtcgatttcctgctcggtcatctcgggggcgcccccaaacagcacagtccacatgcccgaaggttcctcggggaacaccggcaggcacggctccaactgcgagttcaccgagcacagctgctggtgcacggcgcgcaggtcctggaaagaaaacagtccggcccagctgcactcttcggccggagactccagctcggtggcgggcggcggctgctccgcgtccgagagcgccagaggtgcctcgtcctccttcaccatttccagcacctctatctcctcggagaccgtcccagaggcgctcactatccgtacagaggacacctgggcctctctgggcgccggccgggctgctgcagcggctgcccccgccgcatcgtcggcttcagatgttttctgacccgggatgggtttggcccgcactgggctcctaagacgactctccgcccctttgctgccaggactccgcagccgcgggtcccccagaaggctgcgagtgctccgaggagagccgccctccgcccaggccgagctccgccggggcccggggctcctaaccagagttgcagaggcagtggcctcgggccgacccctgcccgccgggctgccgggcccgcggctcccgtcggacgcagctccgccggcctcggcgccccctcgcgcccccgcttgctcccgggagccgctcctctgcctctgggccgtccggttgtggcaggttatggcaaacttgccctcaatctcgttccaggccacaataaagacgaatttgtgtttctcgcgctcgtcgaacacatggggccgcacagccacccagtccgactcgagcgtctcctccagcgcgaacgacatggtggctccggcttctcgccgcggggaagggccgccggcccggcccgcccgaggactccccgctggctgcgccgcgccccccgctcaccctcgccgggcgccttcagccatcttagtgcgccggccggctctcccggctcgttcgcctgtccctccgcgccccgaccgccgagctcctttgtggcgcggatcgagagaaggacaataagcgtcccgggagcaggtagttcacatggtcacctgcggccggatctgtttacaagctccgcgctgccgcagcgcctcgcggccgcccgccgccccccgcgcgaggccgtggagctgcgtctgcggcgctccggtggtgaggcgcgggtcccgcggggtcaggccggcgctgtatgcgtcccggtcgctcgcccaggtcaagatccccgcccccgcccctggtgctgctgcagaaagcccggagccggcctgactgatgaacccgtctcctaaactctgcgcctcagcatcgccacaatgttgccattcgactgctgacgtcggcggctccacgagggacgtaaacatgggcacgtgccgcacgctggtgacgcggcggcggcggcgcgcgcaccccgcccgcgcgcgccggcgcctcctctcggcgtcccctgagccagcccgcgagcggccgcgctcccgactctccttccttccgcgcagcctccagttccccggggctggagccggctgtcggctggttgccggctccgagggcgatgagagtggcaggtgtgccctgctgcacaggtggcctccgaacccgggaaaagaggaactaaggcggaggaactgagacgtttcgaattccaggtattgagaccctcgaatgtacatttgcctccattctcctggagggagcccggacggagagtcgctcctgcgttcagaagtagcgtgttgccgcggggaacggtgtgctgaactatgtggggctcgcccccagcctgttaggttctcccctaatgcccttgagaccaaaacaaaaaacaaaaacaattccagaagcttttctggaaagacagagtttaatatatgaaaggaaggtgtctgaggaaagcccagtaacagtccaaaacaaaatgaaaaatgaaaatgccatgtcctaacagcatgaatgtttacatttcagttcattggtgttttattgcttcaggtttcatcattatgtactgttctgtgaacctcgttttgaggtcactgggctttagcccttttgaagttgtattcaattatgggagttcccagaatgcatatacaaaaacagtcatatcaatctctgctattcttactaaactatgatgaaacacattcttaaaattagtagactttataataattattggcattctttttccgattagtattcaagtcacagatgttgtgcaccatagtaaagcacaatggaaattagttcttttacatttattcacatttctaaagtatatacaaaaccgtttggattagccttgtattgttaggttcagtaaaaacagctgtttattcagatgacagaacagtactgaactagctaagcttcaaacttagttcagtattgtccatcttaaactctaagcttcaacacttggttcagtattgtcctgatatttgaataaacagccaaaaaaaattttttttttgagacagagtctcactctgtggcccaggctggagcacagtggcacgatgtcagcttactgcagcctctgcctcccgggttcaagcgattctcctgcctcagcctcccaagtagctgggattacaggcacacaccaccaagcccgactaatttttgtatttttattagagacggggtttcttcatgttggccaagctggtctcgaacttctggcctcaggtgatccgaccgccttggcctctcaaagtgctgggattacagtcgtgagccactgagcccagctggtttttaacattttgtacagttcattatttgaaaccacaaattttcaaagtttgtaactgagtttgtgtcaaatctcaaatgcaagtcagagacacgttctgaaaggcaaaaaagagagaaaacccatttcaaatctgaattacggggctgggcatggtggctgacgcctgtaatcccagcactttgggaggctgaggtgggcagatcacttgaggtcaggagttcaagaccagcctggacaacatggtgaaaccccgtctctataaaaaatacaaaattagtcgggtgtggtggcacgtgcctgtaatcccagctacttgggaggctgaggcaggagaattgcttgaacccgggaggcgaaggttgcagtgatctgagatcatgccaccgcactccagcctgggggacagagactccacctcaaaaaagaaaaaagaaaaaaggtttgaattaccagctaagcaaacaatagcacattgtagaaaactttctcttcttttttgctaaaaagcaactgcaaaaagctagtttttctgataaagcattactgacatgatcccattatgtataattgtgaatacagagaatgagtattaaa

SEQ ID NO: 318116 - DNA, 4001 bp, Homo sapiens
tccccagtcaagcagcatcccaggatctgtgagaggtgaggcttagaatgtcaaggccttgggctgagctttgcagacctgttctggtcaggactggtaacaggacaaccagtcccttccttgccagcaggacatgtaactcagctggacaaatgggccaaagcctcttcctatgttctaggatgtaaatgccaacccagcttcagcacctaagatctgcacccagagatctctttcctcggggctcagccagcctgatgcccctgggagctgggccagaagctgggaccccttcttccagggggtttcaaggacagcttacttatggagatctctgtggttctaaacagggtgagaccaaccaagttctaagaggagacttattgttcacttggggtcccttaccccattacacttctactcactatcaggcctgtagggtaggagcttaactcccacctgtatccaggatgggggctctgatggtagaatttgaatgtttaagtgtcaagctgcttaaaatcttaccactcgtagtgacatttgaacattaaacaaaacaaaacccatcatttcccgtttcctaactgcttccagtctctttattccaaccactaacttttgaactgctggtaaggagacctgcattgtcctccagggcccaacacactggttccaacttcacctggacccatttgaggactctcccacggatggtgagatcagccatgcctcggctggggacaggtggtgaaggaacagcgtccaggcagaagagactccacgatattatgctttttaatccttgatgtaagctcagctcgcagccagcccttcacggttgctcctcctgactcccggagccaccaggacatgaggcctgggagttttacccctggcagcagctgattccttttggcttgcagaggttttgggggtgcagacagagcactcttcctgatgaagggactcgcaggtctgcacctggcatagccgcctaggaggagtgtgggagtgtggcagcaccctcactgagtgctcaaacgccagctgtcatgggaatgggaagagcttcaccacacttccaccagagaatccggtcacccccacctgtgaacatgccgcttccttcggctctcagagatttccccaggaggagagtcccgacacctggtgccccagaggggtccagttgccgctggggcagacgtccactccggctccctcctctgggtgttcacaccagccctcccgccgatttctctctcctttggatacaagcacctgtccgggctcctcgtggagaggagagtccggactaagggaggcaggtggcacagcccacctcggcgcctagcacccccaagcccagacaggggaacaaaaggaagaaggtggcttacctttcgagggtcgcctttgtttggtttgcagagatgagaaggtgcccatgacggcccccatggcagcgaagacttgagtgcgagttgggaccccgggcccggcccctcccctaccctggaaagaaatccccgtggtttgtctactctgaattggaggagagaaaagcgcccggcagctcgcctgcagcttggtattcagcaagcgtggaggcgaggctaggaggcttctggcttccttcttcagccccgcacatgcagggactcagggctagccgctccccgcgagccttcggaaccgcttccccgcgcgaggacccggcccggcggttccctcgcccagggccgaggacggtgccctgaagcctgcctggcactggacacggggccagagcggccgcccggccgaggctgccgagccagcgccgcgtgcggtgcgggagccgccgtccgcccgcccctcctgccgcacactcggctcccctccctgcgctcgggctgggtctcggagggccgagtaccaatcatgaatgaacagagcccggaccgcgcggcgcggagccacagcgcgcccgcctgctgcctgctgcctgctgccagcgctcggggcgagagtcggagcggcggagggggcggcggagggggcggcgggcgggcaactacggaggggcggggcgggggcgagggctgcacggtgggggcgggggacgcccagccctgcgccctcacccctgcgcaccctcatctgccggggtatgtgcgggagccccgggagcatgtaaccctaagagacagacccggggccaggcacctggctgatgggtgaggttcagggggcagtagattggccccagggagactgtgtgtgtgtatgtgtgtgtgtgtgtgtgtgtgtgtgtgtgtgtgtgtgtgatgtgcgtgcgtgcgtgtgtgtgtgtgtgtgtccctgtgtgtggtgcattgtgatttcattcgacttcaagggaaatcttatttaacccactgcctgaactcatggggagggggaaagtctgccccacccagaaaggggtgaaaaacacatccaaatgggtggtcatgggaagaaggtgccgtcctgctccgcgggtccttgagggttctgcagaatcctcctatggcagggcccaccttctagtgacagggagttggggaggagaaaggagccctcagcccctctgggcccttacactctcatttttctttttcttttttttttttttttgagacggagtctcgctctgttgcccaggctggagtgcagtggtgcgatctctgctcactgcaacctctgcctcccagattcaagcgattctcctgcctcagcctccggagtagctgggattacaggcgcccaccactaggcccagctaaatttttttgtattttttaatagagacggggtttcgccatgttgggctggctgggcttgaactcctgacctcaggtgatccacccgccttggcctcccaaagtgctgagattacaggcgagagccaccccacccggcctgctctctcatttttctgtttctttcctccttggttctacctcttctccctttccagctcaataattcattagccatcagctcctgggcacgggttgttagtgcttgaaggggcaatgattagatttaggaagccatttcccttctgtgagtggcgtctcacccaatgggcaaagtttgcgtccctgcctgtggactcaaagccttgtggtgttgaattgcaaggtttgctccctggaaggtggaggaagagcttcccctcccccaagtctgagctgcttgggttcccactgagacccattttgattgacactgaggatcctttgcccaagctgccccctacaatcccacccagccattttctgtctgccacacagatacacaccatgctagcagttcacagaatacccggatgtatggcctcataaacaagcatgcatgcccagaaagtcccacaaacatatgggcgcaggtccttaagtccgcacagacattgctattgtacacacagacagacccaaggctcataatacacctacagttgccccccacgaaggtggagagacacacaaacacacaggcatgcagacgcacacacagcaaaacagcatgacagtcaccacattcacacaggctcaatgccacataggcacagagttgaatccccaggatacaggccccttgagagctgcttcccctaatgccaacccatgagctgtcccctcagggccacaggtagcctgtgacttggccagggtccttgaatagttttcttcacctgtgcagcatttattgcttttctgcaatcccagcatgtgtcctgttttgtgcaacaggggaggggcacttactaacatacttcctttcctttgcattgcccactgctgtgcaaccacattgtccacgtgatgcccaccaaacccctgtgaattaagcaggtgcctgatcattaccccagagagaaattgaggcttaccttgtgttagaaatttgcctgaagttgcccagccaggatgtgggattagaacttgggttccaggcctctgtcgtggtctcctggggaacccctgctc

SEQ ID NO: 318117 - DNA, 4001 bp, Homo sapiens
ggggacaagccctccatgagaggctgcaatgggttgctgccccacacccattaccctcttaggtcctgctatctgtaatgaggaaagaaaaccttccagctgtctctgaggattgaatggggagactttgtgaaatttcctaacccctttgctttctccttctccaggaggtaaagccactgagagcaatcacagctatacccattaacctcctgtttaccccacttctggcctccaggaattctgccaggcagcctggccctccacattgggggctcagcccacctgggtatcttggaagagcagtgccccacttcagaaggatggtagggaaataacaggaaggtcagaacatcccaaggaaggagataaacagaatcccatcattcccaccacccacacatgccacacaacgtacactgggccagacccgctgggtggcgggcacctgagccatgtcatgagatctggctgcatatagcctttctctgctctcattgtcattttgtaaaatcccatcaaagttttgtgggctccttccctgaatattctgcctgctgcttccagtgcctctctccccagcccccaaagactcttcctgaaagacagcatgaatatttaaagacgttttttcagccagtggaaccacatcatgctgctgctctcccttgacatcatctccacaaagttggccagacccctctgagggcctcaccttccctggtgccaagtgtaaaatggggtttaagacacaggactgggccctgaggagttagccttctttctgcctcccggctgtgggcccatctggggctgcagccctaattctggtccatagccacactttctgatctgcccagacagttactcctgcaaaccacctgccaccccagttcctggagaagcagaaaagacaggcatggacataggcatgaaatgtggagggacagggatccaagaaagcagaacgatgaatgaagccccagaagcacgagacgctggaaccctatgagaggaggctcttggcacttgaggtgcagagctgatccggtttctgaagccaccagggcaaagcagatgccggcccatcaccacctcccactggccccctcaagcgtctctgttctgcagaattactcacaacccactgcatcaaatctctcttttatcaacaaaatacaaccttccatggataacttcttgaaactccagtcacgctaagccacttccaatgctctggaaagggttctatccctctgcccgcccataacgtatcagccacacaccaccaactccatttccaaagttccaggcaattacagccagctgagttccctggctgggtgcccgcctactcaaagccaggacgcaggttgtcagcaacctcgaatcccagccaccaatttccccagctttttccaagacctgggtgcaccagaatggtcacgctcaccacaccgaggcaatgcgaccagccaggccatatcaagacagaaagcaagggtcaaggccagtttccatacctttgctgagggtcccagtgatgagcttaaagatggtctgggcaaatttcacgaacccaagcttgcatcttttggagcagccgctcatggtggcggaggggagccaggctctgctgtcagcacccagaagggacagtgcccaccttgtgcaccccaggaacttggagcctgcctgggtgaatgaaccctgagtgacggatgcacccctgaagccaggctccgggaacagcacagctgcctctgcagcgagtctggcttctgcatccagagagcctgcagggcaaactctccctccctctctccacccactcctgctgtccacttaagtcctcaccacgggaggacctcaggatgccagggccgggacagcactgccggggcacaaggtactccaagggaaccgaggaggagagtgaagttgagcagagcagggagggaggagctggagctctcccaggctttgctgactgtctttcttacatggcagcggtaatgtagcaattaatactcaagtcagaagggaggggactgctacgcagaaaacactcagccccacagcctcccacactcgctctcccactctttccttcctggttaatctgatagatcaattctctgtgccttgatcaggatctggaagaactccccgcagagcaggaagcagctgtcggcactcagcagaaagtttgtaggcagcctcagagtggcctggtttgcatctcggagaagctgggctgagtgctgagcctccggggagctggcctgtgaacatcggacagacagacagagccctcgcagcctgtccagtaaccttggcaccaacagcaggtgctgtctgccttcctgacttggaaaggacaatgcccctgaccacctcctgctccaggcatccccgactcagactactgaattccagcctccacccctgcggagcaggcacgagtctgtgctctctcaccgggataggagaggagtgcaattagggcttttcttgattgagatagtattcctcagaaatgtcataaaggaatgaccgagattcatataattagaatacaatgcagtactcttaacagtgaaactgcaaggcattatgcaaatgtgaagtccagctattgctccataaaaaacctggctgccattcagtaccataggctccgtgagttggaagggaccctggtggcagggacatctcattccaccctcttcaccaggtgtgaacctcccccaaaacaaccctgctttgctttcctcagaaagtccttgtgggccctggccatgggtacatctgtgaatgcagtgtggctacttgtgaatagcagatatgaaacaccttcatctgaataaggctatgccttggaaagtctcttcttctgcctcgactgtctccctttgatctgcttctctgggatgttcaagaggaatccgttgcttaagagacagagaatggagactgagttgacaaatgccagataagccagaactcatgtatcaggtctgatttttaccccgtgttctgggagtcaatgtggaagtgaatcttgaagaaagaaacttcagccttcagagtgctcatcaacaaatttcagctctgaaaagaggcctgggagacagtctgcaaactcagagcctcctcaaaaccccgaagccctcaagccttgccagcatggtaggagtcagagcatatataacagaagtagctctagcaggaaataccccattgtgctagatgtcttagggcttaaaattgccgtgttatgcactctctgtcttaagagttgaaggtcccagttaaaaggcacatggtggccgggcacggtggctcacacctgtaatcccagcactttgggaggctgaggtgggtggatcacaaggtcaggagatcaagaccatcctggctaacatggtgaaaccccatctctactaaaaatacaaaaaaattagccgggtgtggtggtgcacacctgtagtcccagatacttgggaggctgaggcaggagaatggtgtgaacctgggaggcggagcttgcagtgagccaagattgcaccactgcgctccagcctgggcaacagagtgagactctgtctcaaaaaaaaaaaaaggcacacggtgtctgagagtgttaatggcacttagtctttggttcactcattcacttatccaatatttactgagctcccagtgtgtaggaaagagctgagcacccaggatgcagaaagggctgagccagacaaataagacgacaaagtcagagccctcatggacttacagaggaggagattcaccacgagacactcagtccttgttgagaatcagtttatctaactaacttctttcactttgcagaatcttagtggaattgaggcatgaggcaggtaggtgttaagacggtcatggagcacgacctggcaggcaaggagtgggcaaagagcagacaacctaggcaccatggagaaggatcagagacagaaagtttg

SEQ ID NO: 318118 - DNA, 4001 bp, Homo sapiens
caatccttttcctcctgttctgtgatcttgtgggaatgggagagcccatgcctttttctacctggcgtcagttgaacaagactctccatgtattcacaggtaaagcaacagaatcacctggaggtaagctaaaagccccaacagcctgcttccccaggacctgcaagggtcactggcacttggccccaccccagatactgtgagacataaatcatttgaagccaatgggaaatcccatcttggaagcctagggctgagtgcccacaacaaagccatttctctcctgggggaactggatcgcacctgtgggggcttcctgtggctccttcctggctaatcagccccccccagcgcccagggccatggcctcctctgctatttggcttctagtgccctctcaggcccctgggcactcctgaggctggtgaaggcaggaacctggttttaccagttttaggagctcagaaggaaaggaaaggagaggcttccctgtcacagagaagtctggaaacttggcttattcaggtctgacccgtctctaatggtctgatgagattgttgcctgcactgagtgagtttatagagtcatgataaatcctcctaagaccatgcgtggggttcagtgtagatatgacttcagcaagaagttagtattcagcatccaaagggagaacctttggcgggaggaaggatgggaactgtcaatatcccccaagggacagaaagaaaaggaagaagtgggtttcagctatcataggagggatttcagttagactgtaagaagaacttcccagttttgagcatttctaaatatctctgaagttccaggatatatcttcccatttagaaaggtcacttgagatctgggatagattcagagaagatggagaaggacaaaggaaggcaggactttggagtgtcctgggtgacctgatagctgggtcgacatccttttccttagaaggacaaggaatagagtacattgttgaacagtttggtggggtgtggacagggcgattctgaggtcctcagacatggaatcaaatcctggctctgccacttacacttagcaaccacatgactgtgaaacgagaaccatggtacctgcctcagagagttcagctaaagatcaaatgccatattgagtatcagacatgtatcatagcacctagccccaaatcagcccccagtaaatattagctattactactaacgaaggaaaccctgaaagtttggagcagaagtctggacccctcttgatgaatctatttttgtcccacctctctaccggtgacaagtgccagcattggtgttaatctccaggctgcagccttctggccactctgagaactgggacctagagggccagggcgcttactaccagagtaacctggccactgtgccaccctccccactggccaccagaccacgggccctccatccagaaggacagccccgagaggaagggagtcctcctgcctgcctccctccctgccccgtggcaggctgctttcccctgtctccctccagcccggtcttcagagaaatcacttcccaagtgctttcaggcccggtactcacagtcttcccggcgtcctgtgggtcttgagcagcagacagtttctttctgcctggacccccgcccccaccccaaaagaggccacagagcttcagcaggaagtttggcctccccgcccgtctccagggaagcagcttttggtccccatctggggcaagcctccatgcccaaacatggtcaagtctgagcacacagcctggagacacagactcggagagcaggtacccagccctgaggaaggcagctgttacccaagccctgcacctccatcttcccagagtctcgtgggaaacagatttcaaacaacaacagacagcaagactgagaaactacgaaagatcagcctggtatatttggaaatatttcttcttctctctgtctctgtgggctggcaaagatgccagaaataggaaatgattctccttttgttggcatgaggaagggtggagttgggctggaggggttgggcttgtcactagtccctggcatatccacgctggagcagctacagctccctgcctttggcacttacgtgctgtgtgaccctgagcaagttatggcacctctctgggcctcagtttccttttttgtttttggttttactcccaaacttatcgttaaatgacctcagttttctcacttgtgttactggcatttttaaaacctactttgctttagggtagtgatgggagttagagacggtggggatttatggcaaggggagagaactgactttttaaggaccaactgagctgaagctgggagtagtgagagctccacaactgcttccaaccaggtccagggacagtctgctcaccaggggccctcccagagaccgcgaaagtacagagatttcttcctagcaataagacaagtgaatgtcagcatttgcaggcaaaaaacatgcttttagatctctgcttcttcatctgtaaagtggaagtaaggattaaaaatcagcaacaaagggcaggcacagtggcccacgcccataatcccagcactttgggatgccaaggtagatggattgctcaagcccaggagtttgagaccatcctgggcaacatggcgaaaccccatctctactaaaaatacaaaaattagtcgggcatagtggtgcatgcctgtggtcccagctacttgggaggctgaggcaggagaatcgcttgaacctgggaggcggaggttgcagtgagtcaagattgtgccactgcactctagcctgaacagagcgagaccccgtctcaaaaaaaaaaaacaaatatatatatatatatatatattttcaacaaaacaacaaaaacaatcccagatattggggctttcctaagtatcaggcgtggtggtagaaggcagcttatctccacccttcacttgacccaagaatcaaagaacctgaaactgagacttggaggcttgaagtcactggtgcaaccctaggggccagaactagattcgaagctggcccttccagatggcacagcttggtctgtctctgatgaccctggggctgctctgagacattaaaaatcacctcgatcatacagtaagctgccacctgaggctctggaggtcaccctgagtttccccagcccccagggaggtgggtgcagcctggccttccctgctgagcgagctcaccaccttcctccctcctgcctccagcaggcgcgaaatgaaggcagccactcaggcctccctgacacactctcaggcggtgagtgcccttctccacccctttcctaattgaatcttattaacaggagactacagtgtctgtttaatgggcaccatagcaccagagggtctaagaccagcttcagaccttgcaggcagattgacagagggatgtaggatctggaattcaatctcagaagagcaattttccaaggatgatcctctgtccactcagaagcaggaaaagtcctcctggggctaatccagaaatgccaggcccccctcctgcttccctgggggagagatacacagtgcaacaggctgccatttatgagtataaccgaagggctccttgctcgtgatactctgaataagttattaagggctacatattatttggaaatcataaacaaactttagcattcttcccaagggaaggtgggaacaaacagggaaggggggccgtggggtcttctgctccccctaaatgagccacaaccaaaaggcattgacaagccctgtcctcgagggtttgtgggtgaaaacccaggtcctttgctggctgcggggttgtgtgtgacagatggctacaggtggagggcaagaaaataacaatgctgcaacaataaatattgacggtttgcattagtacggggtgtcagagatcacaaaatatcttctctgactcttccaacagcttcttaaggtactagcacaataggctcacaatagaccactgaggtgg

SEQ ID NO: 318119 - DNA, 4001 bp, Homo sapiens
aactagagcataactggccttaaggaacaaaatgtgactgatctggagaaaaggatccacctactgaagagaagtaaaaatcttaagggtccaacaaatacacctcagaaaatgctgcatgtttatatgctaccctgccttgtgttgttttccacttcctgaaagaacaggtcaggtgctaacggtaacaatacagcatgtgtcttctgtaacctcaagcaaggacatgatggcttgaaaaaagcctctgctgccttgcgtttctctaggctgactgtagggctttgggtcattcataaacagcaggacctaagttacctgtatttccctggcgtggtacacgatgatcagaccgagcaggatgatcgtggagagactgataaggcatttcagagctaaggaatacagcgacgcctgcaacacagtcagacagaagcacttttaagaaagaagcacttttaaccgccttccacgtccccagagtcagtcagtcccccacaggtggacctgaactcacagaaggaagataaggggagaggggtgcacctgtcttggctctgtgatctgtcagatcactcggcctcaaaaccaaaagagacgagagtagacctggaaagactgggaagacgcgtggctgggctgctgggtccacgccatagaggaccgaagcgagcgccgctgttccaggctagcaaaaccagaggaacttacttctgagttcaagagagcgggttgaaagggcccttctaaacataattcacgaggggatgaattacagatggtttccccaccgacttccagaaccacttacttaaggtgcccgaatgcgctgagcactcttaactgcctcgagaactttggctgcacgcggaaagggttcatctccgagttgtttagctgactacggatgcgcgtcctagacgcgcccgctgtcctggcgggctcccttgatcgtcccggagaggctagggatccgcacgcaaagggtccccgccagtgcccatcccaaccacccagtgcccgactccggtagcgtgggctggggttcaagcctgtaccttgtcgtaggcgccccacgacagctcggtctcgatgaccatgaccacgatgccgaacatgccgaagatgagcgcgtagtcgctgagccgcttgcgcttttcgaacagggcgcgccggtggcccagcttgtagccgatgttctggtttttctttttgctggacttggtgccactgctgctgccgtgcccgctcccgccaccgccgccgcctcctccagtgctgcctccgccgccggttccatagagcgccaggttgttggagttgttgtgctcgggcttagacaccacgatctcgggggctgaggacgaaacagcggcggcggcggcagcggctgcagacggggaggacgcgccgccacctcctccgacagacgcggggggctgcaggggctgcgcctctgagtccatctcgtgcaggttccggcgggacgcgctcaagttgctgagcggccgcatgacgcccccgttgtacctgcagctgctcatggctatttcggtgaaggggttgctctcgcggcgcgcctggggctggtggtgctggtggtgcgccgggtgcgggtggtggtggtggtgcgagagcgggggcccggagcccagactgccgaggctgcccgtggggctggcggcgggctgcaggctgtggcactggtggtactgggaggcggacgccgactgctgcgcggactgctgcgcgtactgctgccggagcgcactggcatggctggacggcgtcagctcgctcacattgagctggctgccccggcgcgacgagcagcagcagcagcagcaggacgagcccgacagcggcgaggaggtgcgggtccggaaggcgccgccgggcgaggaggtgcggagcagcagggacaggttatctcccgcccccgccgccggggcaccggaggaggcgcagctgttgcaccggaggcatgggctgctgccgccgctggccggctgctggtgcgcgaggtgcgggtggtggtgagggtgcgggaggggcgcgaagggcgggcacggcttgtcctggctctgttgctgctgctggcaatgcaggtgtgaggagcgcggcggcggcggcggctgctctgggaagaagccgcgctggaactgcaatggggtttccatgtcagggctgttaaagctgcagggagaccaagcggtggtgcaccctgcgcaatgcgttatggtcgggagcggggactcctgctgctggtgcgaggaagggcccatgccggctccggtagaatccaggcggcgagtccgattggttgggcgcaccaaaacaatgggcatgacatcacctgcggggaccgagactgagtttgcggcgcgcgcggcttagggaagcgtgtgtggcagagaaagatggggaggggaatctgcaggacaaaccctaggggggtgcagtccagagccagggcgctccagggcagggattccgcctgctgattgcgtggagatggagagcccccacgcagtgcagctgggctgcagggggaggagaaaagagaaaggcgcccctccctcccgtgccgctgcccccttgactagtgccggacgcgctgcccggatcacctgcgccagccactgcagcacgtcgggccaccttggccgggggcaggctcagggacggtgtggaaccccgaccacttctccgactgcacgcctcgcagggctgcaaaacagcagccccctcgtcccacgcccgcttctcccagatcatcccgccgagagtgggctgccggctgcccgccaagtaactgcgggggcactggctttggggagaaaaagtttggcgaccggctgcgccagtgcagcagcgtgtggggagaatcccggggcctgagccctgccttggccgctgcgggatcatagccgaccccgagaccggatctttcccagccggcaggctctggaatctggattgggtgcgcggcgctctagcccaagtgcgctgcggcgcgggtagggttaaccgcctcggcaccccggccgggggtgggtgggggcggggccggaggaggggatccccgcagtctgccgacagagccggccgggcttcccgggtcccccctggcgggggcggagggctttccccgctaccgccagctcacatttgcgccttctccagaacatgaggggatggcgcccccggccgccgggtcctgggctctggcgctcaggccctccggcagcccgaatccggaggtcccagggcttccttgccggtggagaggcaggcggctcgctcaaaggtgtgggggctgctcagccaccgccggcctccagctgctcttctgcttctcttcctcctcctcacctgcagcgcagacacaaagcaaagaccggtcacaaatacgcaaatatcgagcatctttgccaagtcctaactgcagcggcgggtgggaaaggggcctggcgcgggctgattcaccccggtagtcgcagcctggcagggaaattaagaatgatagcttgggctgaatagtcgctgcccacggacagtgctggagttttgttggagttcggtatcattatttatttatttactctctaataaactaacaaaaattgcatttggtgtctcacaaattccctgtgctgtcttcttctaagagatgtaccaacacaatgcactaggtgatccttatgttctttgtttctgctccatcttaagtctttacatttgcatttctttgtgaattcaaattcccgtctccccctaaagaaggtgaaagaaattggcccgttgaatatttgtttccattttaaattattttaaagcctgcttttcatgataaagactattacaacgagttagacctagcaattagagtgaaagcggatcaccctcattaggtcattaggtaattggaattctcagctggatccaatttcttgatattctactcggcagctgccctaaagttgcttacctggtatctg

SEQ ID NO: 318120 - DNA, 4001 bp, Homo sapiens
ttagagtgagacacaatccacctgatagaatactatgaagtctagaaacattatttttcattactaccagtttctggcccaaaggagtttgagactcatcgttcctatcctcacaacaagaaaataaaaaaaggtgacaaactaaaaaccaacaaattttcttagatctagcagagaattaaggtcacaagacaaaccaccaccctcaaaactagggacacaggtagataaggaaaacccacagcttacttggaacaaaaaccacccaaaaaccacctctgaagccagcctcaggtaatgatacttaaaaggtaattgactaattgctagagactgtgcactcactagcttgagagagaaaacaaactcaggaaggcctggtcctggggtgaggggtaaggggtgaggggtgaggggtggggagtgacgggtagagagtggcatcacatttttctaagtttaatttccaggagctccaataggatcttaggataaagatcacagaaaaatcccctcctgcttccagcagagaaaatggaaaagtaaccattttataagcccagaacattttgttcttaacaatagcttgccctcataggaaattattttaccagactgtaaccaccttgggtttcaccagagcctaaaacacttgggaaaagggaaatacccaattacaggcaccccattccccatctccccccggagtgatctggcatttgagggaaggaaaacacccccacttcagccccttctagccttactgttgcatctaaatgggagaggaaaaaaacctgagaagcactgatgaaagtcacagcccagggacctgtacttattaaacgactgagaactaatcaccggactacagaatggctcctttcttctcacagctaaccactactgatatcaatagggctcttgtataataccaggggattacaacagaccggtttatcccagctccttttacccagtatcttatatctggctttcaacacaaaattacaaggcattccaaataaaaaagtgtgaagacagagcaagcatcaacctgactcagatatggtaggaatgttggggttatcagactgggatttaaaataactatgattagtatgttaagggatctaaaggaaaaagaggcagcacgcaagaataaatgggtaaggtaagcagagagatagaaattgtaagaaaaaaccaaaaagaaatgctagagatcaaaacactatcaaaaataaagaatgtcttgatgggcttatgagtagtagactgtttatagcgaaggaaaaaaaaatctctgagcttgaagatatttcaatagaaacctcccaaacagaaaaaaaatagtagtataactgatatgctaaaaaggataaaaagtgaaatcatatattatgctcaattaatactgcagaaatcagaagaagggcagaagacaaaaaaattaacaaaaaacagaacaagggcaatgaacagaaaataaagaaaaatatgataaataataatacaactatactaataatcactttaaacatcaatggtctgaatacattagtaaaaagaggctgtcagagtgaataaaagcaagacccaactgcgtccggaattggtgggttcttggtctcactgacttcaagaacgaagccccggaccctggcggtgagtgttacagctcttaaggtggcgccgtctggagtttgttccttctgatgttcggatgtgttcggagtttcttccttctggtgggttcctggtctcgctggctcaggagtgaagctgcagaccttcgccgtgagtgttacagctcttaaggcggtgcatctggagttgttcattcctccctgtgggctcgtgggctcgctggcttcaggagtgaagctgcagacctttcgcggtgagtgttacagctcataaaggcagtgtggacccaaagagtgagcagtagcaagatttattgcaaaagagcgaaagaacaaagcttccacagtgttgaagaggacccgagcgggttgccactgctggctccagtagcctgcttttattctcttatctggccccacccacatcctgctgattggtagagccgagtggtctgttttgacagggcactgattggtgtgtttacaatccctgagctagacacaaaggttctccacgtccccaccagattagacagatacagagtgtccacacaaaggttctccaaggccccaccagagtagctagatacagtgtcgattggtgcattcacaaaccctgagctagacacagggtgctgattggtgtatttacaaaccttgagctagatacagaatgccaattggtgtatttacaatccctgggctagacataaaggttctccaaggccccaccagactcaggagcccagctggcttcacccagtggatcctgcacaggggctgcaggtggagctgcctgccagtcccgtgctgtgcgcccgcactactcagcccttgggtggtcgatgggactgggcaccgtggagcagggggtggcgctcatcagggaggctccggccgcacaggagcccatggagggggtgggaggttcaggcatggcgggctgcaggtccccagccatgccccgcgggaaggcagctaaggcccagtgagaaatcaagcgcagcgctggtgagctggcactgctgggggacccagtacaaccaccgcagccgctggcccaggtgctaagcccctcattgcccgggccggcagggctggccggctgctcggcgtgcgcggcctgccaagcccacgcccacccggaactccagctggcccacaagtgccgcgcacagccccggttcccgctcgcgcctctccctctacacctccctgcaagctgagggagccggctctggccttggccagcccagaaaggggctcccacagtgcagcggtgggctgaagggctcctcaagtgccaccaaagtgggagcccaggcagaggaggcgccgagagcgagcgagggctgtgaggactgccagcacgctgtcacctctcaaccatgtgttgtccacaagaaacccactttaataataaagacacatatgaattaaaagtaaggcaacagagaatgatataccatggtaatactaatcaaaagaaagttggagtagctatattaatttcagacaaagcaaacttcaaagcaaaagagccgattagagataaagaggggcattacataatgttaaaaggtcaatcttccaaggagacataacaatccttattgggtgtgggcctaacaacagagcatcaaaatatataaagcaaaagctgatagaactgcaaggagaaaagaacaaatccactatcatagttggagatttcaacatctctctgttagtaattcatagatccaacaggcagaaaatcagtaacaacgtagttgaattgaggaccaccatcaatcaactggatctagctgacatttatagaatactttacacaacaacagcagaatacactttcttaagcacacatattcactaaaatagacatattctgggccctgaaagataacttaaaattttttaaggaatagaaatcatacaatatgtgctctcagaccaaaatggaattaaactagaaatcaaaaacacaaagataactggaaaatctcaaatacctggacactaaacaataaactctgaaatagtacatgggtcccagaacaattctcaagagaaatttaaaaatattttaaagtaaatgaaattgaaaatacaatgtatcaaaatttgtgagatacaccaaaagcagtacttggaaggaaatttatagcactgaacacatatattagaaaagaaggaagttttaaaatcagtcattcaagcttccaccttagaaaatgagaaaaagagaagtttaaccccaagataagcaaaaggaaaagaattaaaaaattagagcagatatcaatgaagtggaaaacagtaagtcaatggagaaaatcagaaaaatcaaaagct

SEQ ID NO: 318121 - DNA, 4001 bp, Homo sapiens
tagaatttttttaaccataagattaattaaatagataatgatggattattgcatcttattgatgactcgaaacacagcttcatggataatgtagcttaaagaaagtacaatcacaaagtttatcaactgaattaggatatttttgagagtaaaagggagcaacattaataattatgctgagggtaagtaaaaataggcagaaaatgggacaatggaattgtctccagcaaatcataatatgtggtcattctacctgaagttgtgcagatgatacctaaaccaataaatgctaaaatgattgatgaaaggtggtgaacacttgaatgagcaatttcagaaattcaaaaatatagttagaaagcacaaaaatctagtgttcagtggcaaaatagggtagctatagttaacaataatttattgtatagttcaaaataactaggagtagatttataattttctctacacaaagcaatgacaaatgtctgaggcgacagatatatctcaattacccagatttcattattacacattgtatgcttgtatcaaaatgtcacatttatctcataaatatgtacaactatgatgtatccacaaaaataaaacaaataaattcgctaatgggtaaaaacctcaaagggcagctgcctgttggtctctagagtacaatcctaggttttttggttgggtcttacatccttttgttgttgctatttttgtttggaggggagtgcgttttctgtttgttttattggggtggggggtgttgagagaaaagttttaagtgaaattttattgttcctttggaaactagtccccaacaatggtctggcttcttttgtgagggcctcaggattttgatcccagaatataatgcagtggctcatgataaattttattgctataaaccctgaagaaagttctgctcattagttaatagcatcttatttcgagtcacaatattcgggattccaccatcttgggaaagtgatttaacacaggagccaaagcaatcattttcaaaagaaaacaatttaaacatcactcatcagttcacaatcttcacttcttttagaaccaacacacaaatcccacaggatatttcctggccccttcctgttattccagcctcaactcctatgtggctcccctcacttgctgttccagtcactcaggttccacttagaagagtggttgacaaattcagctaatgttgcccccaccgcccccaaggacatttggatttggcaatgtctggagagatttttagctgtcacaacttggtggtgatggtggtggtggttggttggggggagtactggcatctaatggctagagattagggatgctactgctaagcatcatgcacagggcagcccccaataaagaaacatcctgactcaaaatgttaataatgctgaagttcagagctcgattttcatctttcctcagaccatgcttcccagatcttgcacacattgttctctttgcctaaaatattcaggctattttcccttatcctcctttcccgttgccctttcttctcttttctggtcttctctaactcccactcaccctttgataaccctcttatagtggctttacagactcttcttcccagatgaatgttactctttcaaagaattatggaacactaaagaatattagtagcaatttcacatgcatttgtatgtgttcgattacccctctccaccaccaactccaggtgggtagatgtcacctagcttatatttaccacagtatccccagcagctagcacagaatgaatgaatacttaatagcttcacttacaaaagggaaatagggtaaccatctcattaggttgtaaagattaaataatacatacaaacactttagcacagtgcttgaatcacagtaaatgctgacaccgaggcattgtaggcattgtagtttgtggacaggagaggggactccgtctgtctcattttagcgcctcccagtcttcctccatcacctaggtctgagaaactcctcctcctacctacgagtaagcagcaattgctacgcctgcgctttcctggttccacccctaaccaggctgccggaagcactttcctctttggcacgggccagccgcaggttgggtagatactgcgcaagctccatactcgtgtctcctcctcccgcccaccggtgcccaacctgctaacacgcctgcgcgagcgggcgtgccccggaagccgttctttggccctgtgacacgtagcaacggggctggttcagggtctgaaacagagtttgggggttgtttgggattagtgaagctactgcctttgccgccagcgcagcctcagagtttggtgagtgacccaggcccgtggcacagtgttcagcttctctccacacccgtgcaaatgggcttgttgccgtctttcggcgccgcgccctggtcctttcgctcagaccctcgctctcattcaagcccttgccctgacgcggtcccctgcacctcaggcgcgaccttccagattctgcactttttcctggcaggccgcaggccttattttgcaaggaagcagtcgccttgtcagctgtaaagcccagtcctaaggtgaaaaatcatctttgttgttattgatattttagaccgcttatggaaccacaactcccacgacctcgcccctaatggaaggcatatcagctctttaaggtggagttgtcttactgggccgcaacttaaaagaatatacattttcttactctctctccgctaccgtcgttcaaatgctgcgtactttccgcccccatcccctctccgaattactgaaaaaatatttgttgtgtttctatttgcttaagcagactgccaggaacgaattcagtagaaccttgggcataaggaatatttgccatttctcttttattacagattatttgcaatgtcaggctttgaaaacttaaacacggatttctaccagacaagttacagcatcgatgatcagtcacagcagtcctatgattatggaggaagtggaggaccctatagcaagtaacttttcatctttggcaattaatttagtctacattgcagtgaaaacacatatttagaatatttggttctgcctaaaacaatatgtgaacatgtcctttatcaggagtatgatctttcatgcataatcttcttcctctagagagatatgtgacactggcttggcttcgaaggtattgttctatttaagagttgagtgtcttctgcaaactcttcaggtgtaccatgaatggaaaagtagcttgtttgaagaactgttttctagtaacagtatttctgtatttagaagatgatgggagcttcaggtacctaggagataggctgttagttcataggaccagtgaaaaattaaagtattttgttagtagttaaatcagtccaactctgagacttttatcagtgctaattgaaagtgcttagtgacattatttaatgatgtaagctccttattacgaatcatcaggcgattttcatacagcagttgataatcatttttattactcctccttctcaaacccttatggtcagtgccacacgtgttataagttgcatactgaggaggttgactcaaagccgttagcctctgaacatttttttttaaatgatctttttatagtacctggtgtttgtgacaaaaatacatgaactgaaggctttctagcaatctcacctaaaacatcatctccttagtttcttaggaccctagagataatcttatcagcttcctgtcaaataaaggagcttcctatactaggattgcttaaacttttttagatggttctggatctctttgagaatcctattacaactgggcctctttcccataaatacatgcattcactcaaacacccaaataaatgtgcatatataacttcagacaattcatgtgttaaatgatgttcatcatggatcccgaatttgaaacctcataaagactgttccacgatgagggcaggggaaggttatgtatctg

SEQ ID NO: 318122 - DNA, 4001 bp, Homo sapiens
gtgaatggggagccatttcaggtgcagagctcattagcaattcatctgatggaggaaacgagacgaccactgcaagaaccagaaaaaaatcccaatgaatagctagggcaaagtaggccttcggtcaaagtatgcatataatagtggatcttaagtatgttttgcctccaaggtggtagaatgaatctgaaatggacacttcttttcccatcccagccatcttttaaagaaagcgcagaggaatagagatccaaatcccagtcttaatcatcattccatccccttaaatttttagtatctttttgcaaatttgccccactgaggccttataaatgtcctagtaacgtttcttatacagcatgaagaaaaatcaaagcaaatgaacccaagtagcagaagcaaagcctaagccatccacaaaaaaaatccataaagcttgtatattagtgaaaaaggacagtctaacaccgttgatcaataggaagaaaaatgaacatcggaagcctacaacattacttccaaatctcacaaactgcgttcccgtttatatctgcaaaagcaagttcatcaagaaaatttactttctgcttgctgatctattacattccaaaagaccaccccctgccccaacacgcacacacaccatttttcatagccttatctcaccagagaagctagggcccctatcaaaatgaggaaataaagtggcttgccaaaactcaaacactatattttaccgccacattaacgagaataacacatcatgatcccgaatgctagttaagttgtatgactgaacaactttaatcacaaaacacaccaaggcattcaaaaagggccaagcccaaacacaaagtttcaaaacaaaacctctcccaaggttgggggagtagctgagctgggagcaaaaagcactacccagcagccccgttcggccactaagaaagatctcaaacttaacaaaaacagccacaactgcagctcctgtcacccagaagcgttaaggaaaggagaggagagctcgagacagtgccgagagctggcctttctggagaccgccaggccgagcccagctcagatgaggaagtaactgccagataaaaaagccccgaccagctccaactgcagcctccgtgcctcccataactgcccacattcccgccccacttggggctctgggagaaaaggaacagggcgcaggtctcctgggagaggctggggaccacaggtccgcgtcttcgagagggcagcggcaacactggccgaactctgaggctcccgggagctcaagattcgagagcctgctccgaaggcgtgttggggggaacgccgagaaaagggtcgcccaggaggcggggcctgctggctgcaagcagcagctccggacgccctggccgccccccgggggaaaccggggcgcacaccccgacgcggaagccatgccggcaagcgctcggggtgcggaggtgccggcggggggcgctaaggagacccgggggcacggaaatgggtcacccccatcccaccgccccctcacaaaggcccccggggaggccgcccgcaggccccgcagccccggcctcgagtgcccgactcggccgccactcaccgctaggtcctggggcaccgccccgctcatggcccgcaccgtgccggcccgccaggctcgagtgcgcagcgcaggccccggatctccgctcgccgctgccgccgcgggagccgaggccgaggctgaggccgcagtgtccgcgaacagcagcagcagccgcttgcccaccggggaggccgccgcgtccgccatcgccggggccggcctgacccgcgctcccgcccgccgcctcccaccacctccgccgccaagcgcccgatccgcccgcaaggcctccctccgcaccacccgcggccgccgttcccccccaccccccccaacagccaccaccaaccaccggcgcagcgcagcgccccccgtggccgggagcggagccgcagcctgggccccgcacagcgccccccgcgctctggagcggggcgacagctcctggcccctcgcagcgctccgccccaatctccccggggcctgcagtgccccctgcggtctggaggggaattgcaggtccggccggggtagggaagtgggcgggtccttcagcttccccatggcatcatccctggtctcaatcttccttcagggagtcgtatatatgagagggctttagcttgctctcctcggataccaaagacatttacggggtaagggggtgaggggcaaggtacctagagagtggatgttttgagctatttagtgtctccaatacccccattgatttcctatcctgaaaatatgagctcctacctgctgtcttgtaggaaatgttctccccattggtccatgagacacaatgtcttccttctcaatggcccataacagcaccatcccattctatactgccagcacttcttaggttcctttccaattggccaatgtattacttccattggatgtataatgccactctttccactgactgaaggccaacgtgccccccaacatcttggtgtttttcctaaaaccgacctaacttcttccccttcctagtctgccaatgttattaagtctacgtgtttctccattcaactcttaggggaactggaaatagaccaacagtaaaggggttctcttagtagcactccatcttaccatggaattagtggggctgggggcaaagaaaattctgtaactcttatctgaatgcatttaatacaggtgtgggagactgatagctcctgattagaaaaggagcctgcagagaaagtgagatgctgagatttttggctagattgttacccacaataagcaacaggaaattgcctcaatcatttaaagctggcaatatcagggactagcacattccatggtctcatggatgcagagactgagtatacacaaaatggatacaaaagataaagggtatagtaataacccatgactgttgttctaaaagtgactttttgattttccctacagacaggaaatagtggtagctggttctttctccaaggcttctgtgcctaccccagctatctcctgtccataaccttgtctacacccttgacctacttttcttgtaacaaaggcttggggagaggggtaaccaactattgactttatacttttactaaagtataaaacatataggaaaatcattctagaaccaaccctgtggagcaccaaggaaacattcctccctccacttctttttaacttccatctcccacagccaacctgaggcctgactcagaatgtttttctgggctgagagccacctcttaaagcacatggcccataagctgtagttggtaggaggggaacaagggtgaatccatacaagatctatctgccttgcaatttttctatcaaaattatctgctgggattttctcccatacagagatttaactactgccccaatgtccaaggctagtttctcacagcagagagacagaaatgtacctaagttcacggatgggaaaggcaaaagggaaatgcattcaacaaatgtgaccagcacttttcatgtgccaggaacttcccaaagtgttggggacacaatattgaataaaacaaaactcttgccctcatggagtttacgttctttcctatattaacaagacttcaggaatgaaaaataaaatcacacttggcctcacagaaaatagcagaaaaatccaacaaaaataaactcaaaagaaaaaaagggggaaacaaagtcattttagatgttcaaactttacccctgctcaagcagtaggtgaaatgaaacatcagttttaaagaaaaaaaaccctgtaattctaagcttctttaaccacatgccactgcccaccacttccccaaagcccttcctttgtttccagggcaggtgacaaccctcactttttctagggtgtatgtgcacccctgcaaagattcctgctccaggtagtcaagtcagtcctgtcctg

SEQ ID NO: 318123 - DNA, 4001 bp, Homo sapiens
tccatgaaggcaagaatgtatctatcttgttctctgctatgtccgtagtgactagcaaaaatgcctggcccagacaaggtgttacataaatgtttactgaattaaatgaggaaaacatacatggcgggggtgtggaaagtggcaatatctccttgaatatgctccaataccatgggttacttgttaaatggacacagtgattccctagcccttgttccaggttcggctgtatacccatgaaggatcattctcatctacactgaaggtcaaggaccaggctggggaagccttacccaagatatggcatcccatagggtgttcggggagacacgggaagacatccattggaaggcatccttccatccatgggaccttggacccccgctcgtgcctgggccatggggacctgacctagatgatgaaataagaggctatcaagtaggggcaaagggagaccagggactgggtgcggtggctcacacctgtaatcccaacaatttgggaggctgaggtgggtggatcacgaggtcaggagttcaagaccagcctggtcaagatggtgaaaccccatctctactaaaaatataaaaattggctgggtacagtggctcacactgtaatcccagcactttgggaggctgaggcgggcagatcatgagatcaggagatcaagaccatcctggctaacatggtgaaaccccgtctctactaaaaatacaaaaaaaattagccaggcgtgatggtgcatgcctgaaatcccagctacttgggaggctgaggcagcagaatcgcttgaacccaggaggcggaggtttcagtgagccaagatcgcgccactgcactccagcctgggcgacagagcgagactctgtctcaaaaaaaataaaataaaataaaaattagcagggtgtggtgacgggtgcctgtaatcccagctactcgggaggctgaggcagagaactgcttgaacctgggaggcggaggttgcagtgagctgagattgccccactgcactccagcctgggcgacagaatgagactccatctcaaaaaacaacaaaaaaaaaaaaataaaaaaaaagggtgactaggggaggaaatgagtggtaaaatggcagtatcttacctgtcgaggttaggcacaggaaccagcaaagtggaggaggtagtctgaggcccatctgggctggtggacttaggagtcaccctccagaggctaggtcccagtgtacggggaagagctgtacagaacaaccaaaactcaggcacctcaacaagaacccaggaatcactgtcatctgcctcagcagaggttcttaaacatggatacacatgggaatcttttatctactacagattctagggtagtaccccagaaccaataaactaagatttctcagggtagagcatccacgttttttaaaagcgcccatgtgattctgctggtctcctgtggatgccaaccactgttctaagatgaccaaacgttcatacatatactctcactaatgtttggggctctttgactctaaacctctcctctcttcactggctatgcctactccattggcccctaatcctctttcattcattcagtccaccatctcctgccattggactcctccccctcccaacagtcctaccaacttcttggactccaccctcttctagctaggcccatccacatctcaaattccagcagcccctgacttccccgccctctttcaagccccgccttccttggctctaacccggcccacgatcgcttcggctgtttcctcgggcccgcccccactccagttcggtctttgcggcccagagtgacgctggttgcttggacgtcccttacctcggcccaggagtcccgggaggcgccacatgtcgctgccagcaccacagagagctcgcagccgaaagcgcgagaccaacccttgggacagcggctagaaaggccgccgcgatgccccgagtggccgagtacccgaggaagctctgagctggccaattagaagggagcccggccggaaagacggcgctgcagagaggaagtgcagggcggaggcgtattcggggccagcggggcggtgacgtgcggcaagggcatggggatgtgggcccaggcttccgtgggggatgtccttggcgttcccaagccgaggcaggggaccgcaggtggcgaagcgagccacccggaagcgggaccttcgggaagtggggctggagcggcttcagggaagtaagaggaccttgcagaccgtgaggccgcgaaccaggaaaggcttctccaggccctaggcttgaggaagtgggagtaaccaggctccatgggcggaggagaggacccccggggtcccacaaatgaagccagtaggccgggcttccgtccaaggccacctgcctggagatgccaggccagggcccgactgcgtaggcgatgagaaaccgcacagggcaaggctttgattctgggttctagctccggtccagctttatctcactgtgcagcttcatgccaaccccttaccttgtcggggccccaatacgcgccagatagggtcaaatggaatgactggcctgacaagctgagattcttgggtagctcctttcaaaatacctgagacaccacccgcgccctattagaaccctcgtcttcagacgtggcaaaagttatgtatgtgtttgttcttttgtggaaaagaatagttccgtctggtcccggtggctcacgcctgtaatcccagcactctgggaggccgaggcgggcggatcacctgaggtcaggagtttgagaccagcctggccaacatggtgaaaccctgtctctactaaaaatacaaaaatcagttgcgcgtggtggtgggcgcctgtaatcctagctactctggaggctgaggcaggagaattgcttgaacacgggagacgggaggttgcagtgagccgagatcgcgcctgggcgacagagtgagactccatctcaaaaaaaaaaggaaaaaaaaatagttcctttcaccacatttgaatccgtgaaataacggagcttacattcaagtataagatgtttagatttcctccctatccccttcctccaggtatgtgactttaaggtgagtggaagttgctacctggggtaaaagtgtactgggggcacctacttttagaccgaggcatgtggcttgaaagttgtattaatatgttagacaacttttttttttcttttgagacggattctctgtcgcccaggctggagtgcaatggtgtgatctcggctcactgcaacctctgcctcccaggttcaagcgattctcttgcctcagcctcccaagtagctgagattacaggcgcctgctaccacatcctgctaatttttgtatttttagtagagacagggtttcaccatgttggccaggttggtctcgaactcctggacctcaggtgatcctcctgccttggccttccaaagtgctgggattacaggcttgagccaccgtgcctggccgttaaagaacttttgagccatatatcagcccgttctaggatctgagaagacagctgaggaaagagcatttgtggcctccaggaacacggtccagtggattagtagtgggctttggagtcccacaaatctgggttggaatcacagcttgcttacttcgtaggtatgttatcttgtgcaggttccttaaccacactaagtctcaagagcttcatccgtaaaatagggaaaatacctcatgcaattgttgtgaggtttaaataaaataatatgttaaaaatgtttaacttggtgttttgggaatacccttcaaaaaataaaaaataaataaataaaaatgtttagcatagttcctggcacatagtaaaagcccagtaagtgtaagttgctattaattatattagtaggggaggtaagcaggcaagtgtaataggttaggttcccatagaagcatgaacaatggattgtgggatcccttggaaggcttcagaaaagtagttgcatttgag

SEQ ID NO: 318124 - DNA, 4001 bp, Homo sapiens
gttagctgatactctggactcagtcaccaatatgcttgctgatggtctccagatcttctgcatttgccccaagtgttatgctaatgtacagtataggcatttgtttgaattaggataataaaactggccaaggataaaggcactaaagaaactgcattatttagatgtcaaaattaccttatggtgatgaacacatcccttaagtcccttttatcctcaagttttgctatccacttgatttctaaatgtgacatactatctatccatttttacctggagtgaaaataatgatactgttatgtttacttataaaggtatagagcacagtaaaaagagccaaaatttagagtcaggtagactggattcaaattttaattgtgccatttaattgtataatttatggaaaatcacaacctctttgggtctcagtataaaatgttttgcaaaatagaaataatacaatttttgtgattttctttttttattaaacattaaataaaataataaatgtaaagtgcctggcagacagtatctacttggggtaagtattaatgattggctacattcaagagcaattcaaagagagaaatcactgcctctaaaaactagttgctgtacagatataatacataatatccctgaagtaatttataatactttcaactggagaaataaagaaaaaatacaagattcaacaaaatgtcaagattgggattaatggggcgattataagtttgttgaattattaaccaacaaggccagaaaatcaatgtgctgtcctaaatatggtttgttgcattactctcaaaaggttaagaagacactggcctggtgttaacaggggccttgaattgaacatattgcatttttctttatcggtatgctccgataaagaaaatgtttttatgggtatgaggagcatacccataaaaaaaatgcaatagtacctacaactctttcgggaactgactgttttgaaaaaataacagtcagctgccttttacgggggttggtggggaggtaattatctaaatataaggtggcaagtgaaaactagttacctaagaaattgcattacttaagagaagtcgccaaggttcactacatcacatctttcaaatcttaaatgagcacctttcctcacattatccctttgtcggaagcaatttctctttacaactattctggctacctcagacctccatccaaaattctcctgaatccttcattatcgacaaagcctggagcagaacgcaagcattcctttctgaaagcacacatacttactgatcactgctttccaaaaatgcatctaatgcccaagcatgaaattacaagcttgttctcttatgtctcagccatgaaaacaaagaccgttcttctcatccaattcaaatggcgggaggaaccttcaattaattctaaatcaggaaggaacctccccatctcacttcctaaatgtttgtaaaagatgtcttcttcagccaacctcctgccttccaggcacggcaccccagaactacggaaacagtactcaggaatcaagagtggccaaacgctgccaatgggagataggaaactcgttgatcattggtagagaaactcggcacaacgccgagtcacggtacacggtgtcttcggcctcgcccagggacacttggtgacccgaggtcgagttccaagtcggagacagattttgcgagtggataagacggtaagccgggatcccagggccttctccagctgcactgggtgtcaagcgccacggggtttgatggggactccttctggttccaccctcgcccactcacttctcgggctggccataatgctgcacagagccccggccagccattaatatcaggcgcaggagaaaacccagtaaaatcacttaccagtcttccacctccggtgctgatctagcaagagcctgacccgctggccagactcaagctctgcaccaggtattaccaccctggcgacggctccggagcgtcactgacaaccacccggaaatggtactatcgcttccggggctgcctagcgcgcggcgggaaattgtttcccagagcccggattcgtgaagcagttgagtgctgcagcggcagtcgtcgcccctgccgccgctgccaccgaaggaagcatcccagacaccgggaaggtaaaggggctcagctaggaagacacagtgtattctgtctctgtggggatgtttcttcgccgggcggtacctccgaagtttctgcctcccggctgtgaggctaggaaggaagcggctggggtgagcggcagcggtgtctggctctcgcgctttctccagctgcagttcgttccagctctcccgacttcgcgctcggcgccggagttggtgggctgcagctgcagaccccgcgacgcttcgcccgtgccgctgcggggactgccaccgagcgcccctctgcagtactgggctgagccacttcccccgcttctgcttgcgcagctctgccgctcggcccgccgcctggaaggcgctaggccccccgcgtctctcgtttccatagaacccatggggacgcctcatcctgataccagaattttggctgctttccataacttagcgtctgcgaaggtggctgggataccccaggcccactttcctgtgacgaagaaaattgtgtcattctttcctctctagtagaattttttttttttaaactgctaaaacggcagtgatcctatctctgactgctataggcctttaaacacaaacatacacacatacacttttcgctgaagggagggtctgtgttcctggggtttatatttcagctgcctgaaggctggaaacaagactgagtggctattttaagatttcttccacttccaaagcctcagattaaatattgacaaaaaaaaaattggtccgtctcgggtacttcatatcattatttgactcaggagttagatggagcttgattttggaggcgccagcctcttttttgacgaatgactttattaaaaaattttgttgttgttgttgaaatattgggaatgaacatttgaactgaatttacaatgtatgtgtgacagacaatgcaccttgtggactttttggtttatgttattccgttgtgcctcaattcttggaaatacctgtggatgtgcaagatgttctcattattggaaagtttgattacgtatattgcaggtgttcaatacctaagttgctagtatgaggtgaatttatattaaagagtatatttctttattttcttttcttacctttccttccttcctttgctttctttctttctttgacagagccttgctctgttgcccaggctggagtgcagtgcctatcggctcactgcaacctccggctcccaggttcaagcaattctcctatctcagcctcccgagtagctgggattacaggtgcgcgacaccacgcccgactaatgttttgtatttttaatagagacagggtttcaccatgctgtccaggctggtctcgaactcctgatctcaagtgttccgctcgcctcggcctcccaaagtgctgggattacaggcgtgagccaccgggtaactcttgagtattcttaatttaaaggaactaggatgttcaaatacttgaatgtttaagtcaattttattgtaaagacagcgaaccttcagtactgcaaataaacccctattctgttttctaaatccagattttattatgcgttattaagtaaaattgaattatataacctaacattttcttgcttccctaaagcataaagcgtggatcacgtgaaagtcattgaaaagatgatcaaatgtggttacttttcataatcaaaattcagaactgaagatttcgtaataagcatccacattttccactgatgttcaaaaacattgcgttttgggaaaccaatagtatagcttttatttattagtactttccttattatatgtatcttgattatattaccctaaagtagggttttcaccatttaaataaaactttt

SEQ ID NO: 318125 - DNA, 4001 bp, Homo sapiens
agaattagttaatgatgcattgcacagtgaagtggtgaatattgttgttgttactcatactttgtgccacatctacctgattacctgaatttgtacttgatgtcctgcctctccactccatgcattaataattggccaattagtacactggccttcactaggtcatttaacatttcttcttaggctaaaaggatacctaaatcaagtttatttgaagtttataatgattaacaacacatattcaaagacctatgaagcagaagtttacctctttggtttttctttgaataactatttccacccaatggggcctgtagaaaaagttgccttttaaaaatttgcatttcatttaggtttaggaacaacattcaacagagttttaaactgtgaagttccacatgaaggaaataggtcaacttcagtaccaaacaaaagatgttagatcaatgtgttccaacctcaaaggaatttattggatatgttttcttagactaaactgcatagcatagaagggccaagttttctgaactgatttttgaatcattttattctgtgatataaacaataaggaggaaaaaggagcaatttcatttcatttcatttcatttaaaacttaaaaaaagaacgcctacaaatacaacaacaacaagatggctgggtatgaaatggcagaagggtttgaggattaccaaagtgattgatgcaaaattcaaaaaatgccagttgtcataataggctgccttacaatggaaataaattaaaatccttataggtggaggaaacacttacataatcatttgagtgtacttgattttgaatgatctcatgataaaggtcccaaggagcccacaaacttaccacaaaggagtcactttacaccaggactcatgagtagcaactgttcttaaaagaaaacaaatttctgttcagggaatttgaaccactccaaaggatttaatgacttgcaggggtttgtaggtcagtcacatctgttctgtaatgaaatgcttcttcctgtttctaaattgactaactcttaaccccattagccttcatgtcttaaagcaaagattatttctgtttcattagctgtgcaacagttagggcctttatgtttactccagctgatggaactcatcacagttttattcttctcttttggtcagcaaaaagaaggaaaatgcaaaagaaaagagaaataaaacctgcactgggtttgaaggtctaattggtattccttgtccacatggacacctgtggaaaataagagtatctacagtaatagctagcactttttcaagtggcgagttcgctgtattttttcccttcaataattaggtttccattgttctgttttctaagtcttctgtgtatgctatgaaagggagctagtctaagggaggcagaagcaagatctccagctgttttagaggcttgtttatgcccacaatgtaaacttctgatgctttatgcttagattacaccaaaagatagggacgggagtttttcccccaaagtcttatttgtgcatataacaattagtttgaaaatttttgaagggaaggagtaaatgagggccacctgaaatctaaaatgaggataggcagagaagctaatgctaggaggggaattaatgaatgagagaatccatgtattttatgaataaattaaagaaaagttcctaatgttaaggaagagagaaagactaagttggaagacagagcagctaccttgtactctgttcctataggcttcttgttgcataaatggtgaaatggcagatagcgagaaagaaacaagcctccatccccgtatttttgtgcccctagatcttacctgtgagtagacaaggttttgccagtgttgtgcagcaggataatttccacccggaaacctcaccaggctggcctgaaggagggctgagctcctcgttaaagactttacgtcaagctgcaggaatttgtcaggatggttgttatttggcaaaacagagagatccatgtctcccttcacctacagtggaaaacaaagacaggcaaagctgctcttgtcagactcctccattattaatgtgcctgaggatgctctgactgcatctgaaaccaagtctctcagctgcacgcagccactgctctcgagatgatacatcaatgcacagggacaaagaaacaaagcagcacactgccctacctttctcacacacatgtacatggagggtgcttgaccgaaacagatggggctatactcattacaattaatagggtgacagaattagatatgtgtagcacgtaatatctcttcattcagagtcagaaataacaatttaagggaaactattgtttgaataaaggctgccagaatctgtgttacaacccgcaatgcggagcacaggaaacagtcacgtatagggagacagtgcttgatttttctcttcgaacattgctaagctaacacagctgactaggccctgcctccacagcctcacatgtgatactcaggattatgcttcttctcatgttccagagcctcaactcttgtgcaacctaaccaggtttaggttgttagctttgttctggggagggaaatggcaagaatttgctctatagtttgctacagtaatttagtgccccagtctaccaccttgacccattcactatcttaggtccccttgactctgttcctagctgtatatgctcttaacaatgtgctttggtgttcacacggcacatttggaaccccaaaaaaacatggctgctgggtttggatgacacgctcttctaagtgaacccatctgctgttaagagagccaaggtggtgggagtgaggctgtgggcagttgtagccagccagcaagtcgtgatgactttaatggagatatgttctctctttacaaggcactctgctttaggtgacccatacttctcactgggaaagtatggatttccatctggagggaggagaaacttccccacttgtgagacggcaaaggatagatatattagcagcttctaaaagacataggttgtctgttaatttcacatctctataaacccctctgactcagcaggaaagtttctcttccaggggcagtggggttacatgtggaatgtatcagcactagatctcagaagagtgccatatgccttacaagagtcagcagccggggtgttcttgaatcaagcaggacactggagagtacttatcttcttcacagcaataaacatgaggggctgtattaaaaaatatctgccctacttatagttgtaaaactgaattaagcagttaacattttctctaagaatgttttggaccagaactctatcactgttttacaatattaaaataggtttggatggttttataaatgcatttactagataaagaaataggtacttcataatgacagttaataacaaaacagtgaaaccaaaagtgtttcaagagtcaagtatattatgtgtatgtgcatgtgcttggtactttctggattttcctggttgctgccagaatatatctaatgaacaaatatttctcaggctgcttgctcttcctaaaagattctttggggaataacacacaccttcaagaagaaatttacttgtctttggctctctatattggcaagtagagacacagaacctagatccaaatatatttgattaggctttttccttagccaaagcatgaggtaggtggtatgagccttcagttttccttaggcatccttcctttcaatacttctgtcattccctagttgcccgaggcttcgatactgtctcgttctacttacaagtttcgtctcagcctctccatcttctcccaccatcctttgtctgcctttaccccaaaaccatcaattcttatttctcattgctatccctgtaggtagcctaaatgactgaaaatcaggaaatcaagcttttactttttaaagtacagattcagggggtaaaggtgcaagtttattacctgagtatattgcgtaatggtggggtctgggc

SEQ ID NO: 318126 - DNA, 4001 bp, Homo sapiens
taccacagtgaaatgatgtgatgactaagcggacagacagatgttaatgaggaacatggtccagctgctgcaaagtagcaaagcttcccaggaagagtccatccagaggttctaataacaacaaacagccagcattggaacagcccgtcagagtctgccaaacacttgtttattccccacaacaaccttgctcatttcattttcttaactcacagcaagcggctagatactacagtagggaaatttgttctttatagctaacactataaactatttacagcgtttatcttgtcttttaatccttgcagcaagatggcaaagcagatattatttatcccaatcccaatttttttttttttttttttttgagacggagtctcactctgtcgcccaggctggagtgcagtggcgcgatcttggctcactgcaagctccacctcccgggttcacgccattctcctgccttagcctcccaagtagctgggactacaggcgtctgccaccacgcctggctaattttttgtatttttagtagagatggggtttcaccgcactagccaggatggtcttgatctcctgaccttgcgatccgcccacctcggcctcccaaagtgctaggattacaagcgtgagccaccgcgcccgaccccagttttttttttaagctatctcttacagaaaggctatcccaaatttaaagagaaggaaactggccgggtgcggtggctcacgcctgtaatcccagcattttgcgagacccaggcgggcagatcacttgaggtcaggagttcgagactagcctggccaacatggtgaaaccccatctctactaaaaatacaaaaattagccgggcatggtggcgggcgcctgtaatcccagctactcgggaggctgaggcaggagaatagcttgaacccgggaggcggaggttgcagtgagccgagatcgagccactgtactccagcctgggcgacggagtgagactcggtctcaaaaataaaaattaaaaaaattaaaaaaatgttaaaaataataataaagagaaggaaactaaaaatcagaggagttaagtaaatttgtccacggtcacagataagtggtccgtgcgcaaggtaggtagtttcatgcccagtttacaggggagttaaaacgagggcctgagaaagttactcttgtttttcagcttgctacaccgtccctctatcccgataggactcagacagagcaaacaagttattgatagttcttcactaacgagcatcgcaaaggccgaattcagccatcctcccagtccagggagcattcccgccccagacacgtccccttcccctttccctttccctgtgcccccaccccccagctcaccgtccctctgcctctccttcacaatatacaagacggtgccgccaggatacgaaaggccggctgcttcacccacccctccaggctaagattagggccaggaccctagccgaaggcggggtgtggggagatgaggttgaggacaagccgcgggggctcgggctgggctggtcccacgaagcggaggggaagcccgtacgggagctgcagggcattcccggagagaagccccattacggagaccccagagagcggagccagggaggcaagaggcgacccagccgagctcgaagccgggatgaagggttaagaggtgcggggagaggggagtggcttggaggggccccgagatcgggcctcgccggaagcgcccctcctgatcgccagagaacgcagccccaagggagggcccaggcccgccatctgttcacctgtgatcctgctgccgcgggactgcctgcggcccggagtccggcactaaaaaggttccgagggcccacgtctcccgagaggctgtggcgcagtctggacccaagccattgtgagagcggcggcgatttcgaaggtccccaagacccactaggtagcagtaccacccagcgggcaggcagcactgcagataaagcctccggagaccgcgggatctcgcgcgagacttggcccagcggagcacagggcatgctgggagttgttgtccacgatcgcgagacccgccccctccccatgcccttcgccgcccagcgagttgtggagccgcagctccgagtgtggaatccgccagccccgagaggaaacgccacacttcaccaccacttcctcagcgcgtgtgctgtgcctgggtccgtgacaagctaagggaagacggaggtagcatagtaaaatgacacccacaaacccaagccctcaaggctcaaaaagggctgccaagtgcgagcacttgtcatcctgtttttcccacttcacggaggtgaagctgagactgggagagatgagaagtcacttcgattagcaagcggtgcagtgagcacggactgtctcccaaaacagcggggttaggcagggttcgtactagtagctgaaccaaaaaagggaaccgacctcacctgcctcccctagggaaggcgatcctaatatcatttctcttttacataaaggagagtgaggcttagaggcgccagctgaggtgtcagtcacatcctgaaggaagacttctcttatccctgaagggttcacaaagaaggcgaagcaacgaagttacagcagaatttgcaaaaatctatccacgtttctaccccagtccaaagctcgccatcaaaactcatctcaggagagctatgattggtggtgcagggtgaatgtcacatttagatttcagcatttgaggcttccagccgtactggcagaactgagaggccttgctcatgcgacttgaaacttaagcgctgtttccagaccagggtgcttgagtgcactaagaattaaagtctttgatgaattctataattagcttatcaacagcacaattacattgcagtataattgtgtgtatatgtgtgcgtgcgtgtgtgtgttaaaggtgttcctttgttaatttggagcttttaaaatatgccatattttttaacctctgtggaagcaaagctggcaccttgctctttatccaccacaggaagggatgtatatcacctctcagtcagaaaaggaagaaatagcactttgcacccttatgtagatcataaggtgggatcatctcatttatttcttagccacaaatacatgaaaacttaagactttcctggaagttactatttgattaaaacaactttttctggctgggcacggtggttcaggcctgtaatcccaacactttcagaggctgaggcgttcgagaccatcctggccaacacggcgaaaccccgtctctactaaaatacaaaaatcagccaggcgtagtgacaggtgcctgtaatcccagctattctggagactgaggcaggagaatctcttgaacctgggagacggaggctgcagtctgccttgtcctaggtacccccagtgactgccaaggcttccacgtgtgtagcacgaggaggaagaacaggagaaacgacctgagtacagcagtcgggttcttttggctctccagaggggtgacgccatgtacggctggctgtagggtacatgggttgagagaccgcctgtggctctcagggcccagcagggctacctctttccctttatattgtctcaactcttcacctccttttagttcgcgattcctctgtacccctggctctgggtcccagcccctattccttctgatttgtccccctttccctttgactacatatatatgctcctctcctcccagatagtgatgttttagctacatcttatttcttccggcattgattcttttgaaaaatttatttctggctgggtgtggtggctcatgcctgtaatcccagcactttgggaggcctgagatcacactactgcactccagcctgggctacagagtgagactccatctcaaaaaaaaaaaaaactttatccctgatatttgtggtaccaatgtctgaagctgtcatggtcttggtgcatagcacctatgtgagagcacctatttcttttccac

SEQ ID NO: 318127 - DNA, 4001 bp, Homo sapiens
acaccagcctgggggacagagcgagactccatctcgaaaacaaaaaaacccaaaaaacaaaaaaaacccagatatttagagtgtctactatggcctaggaaccgagaagctctgatagtccatagtgagagacatcatcaaggaccatgctctcatggaactttataagtctctaagagaaactctataagagcacaaaatctgacaatgtatgttaatgtttagcataggacctagtacagtgtttctcaaccagggtcatttccactccaagggccatttagcaatgcctgaagtgcctgaagacattttttgattgtcacaaatgggaaggcactactgacatctagtgggtaaatgccaagaatgctattaaacatcttgaaatgtacaggacagatccctacaagaactgtctagccccaaatgtcaataatgctgtaactgagaaaccctggcctagcaggaaacctacaacaaattgaagctatggtgatactattaaaacctgaacatacattccacttacataatgcctatatgaccttgtgcaaattatttagcacaactgggcctcaaggcaaagagagataactattattccctgaaagattaactaagagcatgcatttgaggctatttcattaatgcaatgcaaattatagttcttctggacacacaactcaattttttttttacttgtcatgcccttaatttttttttctttttttcttttcatagccattttgtcctaaatgcccttaattttgaattgatctcagacctttaggattgctagtctttgacctcatactaccctgtatggacaattattggcctgaggatatcactttccgccccagccactccccagttcctttacctgctgcttgtcctctagggaggtagagacgacagagcagtctgatagcaggttcttgcgtaccacagaccccaaatctgcagctgtggactcaaacatgggagaaactacgacatcgtcatcggacagcaagcccgctggcggagaaaggatcccttgcgacatgacggcaggggcagcctaggtctaaaaagagaccaaaaagtgggcagggagaagaacctttagggacagaaggggccgcgaattttaggtaataagtcccttgccccaggacaccgtgtcccgcttcctacttcttttcccctccaattatcggcaaaggggaagggaatgagagaagttcacttaatgaacaattgagagaagtttgaggcggcatttctgaacgcgaacagaagtccacagacatctggctccaaaagcagaaggctacgcctaaagtagggcacctcgcccgccggtgctgtggaggtggtgtcaggatccctcggctccttctctaacctcaccccaaggaccaccgtgagaacagagatgcagcattaagagaaaaacagatggctgcagctccgatttcttaaagcctattccgcgcgggcaagagctggtaacccgggctccagcacagccgcacactcacccgaagacgtgccacttgctcctcctgggatactggcttactcacacctagtcgccgaagctggactttcgcagccgcagagcacaactccgcccacgaggtgcagctttgttacagatacaatattttaaattacgcgctgcgttcgttcggccaatcagatagggaagcctgcagctaccaatccgcgtaaggaaagggggcgggcctgactggaattccagtcgttcgcttctgcttgacctctgagttctaatgtgggtccgggttaccaactgtcgtggattcgcacttattttgcctgggattcttccaacttaacctttttccttgaaccttagacatttcttacctaagagcctaaaggaaatcttgaggcttcagcagccaactcctgtccttccttagcaacaatcttaacaggagtgcacagggtaactggtttagggtgcttgctttgtcttaaggggaaaaacgacatttcccaggaggcaccgcgaaccaacgccggtacactatttcccagaattccagggtttcggcccttccagaccgtctctcctcagggttggagacttcggggccaagatggcgacgggaacgggcagtgagtatctgagcaggttttgcgtgaaaggcctttgtagatccgaggctaggcaccatatttttgttacacgcttagggagtgggagaagtgggttgcttgagagcccagggttttcagagacctgcgctctacagcatcgtgaagaccaacgtttgggggcccagaaatctggggtcttgtttctcagggagagagcggaggtgtgagagaagcagcttagtgaatcctagtgtgttaggaactctgcgggttaaccgtaaaagcactctagaaacttgggcgtgcagacgaaaagatgttatgagccagacggagtaaccggcacctcaaagagccattcatttttttgtctgacgtttgtgaggcagtggaagtggggtcttttaaccatgagcttttcttgccactcaggaaattgcatctcggggatttcagccatttttctttttttggactgaaaagctcttttacccccgacatttggagtagaggatctgagagaagtaaacaagtttatgctaagagggaggcggggtagtaggaggggctggccgctcgggttcctgggaaataagccctgaataagttcaaactggaataaagtccagtattcttaaaactgggcttttagggagaactgcctaatctgacattccctgtttcttaataaagcggagcttcaagccatggcgttttaagaaataaaatgttaataattcacatgcaacgaataggtaccccggtcactggtgatatttcacttggagaggtgaaaatcaagatttggttatagtagctcactttgtcctaacaagttgggatgttttgtattaggcttttagtcctctttttggggattttggagcttagcactacagtctcagtggttgtttccaaggcttttttttttttctccctttcccagaacacaagctgctaagcactggccccacagagccatggtccatccgagagaagctatgtttagcatcttctgtcatgagaagtggcgatcaaaattggtaaggtatctaggatgtcagcttttctgggtcttagaaattgttagatactctttcacatcggtagatttctatagttaatcatattaagctgtaagtagactttcttttctttttcttctttttttgagactgagtctccttctgttgcccaggctggagtgcagtggtgcggacacgcccagctaatttttgtattttttagtagagacagagtttcgccatgttggccaggctggtctcgaactcctgacctcaggtgatccccccacctcggcctgccagagtgctgggattacaggtgtgagccactgcgcctggccatgcctggctaattttgtatttttagtagagacggggtttcaccatgttggccacgatggtctcaatctcctgacctcatgatctgtccgcctcggcctcccaaagtgctgggattacaggcgtgagccactgccaggcctatttttttttttttttttttgagacaagattgcactctgtggcccaggctggagggcagtggtgtgatcttggctcactgcaacctccatatctcaggctcaaatgatcctccacctcagcctcttgagtagctgggactacaggtgcacaccaccatgcccagctaattttttttatttttttgtagagatgggggtttcatcatgtttcctaggctggtctcgaactcctgcgttcgagcgatccgcccaacctactgggattacaggtgtgagccaccaggccagctgtatttctttttttaaacagctttattgagatataattcacatactataaaattaacctacttaaaatgtacaatataatggtttttag

SEQ ID NO: 318128 - DNA, 4001 bp, Homo sapiens
ttcatatacaggataacgatggtttcagttgttaccacaaattacttcaaatataacggaggaaaaaatcattagctatatagggtcttccaatatatcatacacacaacatgaaaatcaatctagcttcacgtaacttggtcaaacctggcagaatccaaggggcacgtggacgtgacagccaagttactactgactaggctaggctaaaggttaataaataaggcactcataaaaggaatcgaggccaggcgcgatggctcacgcctgtaatcccagcacattgggaggccgaggcaggtggatcacttgaggtcaggagttcgagaccagccttgtcaacatggtgaaaccccgtctctactaaaaatacaaaaaattagctgggtgtggtgacaacgcctgtaatcccagctactcaggaggctgaggcacaagaatagcttcaacacgggaggcggaggttgcagtgggccgagatcgcaccactgcactccagcctgggtgaaaatccgtctcaaaaaaaaaaaaaaaggaatcggtatgagagatggagtcaggaacactgctcaactcgagattatcacacatctctcgttctttcaatattggtaccgaaagaaaataattttacttatctccctccgtgcatttattcctttacaatatgaattatttccagtctggctggcgtatctcactccacaccccaagctagtgtcataaaccattttccccaagagaaacctagagaaagatacataagcctaaggctcttaaaaaaaaaaatgaagcatgtgtcttcacctcgccttacacttttctcagttacctctcccgagggtgtgaaaatatcaacatccggtcgcccacccccactctctcagcagtgcctcgcattgactctgcccatcccctatcattccctttacagtctcatcaccttggagaagcccatcgaatatttcttcccattgctcccccacccttattcatggctcagcgcgatattctccacatttttctcccaagaagtggcaaaaaagaaagcagcatggtcgacgacgaaaccggggaggcctgacaaccagacggcagtttaaggcgacggaactggctctttccccccatctcggcctccgaccagcagtcggttctctaaatgtgaaatcgctggtcttcccgctcccccacccccatccccatccccgtcagaggccaagccggtaaaatgcaaagaccaaggggaagcgcgaggcagggtcatccctaacgaagcccgctccctcccgggctggtgtccccgggggggggctggagattgcgggaggaggagcgagcggccctcgcccagagacccccggagacgcgaccctcgacacccgggccctttccccacccggcttccctcccccgcggcccgatccggagaactgcagcagcgcccgggcggaccccaagccggcctcactggcacacacgccacacacaaaagcgccgcggccgccgccttcccacccccacagcccggcgaagcaatcaatgaggcggccggcgcccgcgtcccctccgtgcacacccgaacacggggccgagcgggccagcggggctggcagcgcggctcaccatcgctgcgcttgatctccacgtaaatcccgatctggatcttgccgaagttggccgttgccatcacctcatctggagcagcagcagcgggccgagggagggggaccggagggcggaaaaggcggggagggggcggggtaggtgtgggagggggagcggttgcccgcggccgcgccggcccgggcgacagcgtgaacgcaagcggggccgcaaggagcagctgtggggaagcaggcggaggccccgggcctgcaggccggcaggaggacgcgcacgccgggtagtcggggtgaagctagggccggggccgtgagacggcgcggggtagagtgggagggcccgcaccgcccgccggggagccgacgctggggaggcggggcgccgcgcgcctgcgcagagcgcgcctccggcgtctcttcttccttttcggctggcctctccccgctgcctccaggcggccccgcccagctctgcagcggggtgggcggcggccgcggcttacccagccgctggagcgttgagcgctcggcccggcccacagctagccggcgtcgcgtttgatttcagcgcgcggcctagaagacgcgggaagcgtcgcgccgagctttcttgccctctcgcttccgggaattggcgctgttgccggaatgggttaaaggccacgtggtttcaggggctttctagcgggctgagggatgtgaattcaagggccctccgttgacagtacgggatccgggttttcatcggaaggtggcaccccctatttccacttacaggtagctgacccaagcagccctcccaagcacacttggtgtaggtttcccatccagttacgctggaagggaagaaacacccttgaggtgtcacctaccctaaatcgaaatgaagatccacccctttacagtcttgccttatagtttatcacactcagaaagaagctctgtggtggggcgtccttaactgttcaggttatgaggcatccgatgctggtgccctgtttctgctgagggttcaagacttacttgccttggcctgtaaagccaacaactgtgactcaagggaagaaggcagacacataaggttgactagggaatgtgtctttttgcaataatttaattagtctgaccacatcagcaatgtggaaagcaagactctccatcctggcagagcaggaaggccacgtgtaccggggccctggaaactgtatttatagcaccgtgtgaaaacctccaaacgtctaactcctgcttgtagtactggcaattgataggttggaaacaacacttttcatggcctactttccctagtcattgttttttgttgttgttgttttgttttgtttgtttttgagggggagtcttgctctgtcgctcaggctggagtgcagtggcgcgatctccgctcactgcaatctctgcctcctgtgttcaagcgattctcacgcctcagccttccgagtaggtgggattacaggcccgcgccaccacgcctggctaatttttgtatttttagtagagacggggtttcaccatgttggccaggctggtctcaaactcctgacctcaggtaatccacccgcctccaccacccagagtgctgagattacaggcatgagccactgcgcccggccttccctagtcattgataatctccctgtaacaataactacaaatatacaatttaaaattttaaaattggaaactggatatatacatcaatgcttatgtggatatatgtgtgcctagagttttctatctaatgtaagtaatcatgtaggtccttaaaaaactgttaaaagactggcttcatctgtagcttgaacatattgaaggtatacctgtcaaaagaacaattctattgaatccattctaaagtgcatataatttctatggaaaaaaaaccacactggatagacaatgtggaaaataacttcttttacattccagaaatgacacacttgagtaccccggtttcaagtgaaatttgaccaaatcagggtttagtttttattttttctataattttgggagttttatctgaactcttcaagctcctgtctagaattcattttctgatgtctctgcaactgaggtataaaacatctatttatattttatttatactttataaagaatgcaaagaaatcaagctatacagctcaaagttaacattgtttcataaaatattattattattattattagagacgaagtctaactctgtcgtgcctaggctagagtgcagtggcatgatctcagctcactgccacctccacctcccaggttcaagttattctcctgcctcagcctcccaagtagttgggactacaggcgtgtgccactacgcccagctaattttttgtatttttaaaatag

SEQ ID NO: 318129 - DNA, 4001 bp, Homo sapiens
cttctatctatctctcatcctattcctctcatctattcatcaccctagtctaaatcaccatcatcttggccctggattactgcctcctaactatactcctgaatctaatcagattgccctactgcctattctccaaatagcagtcagtgtcaacacacatctaatcatgtcactctcctacttaaaaattcttcagtggtttcccatagatctcagaacaaaaaccagaatccttaaggtggtctgtaaggtctggcttccacccacgtctgcttcactgggcttatttcacaagatattctgcctggctcatccatgccacagccacactgagctgcttggccttttcttgtcaccatgctcctcaccactggcctttccatgtgctgttccttctacctagaaccatcttcaatcccctcttcacttagttaacatctacttatccttcagaactcaacagccacttcacctgggaagacttcctgactaggtcaaatactcttataggctcagagagcaccctgctctccccttcctggacacaaattttacttttgcttgttccttatttgattaatgtctttctgtctacaccagaggttgcaaacaggtagtcaagaggctgaattcagcccacaaatttcttttgtttggttcatagtatttaaagagcttttgaattagttgctaaaattgagaaatttcacaaaaataatttctaaagtctcttcttgggaggaaaaaaaatgacctgttatcatctgcagaccatcattcttacatggcaatacattccaattcaccagaatctacttctctctattgtaggatacccacccacttcattattaaggttttgtgtcttacgtctgtaaatatgtatgattttcacctctgcccaagaaggcaagcctctctctttccaagttcaagaacctgactggtgttgctcaatgttgtatcttcagggcctagcatgtggttggtgcccaatatttactgaattaaaacttgaaagcagtgaacagaacaaatatagagcatttaatcttaaatgtcaagcactgtccttctagtctcctgtgtattatttcacgcggataacaaccccatgaggtaaagtttacatgggaactaaggacccagacagattaaataattatccgaggcctcacaaccactaaataagcggccatggctcaattttcctccatgacccctaataaggggtcttagaaggccccattattaagttcacgataacaatctgtgaaatcctggaagataaacataacaccgccacacacacaaagacacctacgggtttcattctgcatcataagctaaagcgccacaagagcaatgacagctcaaggctaggagactcggagtatggggcctggaataggggcaggcagccttcgctccgctgcctccctgcgcttgctccgaggcgcaaaggcctcaccaggtgtgcagcatccaaagagccccaccgtggccacccccagacgccccgctcagcaggaagggctgcgagccagagcgcatcctccagcacagcgcctttttgataagcggcgcaggccccacgggatgcagcagcgacgagggcggcagggcctgaccccaggtccctgtcgaggccggccggacccccgcggccccggggctgaccagccaggctctccaaccacctccaccgcacgaccgagcctgccccgccccacccaggccgcctgccggctccgcgcctccatggcaacggccgcgcccccgggccaggccgctaggatgagaagaaaccccagaagcgaagcgactctcctcaccggcatcttggccccctcccgtgcccggcggacgtccccgcccggggtgcagcccagcgacaccgggtgcgcagaaaggatggccagagactaccgaaacacctcgttgacgctctcgagactgcggcttctcgggcgagagcgcccagtgcgcagccgcattccgagctcgccccgccccaagcccagtctcaggctctctcggcccttgaattacgcctgcgcggaggctttccgagtccatctcctaggacgccagactgaggccgcgcgtgcgcaatgctgccattctgctgcgctagaaatgtggcacgcactgaggcggaggtaacctggcagcccggggttgggaggaggagctgctcttaggcccgtcttctggcccttgcaatacccggaatattaaaatcagtaatagcaattgtacattttgtctcatccgaagaattgaagaccttacctacctgacctcgcttgattgctaacttcctcatgacctgtcttaccattagaaagtgagctctcttaaggagattgttagtattctcacatctatctccagagcccacacagagcctggcacagagtgggatttttatacgtgttggtcaaagaaccagtgatccgtccatcctctttctagtccacttgaatgtgtaatgggcatttcaagttaatcatgtccagaattgaaatcttgatcccccatcaatcgccccactacccactccacccccatcaaaaaatttaaaagggctctctctcatccctctcagactttcttcatctcaatatgtgggagcttaattccgacaactgctcaggtcaaaattgcagtctctttcatacacaatattctatctttaaatacagcctgttgtatctatctttgtagtggaaccagaatttggccacttctaccaccaccatcgtctctcacgtgcattactacaatcgctcagaactggtttccttgattgtgtgtccttgtcccttttcagtgtgctggacaggagccagagtgctggtgctaaaacatgaatcagatcttctcttttctctgctcaaaaccctccattgatttcccatcttacaaagctaaagccacaagccctacaatcctccctcttgcttcttctgcaccagccccacctggcctccttgcttcatccaacattcccgtcgtgcttccatcttagcatgcaagggctgtgagcttgcagtaggaactgatagaaataaagataaagcattttacatagtgccagtgtactgttctacatgctttcgttttttaattcatttaatccacacaataaccttttgaaatagatactatttattattattttacagataaagtaattgaggcacaggaccattaaataacttttccaaggtcatacatataaacaatggcagagcccaggtccaaacccaggcagcctagacagctctttccctaaaaaaccacctgaccactcacctcctccagaaagtctttgttcacataaccccagtgaaccctaacatgatttccttatttaaaatttcaaccttcagcccaaactcttctttttttccctccccactttatatttctccatagtacctatcaccattcaatattttatatatacacacatacaagctttactgagatataatttacacaccataccatacaatcaccgatttaaattgtacaagtcaatagttcttactatatatggagttgtgcaaccataacctagaacatttttatcattccaaaaagacattctgtactcataagccactcccccttgctctctgcaaccctcctcccaccccactcccaacatcccagacctagacaacccaccaatctactttctatctctgtggatttgcctattctggacatttcatataaatgaaattacacaatatgcagccttttgtgagtaacttctttcacttacaaagttttcaagctgtatccctattatagcatatatcagcaatttgttactttttatggctgaataatattccattgcatggctataacatgtttttttacctatttgtcattgatggatatttgggttgtttctactttttgcctatcgtgaataatgctgctacaagtttttgtatgagcctatgttttcattcctcttg

SEQ ID NO: 318130 - DNA, 4001 bp, Homo sapiens
ttcttcagatcagctatttgaccctccagctcctggagaagtttgtggcggtgctcactcagcttggcttggttgacattcttctttgctgtctgaagttcacgaaccaattcttccttttccttttgcagattgatgacttctaattctagattttttatgttatcctggtattgaaactgaatgggctgtagttggttgtcgttctgagtcatcttcctaactagggcctctttcagtgcaagggcgttattcaactcaaccacctccttagacatctgagcttgatggagagcatgctgagtggtaaaagcgtcagaagacctgcttgtctctggactggtttccacttgagcttcttcttctaccgcagtatcaatggctgcagccgtgcaagcaacagtttcatctgataactgggtaatcagttgctgcaggttacaaattatctctacattttctttcaattcctggtcttccaaagtctccactagcttttgaagatccagcttgcaggccacatgctgcctgagctcttctagcttggcgttcagtttttcattcacttgctctgtcaaaatgatcctctccaacatctgggctgtctgaccagctgccttgctcagacaacgacttaatttttcattctcctctaccagggactgattcttctccatcagggattgtagattctctgatggttctgcatttatagatccaggcagggtacctccatgggcttgtagcaacaagacttgtagctgttgtacctgttgctttagatgattaagttcagctgtgtggggatcaatattaacaataggtttgttcttgatttttcttgctctgtcagcatagcgaagggtacttaatgtttcctctagattggagtcagcaggactcacacaggctatcataagagtgtggctgttacctcctagagaatcttgcagcagtcgagttaacttggaatctctgtagggcacaaagctaccctttttgtcatctccaagagcactgattacatttcccaagcataggaggcctcggttaatattaataccctcttttagacgatccccttcagccttggttttcttctgtctttctgatccagcgagatctacaagatgcagcttggagcgaaagctgcaattcttgtcacttttctttctttgctctatggagattgtaaagatggcatgagatcgggacgactgggagttcatagctgtggaggccacagtcctagagttgttgccctgctccaaacaggaaacagtatccaaggcaactaaaacagtcttctcagtgagtcccacaatctttatgccttccttaggatcctcccgtatatttatttgagctttctcacgagatgggcatagaagatccaaaatttcttcattgtaaatctctaagtaagacactttcagagtaaattcaaagtcactctttttatcaatttctttgaagagcagttgtattaccctaggaataatgccaactgttggttcattctcctgctccgcagtgtatgcacctcccattgaataggtttttccagagccagtctgcccataggccaggaccgttgcattatatcctttaaatatgccttttatgagcggcgctactgctttattgaagacttcttcctgctcagtacaggggtcaaacacaaaatcgtaggtgaaggatttatcagtaccaaccaccacctgagtctccccgggcacgaaggaaaggcacatctggcagccctcgctaatctctttggggaccagagggcgacaacgcagtgccactcttacaggaattcccttcacctcttccttcatgatcctatctcagcaccgtctcaaactaaatgtcccttccccgttcacccggggtctcccgccgccctgtcccagccggagctttaaccgccaagtttcaaatccctcccagagacaccaaccaattgcagtgcaggcggcccgagggcggagcgcgcacgtccgcgcgcgcaggccagcacggtgggaaggggagggtaaatcgagaaatttctttttaaccaacaacagaaaaatgtcctggaactaataagtgagtatagtataaacttaaaggatacaaggttaatacacaaaagtaaattggtttcctatataccaacagtgaataagtgatattcagaattgaaagcacaataccacttacattagcacttaaaaaatgaaataggtataaacctaacagaatatgtatgagatctacgtgatgaaaactacaaaactctgatgaacaagatcaaaggggaactaaataaatggagagatattttatgttcatggataagaagactgaatatcgtaaagatgtcagttcttcccaaactgatctatccattcaatgcaattcaaatcaaaatcccagcaagttgttttatagatattgacaaactgactctaaagtttatatagagaggaaaaaaaaaatacaatggcaaacataatattgaaggagaagaacaaagtcataagactgacactacccaacttcaagacttactataaaactacagtaatcaagacaatgtggtattggcaaaagaatagacaaataggccaatgtattagagtagagagaccatttagatacagtgaatagacccacataatatagttaaatgatctttgacaaagaagcaaaggcaatacaatgaaacaaagatagttttttcaacaaatggaacaaatggtgctggaacaactggacttctgcatgttaaaaaaaaaaaaaaaaaatcagaccttacagccttcacaaaaattcactcaaaaggatcatagtcctaactgtaaaatgcaaaactattaaactcctagaaaataacataggagaaaacctagatgaattcaggtgtgagatgactttttagatataacaccaaaggcacaatccatgaaataaatcattaataagtttcattaaaatcgaaaacttctgctcttcaaacaaaactgtcaagagaataagaagagaagccatagactgagagaaaatatttgcaaaagacacatctgataaaggaatattatccaaaatatacaaataactcttaaaatgcaacaataagtgaacgaacgacctgattttaaaatgggccaaaggctttagcagacacctcacaaaagaaaatataaacatggcaaaaagcacatgaaaagatgctccacatcatatttggtcaggaaaatgtaaattaaaacaataagatactactacacacctactagaatggccaaaatctggaacactgacaacatcaaatgctgacaaggatgtacaatgctaagagtgaaccctaatgtaaactattggctttgaatgataatgatgtgtcagtgtatgttcattaattataacaaatgtaccgttctggtgctggatgttgataacatgtctgggggaaggaggcatgtgggaaatctctgtactttcctcttaattttgctgtgaatctaaaactgatctaaaaaatgttgtctttttacaaaaaaaaaaagttgagcaaaagatgcaagacaaaagagcaaaaactgtacagttccattcacatgaaattctaaaacaagaaaaaaataaactgtggtcatatgaaatagaagtcagaaagtggttgctgggggaatggggggcaggggaggattgactagaaagtgacataaggggtgccctttgggtgtgatgaaaatgttttaggtcctgttttggatgatggatgctcaagttatatattcgtggaaacttatcaaattgaatatttaatctgtacattttaagatcttaattgtatctccgttaaaaataaggtggctttaaaaattgatctcctctaccgattcaaaaatgtacatacacacattcttcctctaatttcagtgtgttcccagacctcagaggttcacagaattcagattaagaactcctggactaaatgacttctaagg

SEQ ID NO: 318131 - DNA, 4001 bp, Homo sapiens
tgggcatctttggtgaatcaatagaagctcctatgaagtgccaggtgctagagataaaaattactcaaaagttgcctctgccttcagagagttcatgagctacagaaaaaagatgaaataaacaattacacctcacaacaggatgaagtaggcagtaaataactgcatgggcaaaggaagcttctgagctctctggtaaagaagagatcgtgtccacaggctttgtacaaaaaaacatgtacagaaacacatgttcagagccccgaacctgccttgcaacaagcttgtcaaacatgcacattggccttacaaatagcctgtgtacccctcactattagctcagagaggatgagtatattcacatttcatttctctctttacatttaaggagccaggtattcttccaccgatgtggctgtcttgccaacctaagttcagaccagtgaaagagagagtgaaaaaccagaagaaaatacatgacatccagtctttaatctgcaattgtgtgtgggtgttgcaatcattctattattggttttcaagcagctcgttctgttggaaatcaagtttatgaatagacttgctgtaaccataaaggatttttcccctgtgattaatcattaaaatgataggtgttaaatacatacaaaggaaagacagttttctggcaaagtcattctgtctcaagcagagttcgaaaggggaaacctgccgggcgcggtggctcacgcctgtaatcccagcactttgggaggctgaggcaggcagatcacaaggtcaggagttcaagaccagcctgaccaacatggtgaaaccccgtctctactaaaaatacaaaaattagctgggcgtggtggcatgcgcctgtaatcccagctactcgggaggctgaggcaggggaatcacttgaacccgggaggtggaggttgcagtgagccaagatcatgccacctgcattccagcctggatgacagagcaagattccgtctcaaaaaaaaaaaaagagagaaagaaaggggaactcaagtgactaagaatggatggaaagagtcagaattccctaggtggtcatgttctgacttctgttctcagtccttgatgaagctcatggacaagttccttctgcaagggcacggacaagatagaaaaagtacctccgcagttcattcataaccttgaatgctttccccatgtgggcagggttgacagtgatcgtcctctggttcttctcatcatccccagcctgtatcagagtctgggagctcagcttgacactgtgaacaggaaggaagagggagggaaagagaatcactcattggtaaacccattcatccaactgccaaaagcccatgcatttacccacctaccagaggcatctatcagcctgttctcacacagacccaataggaaagacaatgtactgggaatttcttcatatcttccaaagcaaagtgcattcctctgaaggaaggcaggtcatagctcagcttcttccaccaagtactgtgtgattttgtgtgaggtccttattctccatctctccatcctgaaaactgaaggggactaagcactctatcactcacttcacaggtttgtttgttcattaaacaagcatttactggaggctactatgtgccaggcactgcgtttagatttaagggaaacaaaacaataggcaaagccaccatcactaccctcacaaagcttagagttcagtagaggagaatgccaagtaaacatttaaacatcacatttcaactattatgatttcataggagctacagaagcacaggggatggccaactcgtcccagtgatagcaggttgatggaaagcttcctagaatctgagacttgaagtaagagcagaaacgagtcaggtaaagagaaagaagagtattccaggcagaggaaacagtatgcacaaagacctggaggagaaaaagcacaaagtgtgttcaaagtactggcagttcagtaaaactagaggagagcacaagagggaatatcaagagaaaaaactagaagaccaagcagccttttaagtgtcatgtaagcaaagctaagaagtttggatttctttctgaaataatgagaagccatcaaagggttttaaacaaagtaggacagaaagcaggtaaacaaatctgtgttttagaaaaatcacattggctacactccaggaagcagtcgaacaacagcgaaagcttttgggaaactgtaatcccatagaaagacaaaggattataagtattatggaaagaaaggctatctatgtagactaactgagtaagtagaaactagcaagagtcaaccataatctcaatgccttctgtactgaaatcaagagacaagggtatggtggctcatgcctgtagtcccagctactcaggaggttgaagcaggaggactgcttgtgcccaggggtttcatgccattgcaccccagcctgggcaacagagcaaaactctgtctcttgaaaaagtgaaagagaaagacaaaatactcaaatccctgtggggtgccagctagttacccaacaactcctgagcaacatctttcaactttatggaaggtggaaataaggaatcaaaagaatgagcaaggaaaggtgtttctccccaaattggtgaaactattcagctcccaggagtagtgtgagaccttggagttaccggtttgatctaggctaagctttgctttgctactaggaaaacagaaccttctccacttgtatagatttgaggacccatagttcactccaactctaggacaatgagggtactctcctttgattttccctagtgagcctctatccatgctaccacttaactttgcaaactggctagagaaagaggcttctatgctttagagtatatttcagaggcctgagaatcactatagatctcacactggaattcgtaactattggaacattcaaatacgaccagcgtggcagacccacagcttgtctgaccgtaacagactcctcttttggctcccttccccaccatcagttcatcatgcaaacgtaagccacaaataactgaactttggggctgtttggattctgtgcacaaggaagttagctgagcagaggaagatatgcacaaaggaagatgcttagagttgtgtgtttaaagcaggtaaagaaagtctcaagccagaaaatgtggcttgagacttgaatcagagaggggaagcaaccagcaaagatgaaaattttcttcaaaagatgagctattccataagcataatttattttatggtgtctttctttactataaagctagaaaaatgttaacttctatgttctactaaaggtttaacatttttgcttttggtatttaagcccttatttcatctgatacttattttttctctttttttgagatagtttcactctgtcatccaggctggagtgcagatcttggctcaacctccgcctcctgggttcaagtgattctcgtgccttagcctctcaagtagctgggattacaggcgtgcaccaccacaaccggctaatttttgtatttttagtagaaatggggagtttcaccatgttggtcaggctgttctcgaactcctggcctcaagtgatctgctcactccggcctcccaaagtgctgcgattactggcgtgagccactgtgccaggccctgatactgatatttatgtcaggatatgaaatagggatctaattttctccataagtttgatgtatttaaaactttttatttttctcatgcatctgtcatgccatcttaggtcacatattaaagttccagatacaaagagatttctttcttgacttactaacttattccactggtcagtttgtctgtctctgtaacagtaccacatgatttctgtagctttataataaggtctgatatctgacagggaaagtccccagtcctattattatttttgagaagtgtcttcactagcttgtcaaattccataaagaactcgaatgggattttgattaaaaaactgcat

SEQ ID NO: 318132 - DNA, 4001 bp, Homo sapiens
ctccaaagccctttccaagataccacaccatctcccagtgcaaggcggcattaccacacttgtgtttaatccttagtaaagaggcccccacatcaccaactccaaacctcttctatgaacattcataaaatattccttaccaatagtttatctccaatggtggtctcaattttaaggctgagctactctaaacccaaacaagtctacctcagaccatcttggtcaaaccagttgcaccttaatggagaaaccactggaagtgaatagcagtctctattcctgagcaccacacagtcctctgttgaaccacaagccaaattcctgctcaagaaacttgccatttctgcatcaagggtaacattattagacaggactactggctccctcaccttcaaatctgggtatctgggtctcttgagccagaaaaagatgcctgactttattgtggtatgatagggacaggaagaagaagccctatgtcactgtcacttagcccaaaagtgactaactctagaagatagccacgtggaaggtgaagccattgctccttcatcccaggcagcctctgacaccgccatccctttttctctgaactattctacctaatccctgactcctcaggggcaaaactctcagaaaccagaccctatctactaccactattactctgcaacctccctgaaggcccactttgtctaagaaaagaattctattccctagttctccttctctcattgtccattgccttgtattcagttttgctgagctgcatgttatgcagagctcttcaaaggcatcaatataccacacaaacactagaacacagacacagccacaggccagggcctggtagagtctggcttgcagcaagggtgaaacaacagttctgtggaaggaacttcatgcctgggaagtgaataagacagccaggccctcatggttctgccttgtggatgattcctgcctactccaagtctaagccccttgtctctcacccccagcacattcctgaactctcctctctatttctacttaccatatattcaaagataccaaacatcagcctaaatctaataaaaactggacagtaactcctctttaaaaaacaaaaaccaatctaaatcagccactacatacagtacaatatgaccagatgagtgggacagatcactcccagggcttcatttgggatggaagcccaagtgtcttttagccatgattatgggcataagaccctgagcccatatattctgtagacctcagttcctttaacaccataaaataggggctgtatctggatgacatgtaggcagggacccatatggagtacaaatactacagtatacagaagccatggtaaagggcatgataaagagagaaacactgatgaggagattttgggaaaattgcttcccttgggatggaggtgctggatggggaggatggggaatgagtcctagacatttcatctttataggaaaaagatgggcagaacacagcactactggcctccccactcaagttatgctgaaagcagtaaagggcaaataggttgactgctcaccccagatcttcttatagactggttggattgggacactctctgatgggcactcagacttcagtttcacatttattccaagttattgtccacaggacaatggtcaagaagtgtgggattggtatttggaaccacctcaggacatttgggcaacatgaactcggaagacaaaaaaataaaaacatttaagcttgagtaaaagaccataatcacacaactcaagtcagaagaaagccatgtgtattttactttccttttggctttaaacacactgatagaaatggatctaacgagagtcagcctcttactctcagtacacaatgcattttacacgttttgaagctgaacctgataattagaacaaaattttgcaatgttactggagatttttagtatctgtttaccaaggtttaggcaaagccaatgggccttaaaaatatataaatcttagatatcttgctgatgggagcataagctggtacaactgttctttagatcaatgcggcacatgtctcaaaagtcttcaaagtgtgcataccttttaatcgagtacttcttattctaggaatctattctagtaaaataatcaggaatgtacataaagattaagatgcaaggatgcccattatatcattatttataataacaaaatattacataaaactataatttccaacgaaggaaatgaattttcaattagagtatatataatggaatcttatgaaggcattaaaattaggttgtaactgcaatttcattgacatggaaagatattcattatatattgctaagctcaattaaacaaatttttattgatcacctgctatatggaagaccatgctaggcagcagggacatggtggtgaattttaaaggtatagttcttacccttataaagagtatgattggccagggaaatcaaacattgaggaagtaataagatgagtagtaatactaaagagaagtataaagtaccatgggagtaagtagcaaaggaatttaacctaagccaaagaggtcataaaaggccttcctgaggaagtgatgcttaagcagtaatgaaggatgaacgggagtcagacaggccaaaagatggaggagagaacattccaggaagatgaatagcaatttaaaaaaaaatacatacatcaaaaaaggctatttaggctgggagcagtggctcatgcctgtaatcccaacactttgggagccgaagcaggtggatcacttgaggccaggagttcaagattgccttgccaacatggcaaaacccactctctactaaaaatacaaaaattagccaggcatggtggcacacacctgtagtcccagctactcaggaggctgaggcacaagaatcacttgaacccaggaggcgaaggtggcagtgagttgaggctgcaccactatactccagcctgagcaaaagggcgagactctgtctcaaaaaaaaaagactattcaactgtacacattaaatgaacttatgttaaaatatatattttgtatatgtatacatttataaatataaaatctaaaaagatataaaccatactcttacctagatgttgtagtacacgtaattttttactttttgcttgcccacagtttctggtttttacctgtaataaacacatgtgaacagtatttggatggacgggtgaatggatgggtggaaggatggatggtaaccaggtttaatggaaggcttgggctgggcattgcattacactgctttcttctcttgattctcccgtcccttccattcctagaatctaagaatgccccagaagcactttttcttccaatttgtaaaatcactttggttttgctatgacacttccgctacttcagaggcaagttcgttaacaaaaagtggagccagcatgacaattcattgcaattccaaacagattcctctctcaacactgaactttccaaactccacacacaaagaataactggcagagctatttattgaagttacagctaaataactattacagacaagatgaactattttaaaatagagattgatgaaggaaagggggaaaaaaggaaataaaggccttgcagctagggtttaggacaactcaaaagggaatgcagctcaaaatttccagatactgaacttagctagttttctgggctacagtgtgaaattcctggcccaaggctgaaagtaaggtaagagtagcctggtccacttagcagaggcaccactccaagttgagaccagttccttcacatgacaagccaagggggacacacatgtgacaaactctcagtgcacaagtgccaagtctctcccaacaaaaccagtcttgcccagctgtgtaccatattaggaaaagggtcacagcccattcagcaaaaatgtgcctgcactcacccctccttagcaagcttgtgttcattcttcagacattcacttattcacc

SEQ ID NO: 318133 - DNA, 4001 bp, Homo sapiens
gaacacagtgcccaaaactgtttgatccgctgctggtagtctcacactgacctctcaaccccagttacaccacaggtcaagcaaataggcatggcccagaatctctaaaccttcatcgcatcaaccccattctctgccacctaccagatcaatgggacactgttttggggaccaaagacactgctcacctctgccccacacttaggaaataggccttcatattctgctgctcagcaggcctcacagagttcaacactaaactcctgttgcaaagagcacccagaaagagaatgcaccagcagcacagtcagtcccaggctcttcctgtgggagtcatcaagaaacacagttcccagggcctctacagacaaaagaatgacacccaatcatcatgctagttctaatagggtctagagatgtttaatggcatcactgtgccccgtgagacacagaagtcacaacaactcatgaaaaggaaagtgttcattgagatactctctagtgttgacttagttgagcctattattgttaaccagatggttactgtctgcatcaaactggcaatctggagcagcaggcttcccctcagtggtgcactgccatggccggacccctccctgcagtcttctctcctcagataaaatggcaagcctcgtactctaccaactgcagaccaaagaatgaagaggttggcactcaagagatattttacttcatagacagaggaatgtcacctctgcactgcgctgagcaccttcacaatgaaagattcagatcttcagataacaatttaaaaatttagatgtgtgtgcctgccaggatctaactgcctcgctagttagatccagctcaacaaaagtacttaaaatcttttctgctggttcctatttcaaaagaaatccctgatggaggaagcacagaccttccagtatcactcataaacttttcaatacaaatatgaaactcagttcagagcaagtatcatctgactgggtttctctccttcatccctgaatgtgtgtgtatacaggcatacacggcgtgcacgcgcgcacacacacagccatcagcatggcatgcttgctgaagattcaagcactcctgcgtgaaaatgcaagtacactatgtcaggtcagccccactatgacatcaaaaaccccccaccaaagaaaaaacaccccgggaaaggagccaggaaagggaaacgcctccttgaaacagcctgagaaaggcaatctgattcagcctgtgctgaaactattcccgaacaccagccaggaagtcccttctttcagggtgctccgctgcctagcaaacccagacctgcctttgcggaagccagatctctggagattcaagccctggaacgggtgatttggaaagcggctttcctgctcttgttctggcgccctttaagatccatcagtggccaggtcttccaactctgcctagccaatgcaaacacaaaagctggtggctgcaccgcaagcacacatacacttacatacacacacaacacagcacacacttatacatacatacctttcaccctccattgtgtgaggcccagccagggtggtagctgctgaactgtgtatgcactcggggatcctagttctgttcttgattctcccagcagaccagtgggaaatctgatcagcaacagtgattcagcatggctgcaagtgaagcctcctcccttctcaatcctccttcctctgacttactcgcagcagcttctaccgcaaaagcagcagcaacagaaaatgtcttacccagagctccctgcagccctttcagctgctaaaagcagcaacccacttgctccccctcccccgcaggcttgctgctccttggtctcctaggaacggcggcagctccagcgacccaggtgcactgccacctttccagcttcctctgcatctgcccaggcatccccagcccaggcgattagcccgcccctggggctcctgcctcctctgtctaggctgcaaagaatcaggcagttcgtcactagcccgagaaatactggcccctacaccctcccctgctcccataggctatgagtctgtcagcctggccagattgctggaatgaggaggcccctctgtggcctgcagtggagtttatcatccacctggggaaattcacttgtaggtcacagtttatgttccaaatcctcctcccaaattctgtagtagctctgagtgtctgatagatggggagaagttaagggaaaagcacctgacagaagtgagaaaaacacagagagaaattaagagaatacagagagaaattggaaaactagtcgaaaaagagaggtagtacaaataggtgaaactgaaacaaaccctattttactgcaagaggccaaagactactgcagtaaagctatcacaatgaatactaaaatatcttagcacaatcctaaaatatcttcctaaaatctgtcatattggaatttaacttaagcagtggctccaactagtaagtctcccactgaacccccatatccagccaaagatctttcacatcctgtaatctccagctgctgagcttcaatttagactaatttaactctccctgcctgaaatgccttctccaatcccagtcctttagtctttctgggagtccagtcaaatcccatgtcttcataaaaccttccctaatcacaccaatgacagtcaatcaccaccaaaatacacaaactatactttcctgtatcgtcatctcacacctaatatacagtcttggctaattcattatttataaatcttctttcccaaactaaaacataatcttgtggaaggcatgaggccagtctgtatatcctagccacagaggcttagaggtaactgggacaattagctgcaaaaagtggtgcagaagctatcctaatgcctcagaaaaaaatcagctatgagcatctctcttctgggacacctcatggcacccctgggcttttccgaatccacaccagcactcactgggtgagtgactttcctgagtagtgttctccacactctggacctcatgctcagctactcattcacaatatagggtcagaccagacaatctttagagtccctttcagctccaagatcacaggattctaaaaatgttttaaatggtccgtttttcttctcagagtaatccgtgtgattgtttaagaagaaatactaggctccaatgtgttgtagggggcttcaaggaggataacatgatgtaggtgaaagtacgaagagacgctcagtaaatctatcatccttatcattttaacctgttaaatttcttcactactacaaagccctaaaaccacagaaggaagagaggaacactgaggtgacagaaagtaaaagtaactaaaactttatatagcctcctgaactcaaactggctacagggttattctcaaagattacctcccctggcacctcagtgttctcttagacaaggccattactcacactcactctttctcaagtgagaagaggcctggataatttcatttacaccccacagggctgtatcttcacttcttccttgcacaacaatacccctcatatcttgttccctctatgtcccttcctcctctaatcagccttgtggccctgctccagatatttcctcttgaggccaatcacagggaccacaaaaagctgaacatcacaaataaggaaactgaatctcggaatccgtgccagagttcagacatccaccaggaacacaactgggtgattcataaaagggacataagaaagagatgactcctcctttgcacatacccacgtttacatattcgccatacaggaaggtgtggaaatgccacatctaacaaaccagacaaagaaaaaagatcagaaaaggaaatatgtaagggttgtatgtattcaagtttcaaaatataactattaagagccagtataaaaccctgctaaatttccctgcaaaaccatacgactacaccttcatactttattcaccactcatgattcacagga

SEQ ID NO: 318134 - DNA, 4001 bp, Homo sapiens
cggcttcatttttaatttcattagctcctgtgcacatgcacacatgcgtatacgcacacaacgctcacacacattgttactcaaatacctgcctgagttccctattcctagaaactgttttggctttcactttcactccactccttctaccataggctctaccccgagagagggtgctgccacaacccttgaaaccaacattctctgagatttatttactcagcagggagctgcaggaaaggagagaacagggtggctgaagctcaagtgactgcacagaaggggctttgaaaagaaaagtgacttacacccagggtcatcagtaggtcttacagtatatatttgagcccaagatcctctactccaacatgcctgttctaaccattgtattatcctgctgcttccaatggggccacattccaggactgggttcccatcccacgagtcgttagaaaataccatgactcagtgagctatttcccctttctttttgtttatatgattgtacatttcaaaaagtcccagtaaatggtatttttttaaagtaaaaggatttaaacaagcagccacgattccatcataatcagtaattcttttatcacattaattattatcacacagtgattggagaaaataattactacagaggccgcattttacaaaacattcattaccttacctcatcaatcccaaaatgtatttttaaatctgaatttatcttaaaatctgtggaatctaagcttccatggaacagactttgtttggtcataagaacaatcctggtaggcaagcattgcccagattacaatccccattttgcagctgggaaaactgagttcaaagaggtaaacaatttgcctgaggtcacagagctagtcagtgcagaaccagaactgcaggcctagctcctgattttcagcacaagcggtatctaccatatattcctggcctccaggccctgtgttcatacctacctgttcccatcactctcctggccacaccctaacagagggctgagggagacctcagctcccccaaccaggcttccctagcctcagccagctagaggtggggtaaactcactgtggggactcctgggagcagtctctccacataggaaatttttaagtccaaagctttcactttcaagaatgaaccctgtgtgtgaggcagcactgcagagaccaaagctcagcttgggcgtgaaggcaggattttgctggtgtccttataaaccccatgcaaactagatctaggagttccccacctggggaccccattccctggaaattactcacaaatgctctatttctcatatttcaaaaggtcaaatgaaaatcaaatatcgactctagataagatctcacagacagaataaaatactacactgcttttggctaaacctgcatcaatttagtggtttgtgtctgctaaccaaaaaacactgattggctattacagggccacaattcacatagaagaggaaaaccaattaacaaattattatgtaacaggtgcagctgacagacttaaatctttcagaacaaggggtgtgacaagggaaaacaatagaagaggaaagctgagagtggaatttgagctcctcattttcccagatggggaatgtgaggttcagagagctggagtgactcgctcagggtcacacagcagggctggaaccagcacccaaggtttctgcccctagggagaaggatcttcctaccacaccctgctgtcctgaggttcaagaaacgcagagtgctaggactcaccagggttgctgaagggggccaggacagggaatggcaatggcttctccctgtcacctgtgggctccttcctcggggcagctgccaaggccacgctgtttttcctccctgggagtctgccagggcagctaggtatgggagcctcttggaaatccagctctgggtgagggaaaggaggcctctttgacaaaagcaccctccaaagcatggagtgaccagggcctggggtcactatgtggccctggagggtttaggtacatccagatcgcacagctgcctcctggctctggcccgggagctctccaggttgccaggctagttttccttccagacgctgggtgcctttaagagagcgacggcagctcattggccgagcaaggctaccccacctctttaccttagcggggagcacagctaggctagaggcagagagactcaggtgagtaaacaaatggtggcaacccgctgagtctcccctcctccacagccctggtcctgggcttccttcctcacctccactctccaccctggaaaacaagctggggctaaaggaagagcaaaacactctgcaaagtgcttagtgcggttcagactacatgatctcacagtgaccctggggcagagttattagtacatcttctcttttcagtggaacaactgagtccttggaggggtgaagtggcttgtccagttcacacagcccttgcaaggaaggtcgacagagagggatggtgtgaggatccaaacccgagtctcctgcttttgacttcccatacggttctgttggaccacaccactttcctgtttgcaaagcctttggcaagtcactcactgcctcagtttccacatctgtagcatggtatagtcatgctagtgatcctctactcactataatgagtatataatcttgggtttaaagctgaaagagactttggagattatatagctcatccagtcatttatcaggcattcattattcaaaaggcattattattcagcagctattatgtgtcaggctctgttttagttcctagggacatatcaatgaacaagaaagtcaagaaccttacttttattgagtttacattctggagagaggggatctagatataaacaagccaattagataagtaatagttccacaaaaatgaaataggttgatatgataaagtaatggaggatggatattttcaatgatgtggtcaggaggccctccctagggaggtgatattaaagctgagacatgaatgatgacaaggaacgagacattggaagagctggagcaagagtgttcaatgcacagagaaccaaccccaagtataaggtccccgaagcaggtacgtttggagaacagaaagaaagctgctgtcactacaatatagtccaatccctgtaccccctcttaatagataaggaattttatctattccttatttattcctggaaggtaattcaagaattcagaaagatgattcaacttgcccaagattccctcttgtaaattcctccttcctttctttatcctcatgtagaagacaaggaaactgaagctttggggtgaccagcatacttgggttaccaacccaacaatcattctggtagcctacactgctataatctcatgcttcttccactctgtagacatatgtaaactcccagacagcaggaactatgattttaagagtgtaccacactaccgggtgcggtggctcacgcctgtaatcccaacactttgggaggctgaggtgggcggatcacgaggtcaggagttcaagaacagcctgaccaacatagtgaaaccccgtctctactaaaaatacaaaaataagccaggtgtggtggcgcatgcctgtaatcccagctactcaggaggctgaggcaggagaatcgcttgaacccgggagctggaggttgcagtgagccaagatcacaccactgcactccaacccaggcgacagagtgagactccatcttaaaaaaaaaaaaaaaaaagtaccacactgaagaacaaaatcctgacactgacggaatatgtagtagtcttcaaaattccagcagtaatgcaaacggccacactgtcacatggggtcagcacagacccttcctgtggggttcctttccactttcattttcagaattttttactctgatttttaaaaagggctgcctgttttcagtctcacattgttagtagtagctttggtattattctgagactgttggatatacagt

SEQ ID NO: 318135 - DNA, 4001 bp, Homo sapiens
caccaacttgttgtataaccttgagcaagtcatttgatcaatctgagactcaacctcctcactggtaacaaaaggctatataactaaatcagagttcctaaactttggcactacttacactttgggccaaataattctttgttttcaggggttgtcctgtgcactgcaggatgtttagaagcatccctggcttctacccgggatccctgcttttcacttacactgttgcccctgcctggaaatctctttcttcctatagttgcataggttgctctcttacctcgtttttgccacctttttggcaaagccttgcttgatcatccttttaaaaattgcaacaggccaggcgccatggctcacgcctgtaatcccagcactttgggaggccgaggcgggcagatcacgaggtcaggaaattgagtccatcctggccaatgtggtgaaaccctgtctctactaaaatacaaaaaatttaactgggcatggtggcgcgcgcctgtagtcccagctactcgggaagttgaggcaggggaaccgcttgaacctgggaggaggaggttgcagtgagccgagatcgcgccgctgcactccagcctggcgacagggcaaggctccgtctcaagaaaaaaacaaacaaacaaacaaaaaacaaaaaaaaataaaaccaggcgggatggctcatgcctgtagtcccagcactttcggaggctgagacagaaggatcgcttgaccccaggagttcgaaaccctgtctctactaaaaatacaaaaaattagcagggtgtaatggagcacgcttgcagtaccagctgtggggaggctgaggtgtgaggatcgcttgagccctaaggtccaggctgcagtgagccatgatcacgccactgcattccagtctgggtcacagagtgagaacatctcccaaatttaaaaaaatttttaaaaattgcaactgtactaccccaccgtacactccctagcaccccttcctgctctattttttccccacagcatttatcagcacctgacacaatattttacaatgtattttacccacacacataaacactatgaaaagagagatttttgtctgttttacggagaggcgctcaattttttctttttttttttttttttttttttttttttttgctgtaagtaggaatcaacttacatactcctctctccacctcggctttatttgtttgtttatttatttattttatttttaagacggagtctcactctgtcgcccaggctggagtgcagtggcgcgatcctggctcacagcagcctccctctcccgggttcaagcaattctcctgcctcagcctcccgagtagctgggttaacaggcgcgcaccactacgcccggctaatttatgtatttttggtagaaacggggtctcaccatgttggccagggtggtctcgaactcctgacctcaaatgatccacccgcctcggcctcccaaagtgctgggattacagccgtgggccaccgtgcccggctctccacctcgattttagaaactccagagaaataacaaatatgatatccaagtactccgtaaagttaacagacatcagttcgtggttcataaactagcaagaaaaagcaaagtctctacgaaaggcacgccttaagcgtggctctcttttagaaaaggactttcccttcaggacagcacatggagagcccctagagactggccagtccggctccagggcccctgcggattcttctcgctcaaactcaccgccattgcaccgcccagccgactgtgcaaatccacgacaatgaccctggcgacctccacaaaggagtggttacctttcccctccctctcggggatgccaggcctcccacgaaactaaagcacacgcttcacacctgctgaggcaatcatccggctccttactaactacagccaaggcatctcacagcccgccgggaattgtagttcccagaccacccgagcagacacccagcaggcgctaactgactacaattcccagagaaaaacgggttatcggaagtctacccgataggcccactcagaggggaaccggcagtgacgtcactggcatgttgaactacaaagtccatgatgcagtgcgggatcgcagaatgccgcgagtgcgccctggttaggttggagtcccttggccatcaaccttttcacccggtagagctggttgcctgtcgggatgccaggatacgcagttaattactatacggtgactgaggtgctacttatggcttgccactatgcacagatattttttactgtcagtggcattcaacagcccagcatttagacattgtataaccgcgtattgacaatctccttttttttttttgagacgcagtatcgctctgtcgcccaggctggagtgcagtggcgcgatcttggctcagtgcaacctcggcctgccggattcaagcaattctcctgcctcaggctcccgaggagctgggactatgggcgcgcgccaccacaccgactaattttttgtatttttggtagagactgggtttcaccttgttagccaggatgatcccgatttcctgacctcgtgatctgcctccctcggcctcccaaagtgctaggattacaggcgtgagctaccgtacctagccaacaatctccttttttttttttttttttttttttttttttgagagggagtttcgttctgtctccaggctggagtgcagtggcgcggtttcggctcactgcaacctccgcctcccgggttcaagcgattcttctgccccagcctccttagtagctgggactacaggcgcgcgccaccgcgcccagctaatttttgtattttcagtagaaacggggtttcaccatattggccaggatggtctcgatctcctgaactcgtgatccgcccgccccagcctcccaaagtgatgggattacaggcgtgagccaccgtgcccggccaacaatctccatttttaagcaagagactgaaagcctacctggtcccattgcctgactcagactatttagaccactaccaaacagggccaggggcggtggccataatcccattattttgggatgccgaggtgggcggatgacctgaggtcaggagtttgagaccagcctggccaacatggtgaaaccccgtctctactaaaaatacgaaaattagctgggtatggtggcgtgcacctgtagtcccggctactcgggaggctgaggcaggaaaattgcttgaacccaggaggcagagggtgcactgagtcgagatcgcaccactgcactctatcttgggcggcagagcgagacttcatctcaagggaaaaaaaaagactggtcgggtacggtgtctcacacctgtaatcccagcactttgggaggccgaggcaggtggatcacgaggtcagaggttcgagaccaggctggccaagatggtgaaaccccgtctctactaaaaatacaaaaattagccaggcgtggtgtcacgcgcctgtaataccagctgctgggaagctgagacaggagaatcacttgaacccgggaggtggaaattgcagtaagccaagatggcagcactgcactccagcctgggcgacagagcaagactccgtctcaaaaacaaaacaaaaaaaagactatgctaccatacagagatatatggtgtctgatacagtagccactagccacatgtggcaatttaaattcaaattaattaaaaataaataaaatttaaaattcatttcttgccgggcacagtggctcattcctgtaatcccagaattttgggaggctgaggcaggagaatcactcgaacccaggaggcagaggtcgcagtgagctgagatcatgccattacactccagcctgggagacagagtgagactccatctcaaaaaacaacaacaacaacaacaacaaacacaaatggccgggcgccgtggctcacgcctgtaatcctagcactttgggaggcctaagtgggcggattgcctgagctcag

SEQ ID NO: 318136 - DNA, 4001 bp, Homo sapiens
ccatttatggcagaagaaggaacctgcctgggtgctgtagatttgtcctggggtctgagatctccaggaagaaaactctcccttcccccagctcaggcagtgaggtcttcctgtaccatccctgacccgtggtccatctccctgtactgatgggagttttagggatcaattctctgttgctcaattggattgtataattctcctggtcacacctgaatgttaggcctatctgtgcctctcagcccgtcccaagtctttctcttcataattctcaattcctttctttttcccttatcaaggtaacatgccactttattccctcttggcaaattttaccttgttgccctatcttatttggtctatatttgagcaagatatttagaaacatccttcaaaaaaccagttgcgcaacaatatttgctgaaatctaagtttattatgaccttgcagaaggaaaataacagaaatgaaagcacaaaatatggcaaaaaacaggatctgtgaactgtacccctaccataccacacctagttcaacatgttctcattttcttcttcaggttgggggagaacagctgtgactataaatgcctcggaaatgcatagaccccaggtttggctatacgtcctagggaacctcgtctaccctcttgaatctcaatttccccaggaaaaacacgaagctgaattagatgacttctaccatcttagctttacaatctcatctttatgacagtctggaatatcaacagaatccgatgccagcctgcagggatgagggtgttagaagcttaaccgtctcgcacaagtcatcttaccacatggtcagggtagagggactataactaagtcatgtggcttgagatctgcccaagcagatgcgttgtccccttctgccaatgaccaagcacagggatccttcaacctttcctctaagtccagaagataagacagcaacgctctggtcccagcaccgccacaagcctcttttcctctaggggcctcagttttcatagctataaattggggctcacatcagttttctgtcctgcttcacaagactctcataaggctccaaggagactgccccaggcgggagcttgaggaccccccttagggtcgtgagcagtgaaagcccaaatgctgtgtctggcactgctcatcatagtcctctatccagccctcccaccctgcctattctttctcctgcctccaggacaccacgtctcccctttctagtaagtagcgttgatctcattagcagttacaacagttctctgcatctcagagcatggactttaaaaccagataggtgtggcttgagtcttgcctctatcacatgtagtccctagggcttcggaccatttcacttccctgagctgattttgcagctgagtcaaggggataacaatgctgacctcacaacatagtagggagcgctaaatgggacagtgcctgtgagacaccgaattcaaaccctagcacataataggcacatactcatttgagggcttctgctcccatccttctctccggaactcatggtcaggaaaactcagcggtctatatggcgctcactcaaccagtaaagttgccatagggttccattgctatcttatacacctcccacattctgccccaattccatcgtcaagcctcagctcagcccaccaagggcactagcatcatgaccattcacacaagagcaaggcttaccttcttgaaatagtcagcaaggctgtcggggtcccagcccaggacctctgagcgaaagggcacattcctcagtgccatggctgctctcccgggaagaagctcacaagctgagcatgggcgcttcacccatgggcagagaagctcaaatccagagctcggaggcgttcttggctcttccaactcccagctaccctgtggaacacccctgttggagccgatgtcttttctggcgtagccagatcccagaaagcaacggcttcctctgcgaacaaatatggtctcttctcagaaaacgactcagctagtttcctttaccacttcctctgctgggctctaaataagtaaacaaggaagcccagctctggaggcttgagatgcagagagagccacagggttggtaattccccactggctccagtcaccccaacccagtaggagaggcaatgaaggggtcttaaactccaatgtgagtctgagtaattttcctttaaactctgggcacccatatgtctacactgcattcttgctcagctggggctttgcagaccaaaatctatcctgacggttgacctgaaatacagacaatttcccacatcagtgaactgctggagcatgtttttttaatgctttccaaccactttcccctcccaccatcaaagactgggattctttcagctgcctctttacagttgtcatgagagggtcctcaaggagtgagtgagtcaggcacccagggctgaacaaggtgctacactgtgcagacagggctcagtttctgatatgactatttctgtgctatgcaaccttaggcaaggagttaaaagctgggaatctcagtttccaaatctgtataataggaaaacagtgattcttcatatgcacataaaacttagatgcattcaactagacaaacctaaaaagaaaaattaaaaagaaaaaaaacttaacaattgctattggtagtgtcatatattccattcactattgtttccacaatatattttattcactattgattctgccatatattctagccaaagagcacattccctggagataggaggtgagaatttgctgttttcttagtttcagacattgttcatttctcataactgaacaacttattggcagagggtgagtccagtgtataaaagcaactatatttgtgcaataaggcaacctctaaacacaagttactacttcatctaatgccacacacacacacacacacacacacacacacacacgagtcatctgttccaaggctgttgcctttactaagtgatgctatgttggtccttgaggtggtgccttcctgagggttttcaagcatagctttggccatgcacagttttcttcttatacacactctgaggagccccgccgtcacggtaatgcacctgcctcacaagctggtgggcagcttaaatgaaatacacattttgctccaggcccagcactagctcatcaatgtgagctggtgttagcctcaccttagaaggtgctgagggcatcagtgaaggtagcccaggccatttgctccttgcagggcctcacacctaagaactcttttcttttctctctttctttctttctttctttttttttttttttttttattgagacggagtttcgctcttgttgcccgggctggagtgcaatggtgccatctcggctcactgcaacctccgctgcctcccaggttcaagcgattctctttcctcagcctcccgagtagctgggattacaggcatgcaccaccacgcccagctaattttgtatttttagtaaagacggggtttatccctgttggccaggctggcctggaactcccaacctcaggtgatctgcccgcctaggccttccaaagtgttgggattacaggcgtgagccattgtgcctgggccgcacctaagagctctttgtagctgatcattctgtataaagcacagctctgctgtacaaaagctccatcacgggtgagaggtcacctggtctttcaaatcactagcatagcagtgaacaataaaaagccatttgaagagaaagagagagagaaatcactttgaagtagagtaagcacagaagatgtcatggaattaactgggatttaagcagggccgtggaggatggagtaaaagggagggcattcctgacgtggatcaatcaatctctctctcgctatctctcaaaacacatgccacctatgaaaaggaacattccagatcatccttaaaagtagaagcaattttactttattttattttaatttctcctttttatttg

SEQ ID NO: 318137 - DNA, 4001 bp, Homo sapiens
tatatactaactagatttttccacatctgtatagtatattatatgtattttgtggtattgagagtatagaaagtttagagtgtcaaacatgcgtttaatgtgtatttttaaacaaatttatggcaattaaaatatttggagacaagggtatcacatttcaatttgtaaagatctttttaactctactgtgtcattaagatgctttgtacaatgccaaaccatagttggagaaactaagtttaataaatatcaaatagattttctgtattaaagttactgaacactgtactctttatatttcttcaactctgagcccttttcatgcaattcctgttttgtgtcttaaggtccgttactactctttaaaagtctgttcccaccagctgaggtctcattttctgattacagaaattctgaacttgctggccatgggtccttgtgcatatgtcaaaattcaccttgtcccaacagaaatcttaaatctcttttggtgcttttggtggcttgggctttcattgctttattaaactagatttttctctctgttctgccttatcttcagacagccatagacaaacctgggtgcttcattagatggcaagtgcttgaccatcttttttttttttttttttttttgagacagagtctctctatgtcacccaggctggggtgcagtggcatgatcttggctcactgcaacctccacctcccaggttcaagtgattctcctgcctcagcctcccaagcttgaccacctttgacacctccctgaagagtatggagtgaagggatccagggccacagcttaggaacttgctgaagttgattacgtagctattgattatgtagctctcactacactttccagattgagaagttaacacattattgggcaatgctgtttttttctttagtatacaaaatgaatccttctttccctcaaaagcttgaattccagactgctaaaatttcaatttgagacatttaatagtatccatagaaaaataaactctaaattgacaagtttagttatgcttatccatatatcaacattctaagaagaaatggagaccaatttaaagcgtacatctgcctttaaatattaaaaatacaagattgcttcacttgggtgtctccagccaaaatgcagttaatcaatattccatagaacggagcattgtcggaggtgactgctgtcctttctttccctggtatgtacatcattcctgggccacacttaaggaacagcgtctttttctaggggaaaagaaagggtagttttttaagactgggtctaggaatgaccagggccacctatgctgcatttccttcctctttgcttgatctgtccagtctcaggaaagactgaagaatggaaaggcaccactctttcatggtacccacatagagctgttcttggctcctaactcctaagggattttccatggagctcccagtctcagtctagaactcctccatcccagctttattcttaggttcatgtgtccccttgtcactcctctgcccagcttcccagggctctctggcccaaccctgctcccaggttcagggagtacctgcatagccttgtgatacactcagaatcatcccggcaggaggctccaataggcctgagggaaacccctctccaaaatggggtcattctccgtggccttctctttgccgaactcacttctggtattggggagccatctatctgtaagggcaaagacattcagatatgaaagtgttgacaccctgctgcacaccttggaagagtgatcattccattccgcagatgctgtagactcagaacagaggaaccattcctcaggactgaatctagctttcaagttccaccaccactatcatctccacactccacacacacacataagtatccttccctccttacctggcccaacagcaacaggaagatcatgaggactgcacaaagtttgaggtgccacatcttgacagggggaggatgttggagcctgaaagccagggacagttcctacttccttttatagactgacatcaactcttgcattgttactgggtgagatgggggcaaagtttatatttgtaatcagaatcaatttaataagttaatgtctaccggaggaatgtgctcaagggccacctttcaggcacgttgtatttactgatccctcatctggactttgagtgattgtgttgctggcatggaccctttcgcccattttaccaaaagtcagcactgcccttccttccctttgaaagccacgtgaaaccattgagggaggtcaggcaactagccacatttctattccaaaatagctcagtgagatcactcccatagaattccaataatgaagtcttcagaaataatgttggcccctttcagccttgtctaggaaagaagcactgatctattgtgtacagccaattggataaggcccttatctcctttctgtgggaggatgcttcagcaaggcctacagttccccagatcgtccacttgcttagatggactgtcaccctaatctgcacctctttatctcactagtaaaatgaagacccagctgtggaaagttcaaagtctggcctcctgccctctcaggggaatggctggatgtgagacttatttggaccacaggtgaattgaataattataggtttctttttgtttttaagcacatgtagatgaggaggtaacaagatctcctaaatcagagggagagcttgtgtagtgactgtattaaaagccttgaattatgggctttcttcccagtagttgagtggggcctttccttccggcagcttcagggcaacaggcatagggatgagatacctccaaagcccaaagcatccatcagtttaagtaggaactgctgcagatttctagaccaagggaggacatgtatctaaacgatgggtagttatgggtactcgtgaaatgacatgggcattttaagtttgaggggaaagctgtgaattctgagtaaggagactgattggactttagatcttcctatgacctgggaggataataagcttaagacaaagacaacaaattctttctgccgggcatcatactgaaaacttggctaatacctcttcccaagggccgtctcatcttcacaggttgggtatttggataagaacctgcttgttcctttactccaggaaaacgtggaggagatgcacaacagctgaaggtagaaaaggatggccactgaccctgctgccagtcagacagagggagcttcttgccaagggagaagcagatggtttgatggacctcagagctggaattgggcaggatgtgaccacagatctgactgtcctgattctagtcctctcagaatcatggagccaggccttgagggggatgccactgcatgcactttaggaacattgagaagagacctatataccaacgaaccagttgagactagttctctgctccctcccttcacccctaagcttggatactggatgatcccagacaggtgcctaaactgggaacttttgctgggaggggaagtggctatgtgggtgacctagtgagcactgggtaagaacacaaatgattagataagcaaaggactgaacaacgtgatgtcctagagccagttgggtctgtggcctcagtgtcagcctcccctttaccagtctagagtgatgtgccaaatgggatttggaaactgttcatccaaaagatgagtaattctcctaatcctccatttctgccttcctgtacttctagcaggatcaaactagcatggtgttaatttgtaaagctgataacacagtcaaggaaagaaagagcttgaagcccttgcccctctgtgtgtaggcggaaaggaccattcatcctcatgagtgtgacaacattgcagaggcctttggttcaagcctctatgttgtatgccaccctctccccaaaagaaaaaaccattagtcactgtctgtggaaggaaccactgttggggaaggggaaagtattttaacat

SEQ ID NO: 318138 - DNA, 4001 bp, Homo sapiens
agtcacacagttgatcctgacaattctgttttcactgtagttttccctggactttatgtatttatgggaagatcgtccttccagaattttatttcctgattcagatgtaaaattggctttttccctggccacagaattctgctttgtgacgttagagtatcagtgaatacaattttttttttttttggatcggagtctcactctgttgccaagctggagcacagtggcgtgatctcagctgacttcaacctccatctcctgggttcaagtgattctccttccccagccgcctgagtagctgggactacaggtgcgcaccaccacacccagctaatttttgtatttttagtagagacggagtttcaccatgttggtcaggacggtcttgatctcttgacctcgtgatctgcctgcctcagcctcccaaagtgcagggattacaggcgtgagccactgcgcccagctgaatgtgtttctttataagcattggcctccatcattatactttgcttcagatccattagtaaatggtataagttgtgcttttctatttttctttgctcattatctgccatggggatcattatttttagattaagcaaaaataataaaatagcatggctcagaaaataattttagaaattgtaattttgaaatggttagttccactaatcaaatccaagcaaatgtttgaattaaaggagaaacgaactctgtactagccaagtttgtttaacactagataaatctctcatagttgccaacatggaagagggagattcttaaaaataatctgaaatgtcaaaccaatttagcctagactgagattaggggtgaaggtaggagaaggagtagaaccaattatatgaaaaattatgaaacgtggaggaggggctgctttctcagcagacttggtgcaaactttgtttcaggcacaatttgtttctttactatagtaagcacttaataaatgttcaatggaattaaatgtcctggatttccagtgttaacattcacagagagatacagtgagcacactcaaccttgcactttgaaacaaacaagcaaaagcgagagcctggtaatttgactattgattttatttaaagacattttactcttcattaatacctatcctgtgaagagaacctacagaatatggccattaagcctcttctttaaaatacttttaaaaggtgggtttcaaaagttttatgccttggagccaagctccaaatcaacaccttgatcaagatataatcccatcactttggcaactaatatttatccttgggaattgaggcaaatatcagacagtgtagtaatttattcactttttcctccttcggtgagtattaagggagccatccctttgtcttaatccataccagtctctgtattagtatctgtatcagaatttgattttgatcaaaatcagaatcaaatatttatatcaactttttattatctagttttgttctagttaagtcccagacccagactcagactgaaaggctttgtaatgtcttctcaacccactattatgtttccctcattaaagaaccggaacattccatttaaattacttaaaacatcctcaggaccatgtgtcattcctatttcatttttaatagccaaatacacaagtctttgttgtgatcatgctattaatgactttttaatctttttagtcttcccctgaaatcagtttttaaaagttaatcaatattctaaaattgcactttcgacttaccggtagaaatcagaccagccaaaaggagggctttggtggaaaacatctggttttacttcctttagtttcttcctctgattagagttgcccccacactctctttgaagaatattcaagtttgaatgaatacttcctagctatttagccttagaattctgcatctctcatttctttagtgtgagacacaaaaagtttaagaggatggagcaagtcaagttctaatattccatggatagctatttgatttgcaggtagggcctatgtaaaagcctttgatctgaagaagaagccaattatattggaaatactgactaaatattaacagaaaatgataaggctaggtgcatatcgacagtcttctgggctgtggcttgtaggagaatgttcgtgcgaatgatggaatatttagtgctgcctgctggtagatctttcttttatttccttgatagcacatatttcagaagaaaattggtcattaataatgtgtagcccttcataacatattccttaatatatcccttaggtgtttttgaattctcagtttaattatatttcacctgtgtaatatttgcaaataactttaatattttaataaaattgcatgtattcaccttaaatatgtgatttttaaatgttttcttgtttatgataatggtaagttaacaccattaaaagcatccatcaataaaggaaaaaagattaattataatatagtcattgatatggtttggatctgtgtccccacccaaatctcatgttcaattgtaatccccagtgttggaggtggggcctggtgagaggtgattgaattatggggctagagtgctcatgaatgggttggcatcatccccttagtgctgttgtcctgatagtgagtgagtgagttatggtgagatccggttgtttaaaagtgtgtagcacctcccctgttctcacttcctcctgcttcagccgtgtaagacatgcctgcttgccctttgccttccgccatgattttcagtttcctgagacgtcccaagaagctaccatgctttctgtacctcttttctttataaattacccaatctcaggtatttctttatagcaatgcaagaacagaataatacagtcatacaacagagtaaaatataacaatttaaatgaagacaatctacatgtattaacacagctagatctctagatatactgttgaattaaaaagctatttttagaattatatatatagtatcatactatttataatatgtaaaatctgaaaacaagtatattaatcttaatgaatgctgtatgtataataaaaatatgcacagactacctttaaggtactaattacttctggatagtgagagaaataaaaccgtggaaggatatacagagtacataaactctaaaatattttatttctaaaaaaagaaaaaaatcagaagcaaatatgttaaaatattaatttgttaattattggagatagacacatggatgttatgttaccctgtacttttctggggaattaaattttcagtgtgtttcaaatatatgttagcagctcctttttagcttaatattagatgagcacctggaattttctatggaagcttccccatttaaattatgtgccagtagctgtgggagattgggattgtagccccagttcttcaccctctctgcatccacacctttgccatgtttcatgggggcaaagggaactttcctcacccttgattttgggtttagctgtgtagctttgaccactaagatgaggcagaagtggcagtgggtcgggaaagcctgggtcttctggggccttagtctttgcacactccttcctgtgtttctacatcgccgtgaggcagatgatcctgctgccctgggaagggaatggatgccatgcagagcacagttgcccctacaaaatccagcttagtataccctatgaatgtatgggcttaactggctgtcattggaagccactgagttttggtgtggtatgtcacacaacaataactaaacgatgccaatgagattatgcacctaattgtttttgcttcacacacaacctttcaaggaggcatctaatgtatacaatatagaatgccaacgcattgaatacatcaaggatctgagtcaatgtactgaaagaataggttagtgaaacaaaacagatgattcagaaataggcacaaatatatacagcatgtagtatacaatagaagtcatactttaaatgattagaggaaatataagtcattct

SEQ ID NO: 318139 - DNA, 4001 bp, Homo sapiens
ttccttcctatagacaaatgactggttcacatatcatgactcaatttatattcaacaatgttcatttgcagtgtaattattcttcctaattaggctgctctgaagacaaatgactgcccctccccatccccctctcctacaacacacaatgtctttttcctgatataaaatgtttgctgcaccctttgcaaaccacaagaagccacagtctgctctccatgtgaccacttagagaaaaatactattataagatagtgttttatctgatattacttcaaaatcagaatcagatttctaacagatcaataagcttatcacagtatgacagcaaaaagaaatgagactcttggattctatttctctttcctatcttaaaaaacatttcctcttcccgcgaacatgtgttctctatctcttaaatttaaaaaggagtagtttctaaaagagaaccagtaggaaagaatcaggaataccagcaaaagtcaacatcaaagaagtcagtatctgatcctctcttaaacctagcaggagtggagctctctggccaaggggtaaggcaaaagcaatgtgcaggttataaatgtcccttcaagctcagttactccggtttacctctctggggtgagcctctaacagctctggctcgccggaatctttcctccctcggctccagcacacactttccatagcggccgcgttgcaatttcaaagagttctcctttccacgtaggtcacccaccgatggtaacctacatgcacaaacacactcgcacaatcacaacagagaaaatgggacatacaggaaatggcccgggtggaggcgaggacgggggtggggataggactttgtctttactctggtgttgctcccattgaaacaagcacatggactttcatggaactcatgaccatcctgaaataacagaaaagtcgaacgggattgaagaaaatcctttgcttttctaagttcgaagaacactgggccgctgaatggaagggaaaagaaaaaaaaaaactgtgtgcctaaaaacatccagaaacacacgcagagtctccccagtcctttgcccagcccgtgggctcaagccgcccatcccagatgcggtcttccccactccacgcccacctcttccagcccgcaccccaaatcactgagctgcccacaaaaatgcagtccagatttgagaagcagctgacgtctgtggccagagtgacccacacgccacggaccagggacagcaggggcgaccacggggcggcccccagggagcggtgccaggcgcgctggaacccggcgcccagctgcgcctgggacccacgcgccgccgtccgaagcccgccagcgacgcccagagagcagggctcgcgccggcttcccgaggagacgctgttcccggcacaacttttttccacttctgcggccgccggcggcgctgagaagcagctgttcccttcccattcccagcacccaacgcccatcccgcagcacctccgaccgctcggcgcggtctcccagggcgccgaagcgaagttcccgcgccagccgcggctcaagcagccagggctcggccggccgcaacggctccccatgcgcccgcgcggggcgcccacctggccgggcccaccggctctcccctcccgcagcgcgcgcgggcccgacgcctgccactcacccggccccagctcggcgtctccggctccgagcccgcagccttccccaagtcagggctttcagtgacgcctcctcgcagccacctcgctcttgcccccgctggccgcgcctggaagaaggaggcgggaggagagcgagaggagagcgggaggaggcggcgggagaggggggcaacgcaagggaggggagagggtccgcggcgcgggggaggaggcagcgaggcgagagagcgccaagctcggcggccgcccgggctagcactcggggagagggaggaggaggaggggcgggggcagcgagagaaagaggcggccgagccgccctgcccaggccccggccccgcgccgctgcccagtcaccatcgccgcctccgtcccgcgagcgggccgggcgtccgggggaggggtcgggctcggggctcccggcgcggcgcgcggggcgggacgggggcggcgggcgggcggaccaggcccggcctccggaggggagtgtcctgcgggtccgggagggagtcggcgacaggggatccccgagagggggtgtgggggcctgggaaccggtccctgagcccgccgggcagcggcggcggcgtctcccggggtcctgcgaggttcctccgggccgcaccggggaagctcccggagcagcttcgagcagccctgccgggagggccggaggcggagagcggcgctgacggagccgggggagagaggccaggctgctccggcggagagcgggccccggggcgctaggagcagttcccccagacccgggcccaagcggaaagaacggccgtctggtgaccccggagagtccgaaacgggaaaggggccaaggggcgcctggacccccatcctcgccgccctcttccggagaggaggctccggacataagttcccgtgccctctgaatatctaggtgtggaaactcaattccaacagtcacaaagattattcctaaatagaatgcttggtgtcctcagcttccctgccctcaaaattacggtttcaggatgattttcggaggcgctttaggaacagcctgaaaaggcattcttgtccagagaggggatgctttaactccccagctccgcccccagggctgggagcaaagaacagagttaaatggccatgaattcaggtgccagtattgtttgtgattgaactgttaggacgtggcacctctctaggcaaacccatcttgtattccacccctcgccacccccccgccccccgcccagtcaaatgctcccattcccagtttctcagccccttgtctgggacacctctatccaccagtcgcccagattcagattagcagtcaattttgggcctcgctcctccactcccggtagccagtcccattagttcttcatttttaatgcctttccaggtgccatgtcctttcaagcccactgccgcctttctggttctcgctatctggcactggatggcgtgagcggcctcctaccggttctctgctggggtcctctctacacttgcatccatatgcgcaggcctacaggtgaatggctctagaatacccctcaggcaggccacttcctgttctagaagctttctgaggcactttgccagagaacattctgaattccttaaaaatcatcagttcaaaaccatacaacaactgcacctccatacgcacttctcagagcctgggactctctttagatggggatcctcccctccccccgagaaagatccatgcctgtatctacacgagagttgctgatgctcttcccagagctggaatgctctctttcatcttctcccgcagccaaattccacttatcttcattgaaaatgaagtttgcagtaccacatttttgctctaaaaggatatatgtgctctttccattttgtgaaatcacacactagaaataacagggcttgtggggaaagtagggttagaaaatgactcagaatctatgtaacattgtaaccacagcactaacaaaaactaaccattccaaaaaaaataccagtagagctaatgaactgtgttaaattcctaataaatactatagtacatgtaaatatacgactttacttttataaaaagatgaagataactgttgaaggggagttgtttgaggctgctgacttgagataaacacaaaatgtacaaataagaggagaactctctgtcctgtcccccaacccacatcccacaaatccttccaaggtagagaggtcaaggccaaatcaatccaagagaaagaatgtagggtgaaatgggcctacagcaccctgtgttctctgtaactagatgcaccctgctgtgttttgcagctgtagttacttggtggtgc

SEQ ID NO: 318140 - DNA, 4001 bp, Homo sapiens
catctttaggaatacaaacaaaaagaacacgtacagaatgtttacatgagcataggctatgtctggaaagacatacacaaggagccagtagctgtggaacatgatgggagagaggtatactccgtatcttttatatctattgaatcttctccagtgtgaatagattacctgctgcacaattaatgtaagaaaaatgcacactattaccaacatatttgtcaaggatgaccattcagaagcaaatttttcaaaaatcacaaaagttttgctccttcaacagcagagtccctgattctcattccccagaagagaatacaagtctccactaatcaagaggcttgctagtgatctcactcacctattacaaagcaaagaagtctcaattcaattcttgaagaggaaatagctgctccgatcaccttgggaacacatcatatatttaaattgagcttgcaactaactccctaatgaagtttccaaatgaacagttgcccccgactataaagcataaagtcaacgtagaagacaactaaaagaatggtctcgtgtttttaaaaaacacattatacttaggcttccttttctctgccaggcttagacaagaaactctctggtaacagtgaaatgtaatttcagatctgtgacaaaataatcatgtaaggggaagggcaagtagcattcgcgctgaaaaaactccttggtttttccacttgtgaaaaggaaaggtttgccttaaatttaatttctgtaccatttctggacccctgcctaaacgatactactatatcacattaatcttacttcaagcaaatactttttaaaattaaaaactaatctgaaactgaacaggaatcggaagacaaactttaaactgaaacttttctgttgaaagaatgtatcttttaaagacacataaaaagaaatgcaaagaaccgatttccatataaatgccactcaataacaatacaggttataacaatatttgactgcattaaacattcaaaaaggaacacaaagatacccaactgcaaataaaagacctcatatatttttggtagcggaatgtggggggtggggggcaaaaatcacattaattcagattaatcatgtaaattcagaacacgtgatgtgcagttttgtgtcgctcagaactcctgaatccagctttgtgcttttacacaacataacagaaatggcatctttcacaaagcctaactttgacctccaacactttaactttgggtttaaccagtacaccaccttcggaagttagcacataaaaatacaggtaagtcaaatgcactacggatacagaaaggacgaggaacaggtttaaaggggagttgaagcagaggggcacgaaatcacctggcaggtcacctctccgaaggaaaaacatttcaagctccctcccatcccccaggtaacctctggcctcagaactcactgccctgcgtggggcagaagttctgggcgctggagtccgcgtcccccaggacacgagggtgacccaagggcgcgcggagagcggcgggacccggagcggcgctctccggggtcactcccctaggacgctccgcagagctgggagcgctgccccaccccgcccgggccgcccctggggaccccgctcggggctccgcggctcccctgctccgcgccgcgcccacccgcccccaggactcacggtacgctcccgcgccgctatcttgccatcccctgccgccggctctgtagcctcggccgccgccccggggctgcccagatcccacagccgcccgggggcaggagccgccaaggagggggccgggcacaatgcgccgccgcctccgcagccgccgtctcgcctcccctgtgtcggcgcgaggctgcttgaggcggccacgggcgaagggcggcccgctgcgctccgcgaaccccgcgggccgccgccgccgccagagcctcccagaggcaacggtaacggccaccgccacggccgagtcgctccagccgggactgcggcgcgcgggggcggcgcctgcacgccgctcggctgggggcgcagcgggcccggccccgcccctgacccgcccctgcccccggccccggccccgccccaacccgcgcgcccccgccgatccccggccgcgcgcccgcgcgcgcgggtgctccaaggagtcggaggaacgcggccgcgcgacgggccccggacgccgagggtggtgcttcctccgagcctccggtggtgaggccgctctcagaaggtcatggaagcgcaggggagagcgaggcggccgagcccaggcaaatcctcgagaaaggccgagtgcgcgacggctctgcggggaggaccgcgcctccccgaatgcggccgctgctgccgctgcaaacagtgccttgaggagaggaaagcggggaaccgtgttttcgccgcctctgtaaccactgcacacaagaaaaccagcttctgggagagggggatgattgttgggactttgcgaattacctaaacagcccagggccgaggcgccgccgctcgcgtcctggtcctcctgccgggtgtggggctcccctgcccgagatggccagcgggcgcgccgagagtatcctggagccatctagtcttgcctcggaggcggggtgggcttatttgtgcggagaagaaacggatctcttaatggggtgagatttttcctccgtacattgttcccatttccgcagtttcacttggcctcggttttctagcagagtaatcaccaaatgaaattagctggagagcgtttgatggcgcagaatcacggtctgaagatgtttacgctgtatgccggacgcgtttgatggtgttctcttcggcacaattaattttgcaaagttcagaaatgtgccagacagagcccctggcacgcagtcaggactctacagacacaccttgagtaggaaacaggcttgtttgtttcatctgtgatttatgtgatgcaccagcaccaaggccaacgtgttttttaaagacctttcgatgaaactccaaagcaatttataaattggcaaaatgaagcttgttttgtaaaataactcttccttgttgatcatgtaattaaatgggcaacaaaacacctgaaaggacatttactgaaaagtagactcccaaaacaaaaatatgtatttcacagctagatacggtcgctattagcgtcctaatggccaactccatccatgtgcgtattttgaacactaaaaacgcctcctgttacccctaagaccttgtttggataacatttttctattataagtactcgaaaccaaccccatttaagatgtttacccttattcttgagtccttgatggtttgggaaatttatcattattcatattgcacaatcctgtcactgtcttttccattaggcacagtgcctaaggtccacaatatttttagaggcccacaaaaaatattttaatttcttttcaaatcagaaggaaaaaaaatttaggtttaagaaagtattttaatatatattaatatatttgtttttgtgctaatacaatcttaaaatgtatgtatatatgtgtgtgtgtatatgtatatatattttaatggagtaaggggctcaacgaaggcaaaaaggcctagagcccaagaaaaacatgatgtggccctgttgcctggggttgaaaaatcccattccatgagaagaatttagttttaagaatattacataaaatgctcatttctgtggccttgctataatagaaagatggagattcagagtagtgataatggctaacatccacctgatacacaccatgtgtccattacctcttaatcctcacagcacacctgtgaaataggtactattctcacacttagggggtaatgcaggttttgtggggcctgcaatttatgcaatttgggtggtcctcttaaagaaaaagcaaatactgtgtattagtccgttctcacactgctataaagaactgcgcgagactgggtaatttataaaggaaagaggtttaattgactc

SEQ ID NO: 318141 - DNA, 4001 bp, Homo sapiens
gaaatgtaacttaaaaattcagttctgtcacatgagacacatttcaagtgctcaatagccacatgcagctagtggctattatattggaccacacaggtgtagaatattctcatcattgcagaaaatgctttcagacagggctgacatagaagatgcatcagagaagaggagggggatagacgggtgggtagatgagaggggcacataaggtaattgcaacagaatgaatgtttatgtctcccccaaattcatatgttaaaatcctaacccttaatgtgatggcattagcaggtggggccttggggaagtgattagattgtgagggtagaggcctcatgagtgagattagtgcccttataaaagggaccccagacagctcccttgtcccttttgctatgtgaagacatgataagaaaacggtcctctaagaacgaggaagtgggtgctcaccaggctctgattctgcctggtgccttgatctgggaattaccagcctacagatctgtgagaaataaatgatttttgtttaagctacccagactatcgtatttttgttacagcagcctaaacagaaaaaaatagaaacgtttaccaggaaaagtatatgctagatggataaggggaaacaagagagacaggacacacggacgtgatccagggaaaggtcttgaattgggttagagcttggattcaaggcattggctggctgcgataaaacctttgcgcatgtttttttaaatggtgttcctctgggcagaagcatcctgtggttttggctagtagacagttctttgtgcaaagaaaaaagtgtactttcctcaaaacgatggagatggttaaaagatcagtggttgtcagggcctggagaaggcagggaagaaaagaaggatgaacagatggagcacagcagagttttagcaatagcaatgaagctattgtaagatactataacggtgcatatatgtcatcacacgtttgtcaaaacccatagaatgcacaacacgaagagtatacatagtatacatagtaatgtataccatgaactttggttcatactaatctattaatattgattcatcaattgcaacaaatgtaccacactaacataagatgttactaacaggggagactgggagtggggtggacagggtgggcaggggtatatgaagctctctgtactttgtgctctggctttttataaacctaaaactgctctaagaaataaggtctagtaatgaaaaataaaaagggaagctatttaactatttctcataaaatattttcaggcactctaaaagtcttcatgttcacatacacaatgacatgacaataaaacacactaatctggttttagctgataatctaatgtagttatatgtgattctatcaatatctgacatggaaaaaaagcgaaacaatgtaccttcctctaggtttccacagagcagcttcaggcattcatcttggtgagcagtgtgcaagctggattttcctaaccacttgctctcttcctcaggtgtctgtgcggtgcagaaactgtacaactgtatacagtgaccatttctactctgggtctctaaacaagggctggtatcgttacagagactgaagactgaggaagaccatctctgtaggatgccaaggattgactggagaaagtctgggtaagtacaggtcacaggaaaccacacaagaaatacacttttgtaggacaaagaggtaaggtcagagccctgagagaccctcacaactggtattaaagcagagtgaaaagaaatctaaaggggggacaggtctaaggggacatgggacacaaagccaggaaggaaggaagcaaaccccagcagtgctgtacctggagggcgatgaatgagtcgcagaggctccctttctgagctgggattaggagttgataatggtcttgcaagtgcagttctgcagagcgaaagggcccggtgccttgcagcagagacacgttctgggagagagggttaggatttgagtaagttcacactaggaggctatatatacatgtgtggcattgcccagggactggagggaaagaggagaaggaaatgcatcacaacaatgactggaatgcatcagcagtgcaaaacaaaactcttgggaaaaccaaattgtgtcttggattgtggttcaaggaactagtaatgggataaaaagcttttgcctccaggccagcagcatgagtccaacccaggttaggagtcagcagtgtgtttcagatgtcagtgtgaaaggaatccatggggccaatctaaccttctagtattagagtaatcctgaaaaccacaataggtctttttttttttttttttttttttgaaacagagtctcgctctgtctcccaagctggagtgcagcggctcgatctcggctcactgcaagctccgcctcccgggttcctgccattctcctgcctcagcctcccgagtagctgggactacaaggcgcccgccaccgcgcccggctaatttttttgcattttttcagtagagacggggtttcaccgtgttagccaggatggtctcgatctcctgacctcgtgatccacctgcctcggcctcccaaagtgctgggatgacaggcgtgagccaccgcgcccggcccacaataggtaatcttagcagcctgcttcatgagatgactgggaagggaagatgaattgtgatactggctcattcttagccacggagggagcctctttagaataagactggagcaatatggacaatttgtaccactcctttatatataggccaatgctcctcgaagcttgattcatggaccagttgcacccaaatcaccctgggctgcttattagcaatgcaaactttcctgggtccactctagaccaagtgaatctgcatcgttaggtatgggatctgggaatctgcattttagcttcttatgtgattcttgtgtacaccgaagtttgaagattattggggcagatcagaggttctcaaactttagcaagcatgagaatcacatcacttaaagggcttgtgagcttacaggtgcctgggccccacctccagagtttccaattcactatctgggatggggcttgagaagttacatttctaaaacatttccaggtcatgctgctggactagagaccacactttgagaaccattgctgtaaatagagctctttacctggctcggacagtgtaaaatcgcccttaccattcatccacataattcagctagcttctaccatcctgtcatatagatgactaacacccatgacctctttttcaccttgttagataacttccagttttaaattgacaatatgaaaaacgatcacacctggtcaaccctaatcttgtatattgttctggttccaaatgtttatattattatcaacactgtcctttcctcatttttggcggtgacctgttcaactttgtgttaccttgggcttcaaaatgcaaaatcagctcctttctttgcttgccataagaaatggcatgcaagaaaaaaaaaaaatgcttccaaaatagaggaacctgaaaatattctgaaattcagaaggtgttattttggggagcctttctgggacaggatgtccccatcatcagctagaggaagcccagcttctgataaacaaagttgtgccttgcacagatcaaagggagccatttattgaaggaagggatggaagtatttgatgaggcccttctgcagactccctgtaaacaggataaaccctatcaatgaaagcttatactcagccaggccacagtccccaggaacaatggagcaacaagaacattgggtggtgaggaaagagccttggtccagacaagattgttctgccaagagaatggccgtaaacaggattagttgtaatgagattatgaacttaggacctggaggcctgagctggagagttcagtgttacataaagaaaagacacagaagtagctcgtggggtgagaggatgccaaaaggacaaggacttttccttc

SEQ ID NO: 318142 - DNA, 4001 bp, Homo sapiens
tgcaagcagttgccgagtagcagtccattctagggtaaacaggcaatgctctctggtcaaatataggttctatgttaatgaatgaaatatataaaacaggacacttatttgttctcccatataaaagaagtcctgcaaagtcctggatgacagaacttaatgtatgctttattgtaatcctttttctagtctatcttcttttctaaactgtaaacaatcgcagcaatttagttcagctaaaaaatgagctatacagtttcacatttgaacttattaagttttcaatgggccagtgaaaaacgtcccccctattttttttttaactgcttcccctatttaaatgctcagcataagaaccctggtcctatacaatttatccaaagcttgggcagcccgagagcccttttatccctcactagtgaatcagttctattgtaggagagagacattctttcctccccttttcgcttaaaaaacataacaaacctgaatagactccaggctagagtagtggagagagtgatttttattagatctaacatagttattggcaaatgcctaaagacaatatttaaaaagagagctagagaaagaaaaggctttcactttatgccttaaaggacagattggttacaatttaacatctaagaggaaaaatttatagaattaaatggcctaacattcctctttcttcaacatacatatgagaaatctaagctaagaggacatctggaatggaacgttattcagcaatcagaaagcaaaaattcaaaccattgatgttttgatggagacaaacacaactagattcacaaagaggaaagctgcaacctattgaagttaaaaaaaattccatatgcattttaccttttgggcagttctatttcagaagccctttgtaatatgaaacccactgtagataagatacaacatgaagatagtctgttttgcagcagcaggaaatcaaattggttccagaaacgaagttatatgacaaatggtttaatagtattgctagaattggaaatcttgattgaattatttttaaatcattaaaaaaaagattttgaaataactttgccatgctgtataaattggtgatggtggtagggggtccacacagggagtgttgctgaggttaggaggcatctcattttattggccttttaactaaagcattataatctgttatcaaaatttaaaagttcagtggtgatttactgttaattctggtttgcaacaaatattttcagacaaacacgatacttgaattaacatagctaatatgtgttgtggagtattaaacaggttaacaaatattgatatattctagtatcatttccaaattatttttaggtttaatctcaacaccagtcagctttgctttacttaaaaagcatcagaaaaagttcattaagtcttaggcaggtcttggattgtagaagagacttctaagtagttagcaagatgtatcactgacagaataacccagtgcctaatgcctgtaggtgaaatgaaatcgttcttctggctgaagtcaggaacaagttaaaatatcacttagaacacagcatacgactgcagagatttaggagaaatcttacttaaataggatgtgacttgacgtttaggactattttctaaaaagtcaaaaaacttttcccccttcagtacttacagtctttgaagactagagccggatctctgtgaggcaagacttgggcaatgatgtgtctcagagattccaaggttctgtccatcttgggtctgcctgtgtgagcctcctgtacagagtgtcctcatgcctgaattcttgcagtcctgggctgaatttctgcagctcattgatgcactggattaccaaggaatcccttttaacatctgccaatcagacatttcccagaatctaaagacccctcagggggccctcttcccaggctcacttatctttgttgtatgctgagctaattagctcgaaaggctggctgacaggcgggttcccattgctttcttctgttaaacacacccacctacaggctagctggggaagctcgctaaattatgaaaacagctttcctctccaaccagattttgtctgaatgctgtgcagctttctgacttgagtatttcttctggccctccatcttcaattgtgttgcccccaggaatatggaatcaggaaggttatttctccaggaaatttcctgaatgacaagacagcttccagctcaggactgccagctatatgttaacagtataatccctataaatctaaattttcagtgtaattcttctttggtaaaggagtgctataaagattatggggctgggtgcagtttatcatgcctgtaattccagcactttgggaggctgaggcgggcagatcgcttgagcccaagagttccagaccagcctgggcaacatggcgaaaccctaactctacaaaaaatacaaaaattagctgggtgtggtggtgcatgcctgtgatcccagctacttggagggctaaggcaggaggatggtttgagcctggaaagtcgaggctgcagtgagcccagattgtgccactgcactccagccttggtgacaaagtaagaccctgtctcaattttttaaaaaaatctttcaataactaccttaagaaacatatatgtattttctcgtcctgtttctttgttttatttttctttttaatagggtctcatactgtcctccaggctggagtgcagtggcgtgatcataactcaccgcagccttgactcaagtgaggggcttgagccctggactcaagcaatcttcccatctcagcaccccaagtagttgggaggcacacgccaccacgcctggctaatttttaaattttctgtagagatggggtctcactgtgttgcccaggctggtctcaaactcctgggctcaagcaatcatcctgtctgggcccccaaagtgctgcgattacaggcgtgagccactgcaccctgccctgaaatttttaataattattaagtgaaaggaagtgaattacatcagaattaattaaagtcaaccttgggaatgattcactttgaagggtaaatagggaaacaaatgttcccaggcaagctgtaagacagtctgtcaggttttacttgcccctgcccaatagaagtgactaaaatttgggagggttgtggggggtaacaagccttggcttccagaagagtggctcctgaattcaaatgcaaggcttaatttagtccctagctgtatccttttttttttttttttttgagacagagtctcactttgtcatgcaggctggagtgcaatggcatgatccgggctcactgcagccttgacttctcagtctcaaacggtcctcccaccttaggctttctagtagctgggaccacaggcccacgccaccgcacctggctaatttgtgtatttttagtagagagggggtttcaccatgttgcccagggtggtctcaaactcctggcctcaagtgatccacccatctcggcctaccaaagtgctagaattacaggcatgagccaccatgcctggcctttaaagatcttaagaaaacagaaattctttttctacctattcatgatctatactacctgtaacactttgttaaataatctttccatagaagacataaatataagtcacaggattccttttccataataaggatttataccagatataaaataactaattttagtggttgtaaccaatgttacttgttgaaggaggttgttgaggattgtcaaacttttatttaaaatatttttccagggtagccacaaagattgctttccagtgtttcttccaattttcagattccataactaggttgtattttatgatgaactgaaagtagacctttaaagactgtataaaaatgaaataccttccatgtgatcagcttcttcagctagtttgtagaagagcaggcttcataaaaggaaatagatggaaccgaactagaataataattcctattatac

SEQ ID NO: 318143 - DNA, 4001 bp, Homo sapiens
aaggaaccaagcaggcatgaggagccaggaggcagtgtcccagacagagggaacaacaggtgcaaaggtcctgaggcaagaaggcagccagggggggctggaacaaaattaacacagagaatgactggagatgcacaaggggccagattgtgcagacataatgcatgcttaccccttcacaggggactccacgctctgaggatcagactgaaagctgaagaaagtatccgcagatgccactaacagcagtgtggaggctcggggcaggaaggagaggaggagcagaggggacgggcagaccaggcaacacaaggacagtgtgggttcccagaactaaacaagaaagtcaaccagcagggatcagagagcagggtgatggagaaaactagaacactggccaacagcttaagccatgggaagggctgagattaggcaagctggggcaggagcaggtcccgctccaagctgtaacccagccccaaattattcttctttcccctttttcctcaccttgactgcctcagtgtggattctgtgtagcagctgtcattggccactgctcacatactacatactacatactctgaggcaaaggtcacagacactagaactgcccacaggtccagtccctccacactactgatgacaagaccctcaaccaagcattgcaaaaagggttctaaggggttcctccactgtccaggtgaaaagagtcaagtacatcgagtgaactgctgggcttagagatcagacaaatcagagtttaaatactgtttatgacatttgctagctgggttatctttgtatagtcatgaaagccatctatttcaaacagcttgtttgaaaattaaatgcaataaggcatggcaaggtcagtgcctaatacacagcaaaacacccaataaagatccagttcgctcggttcttcccattactgagggggttcaaggcagacagcctgacagttccactactttctggctatgtaactttgggtaaggccctttcaaacctgagtcttagcttctcagtgggtaaaatggagataacattactcatctcgcatggcttttaaagtgaggaggatgtaaagtgtcaagcgcagctcctgacacatagtaagtacccaatacccatcgcctcttattattggtgggtgtgaccgagatgaggaaaaggccagggacggaggtgcaaacctataaacgaagctggggtctcagctgctcgggaggcagggactagcagccaaccgcacagtacgcctatcctcttgagaaccactcacctggtggttccagatagagccctctttgctgcgctcgtcaggggtcagacgtacgtactggctcgtgagcatagtgctgccctggaagtcccagaggggcatagagctggaaccgacccctgtgggaagagacaggtgctaagaggccacgccaggactggcctcaccagaggcaggaaacccacagagatgctctgctcaggagaaagggcacgccttcccctagccctgttcagcctcgccctcactcttcactcattcccgccccaagggcttcaccttggtagggcttaatgagcgaatgctcccgcttgagatgttcactgttgccgtcagttatatccgcagtcacagaccccaacaacaaaagaagaaagagaggtgtagtggggccagggccggggccgagaagcccaggccttcccaggcaccgccggccccagccccaacgccaaatccagccttccgccgccattctcctctcctctcggccacttccgccctagaacttccgccttccgggggtcccatctattggcctccggccggaagctcttcaactttactgtcgccagggagtcaaaaagcaaagcctccgcagcagacggggcggcagctgcattggccgggcagcctctcatcctggttgagtgcagtttcatctccttagaggctccaaggcacacgccggccagccccagcaatgggttctttcgagcgacaagagctgtaaccagtcacggaacagcacgttaggcttgcgagccaatgaggagcagagggatggttggagccggcgggagcgcgagggccgtccgcgactcggggcatgctggaatttgtagtttttgtcggtcgctctaatggggcggattcgcgaagactaggacgtcttgggcttctggccgcaagtcccgtctctggaataaccttttctagtcctggagaaaggagctctgaattgaaggcggagtcctgcattccaacccttgtcctccccgggtggccctgggcaagcctttaagccgtgcctgccgtcaggcgccccagcttcgcgcctttggagactcagaattcccaattatttgagggcctccactaccctcaactcctcaggcctagtcgggttgaagcaagaggaacagacacagatcctggcctgggaccccagtgatgactggaactcatccctatgcaaaagagcgcagtgcctggtacagcaagtaacgtccatggaaggcccaggaaagctgtgaatcagaggtcgaaaactggtggcctgcagctgaatagagctctgttttacctgccaatattctaataaatggcttaactaccagtattttaaagtcagaatatagaggctgggcgtggtggctcacgcctgtaatcccagcactttgggaggctgaggccggcggatcacgagatcgggagatcgagaccatcctggctagcacggtgaaaccccgtctctactaaaaaatacaaaaaattagccgggcgtggtggcaggtgtctgtagtcccagctactcgggaggctgagccaggagaatggcttgaacccaggaggcagagcttgcagtgagccgaaatcgcgtcactgcactccagcctgggcgacagagcgagactctgtcacacacacacacacacacacacacacacacacacacacacacaaagtcggaatatgtacattcacatcagaaatccagacttccggctgagctcagtggctgaggcctgtaatcctagcactttgggaggcagaggcgagcagattacctgagctcaggagtttcagaccagcctgggcaacacggtgaaaccccgtctctactaaaatacaaaagaaattaacggcgtggtggcggacacctgtagtcccagctactcgggaggctgaggcaggagaattgcttgaacccaggaggcagaggttgcagtgagcagagatcacgccattgcattccagccggggcgacagagcaagactctgtctctacaaaaaaaaaaaaaaagaagaagaagaagaagaaaagaaatccagacttccgtttttttacccaaaaaaaaaaaaaaagaagcagcagcaaaagatctaggcacacattcccacaacagaacaataggctggagctgaatgggactgcccctccaccaatgccttcctcttctaagctggtccccacctggtcactcgtttacagcacttgcctggctcctccagacatttgaatcaatgactcctgttgtagatcacagggagggatgttggttgcttgctccttttagaaactgccctcttgaatgaatggacttattcaggattgagtgctgaatcttttcttggtcatatatttttcgttcgcttttttattattaaagtcacacattctggtcaggcacggtggctcacacctgtaatcccagtagtttgggaggccgaggtgggtggatcacttgaggctaggagttcgagaccagcctggccaacatagcgaaaccctgtctctacaaaaaattagctgggtgtggtggtgcacacttgtaatcccagctactcaggaggctgaggcacgagcatcacttgcacctgggaggtggaggttgcagtgagccaagatcttgccactgcactccagcctgagtgacagagtgagactctgtctcaaaaaagtcacacattcttgtggtgtgtatggaaa

SEQ ID NO: 318144 - DNA, 4001 bp, Homo sapiens
taaaaataaaattaatcagaaaaaataagatacatcagtagcaatcacaatgcagttctttatgaccagatagcaacctctatgtacctactaatctcgtcttcaatggacacaattccttacgttaaaaagaatctaatgtaccaatttaaacttgcatttattatattaaggcaatagtcatgattagaaggaaggcaaaaaaaaattattcccatattaggaagatgaagtatgtctgttaccggggcaaactatcaaactgaatttcaaaactgacaggctctccctgaagtcctagagaggatcttgtgttcactaattcagatgttgcaagtattctagttcccaggtaactcctagtaaaaccaagactgaacaaagatatttctcatctttaaatttagaatcatctcatcgattaaaccttcctatctatgagatctatatctgaagtgggctctcccaattattttacatctcaaaactgtttattctcattatggcatcttaaatatttttgtttattctttctcctccattagcttacaggctctctctgttttgttccctttcctgaaggaaactataattttttgtgtcaaaaatattttctcctatgagttgcaatcttcagggaaaggacgtagcttcaaacaaaggcaaatgctttctccttagccaaagtaacataaaggtcactttctgtaaaacatcaggatattgcattttaaaatgctttccatataacattagtttgatgaacggcttagcctaggattctgcacctagttccaatcaaaaccaagttgtgaacagatcccttctttacaccaatctcatctttcaagaacgagctaaaggttcatgaattccttcctcaagaggcagttacttttcaagctaaggaccaagcttgaaacaagcatatacctgcacaagggaggtttaatttcactacagagcgaatcattttttcaaggaaaccagagggtgtgtcatacagcatcactgaatattctaatatgcgatgaagctgttatgcttccttatgaactttataaatcttcatttttatgaggcttagaattcatcccccttccctcttccactgttttcccggggtcacagttgtagtatagtttgcccaatggatttcgcatggtcattgtacctggaatatgtcacgctccctactcttactgcccccaaactcttctcagcagagataggctgaaagcagctcgcttttaggcggcgacgcaaacacacgtagccagctgagcgacagcaagcaaccaaatggctttgctggaggccccctgcgtgcacgggtaaagctcgttgcaaaatacagtcctttcatttattcccatgttgctatttatgagacctgtcaaggctgcaagggcatgcgcagccttcccaccacacaggacccgctggggtctccggctcccctaaaattaaaccattgtctctcgttccaacggcgtgtttagctgttgtgcgttattttacagataaaggaaggatcccgtccacagacccaattcttagggccgccttctccccgacggaggaagaagcttcctggcaaaaggacgaacaggtgcgacgccagcagttcgcagcctctcacctggccggcgggctgggctactgtcaccactcagcagccaaggacttgggccccgcagcggcggccactcggggtctgccgggtcccctctctttccgcctgctctcggccccggaccccagactcaaaagcgcctcacgcgttccgccttaggctcaccgtccgatctcgccagacagcgtctggacgggaccgggaaacggcggccgccacagctgtccaggttctgggatccacgctcagagacgacagcgctggcgatcaccagaaggcctgcgggctcccgagaaaggaaaatccgtctacagtccagcggctgacatttcccagtcagccgtagcgccgcccgcttccgcctccccgcctaccccgtgggccgaccagtcccgctcccgcggggggttgtgggtatctcgaaggcgggtaaagctgcaagggaaggaagtaagggcgagcccgtcggactacgaagcgggacggaaactacaattcccagcaggccttgggcctcagtgcggccgcgaagcagagcgggctgtagagccttgcgcgcgcagtggggatggaacgttgctaggcttagcgggtctggctgctgggggcccgagcagcacgctcggagccgccgcgcgccaaagcgggaatctgggaggcgagcagctctgcagttaatgcacgtattttaaactcccgggcctgcggacgctatgcacaggtaaacggattgcaaaaaggggaagagcatgaaatggaccctcttaataattcttttaggccgcgaatatcgctactggctaatattgttagtaatgctgttaagtgaatggttgcttagccccttcttggggaaagtgtgaatggatggatgccttagtgcggggatcagcgtgtggttttatttggcttccctaattgggcttttctgccaccgttttcaatcagtgtatgattgccctgtctctctccttgtctgttccctccactgggagaaattcttgaggccttctgcaggatcgtaagtcaaaaagccttctcgatttgttcttttcatttcttcgttttcttggtaactcgccgcaggcacataaaaaatgcgattctgttagctgctgtgaaggtttcctacaatgcataaactgcagcttctttaattgccttgaaattatttatgggtgtgttttcgaaaggaaccgggggtattgtgcacttctgcaggaagcacctccaggagattccagacctgagtagcaacgttgccaccagcttcacgtggggatgggattccagcaagacttctgaactgctgtcaggcatgggggtctccgccctggagaaagaggagcccgacagtgagaacatcccccaggaactgctctcaaacctgggccacccggagagccccccacggaaacggctgaagagcaaagggagtgacaaagactttgtgattgtccgcaggcctaagctaaatcgagagaactttccaggtaaggacatgagggtaaaaatgtcagttatgcaaagggtggatttagctatgttgttgggaaacctttgttcagagatctttagcatgggttccttttaagattgcctaattctgaagctatttttcaacaaaatagggcaagtcgtcaagtatgcaggaatcttggtagatatatatatatatatatatatatatatatgtatgttctggtgcataatcaccttgaaaattttaacccatgagaagacattcctgcctttttccttagaagggaatctgcctgcctcaaggccagctcagtttcaccgtttaacagaaacataaacagtggtcttcttgtaggattccttttgctttgtacccctgagtgatctttttgccttaatcactttagttatttatcagtggactgcgaagtgaacgttcacctaagtgggggagacatctccccaggcccactcccacccccatattggcttctcctggtatgttctgtctccattactgctgacactatctgtttaatcacccaacccgaaaacctgagagtcagtcagcttcccaccgccccccaacatccagtcattcatcgcatctttccctcttctctggtaactatttctcaagttctcgtcgtctcttgcctgaactattggagtggattcataattccaaccttcttctccccagatctatcccccgaactagaatggattgactgaaatgtagaacttactgtatcttccctccttaatagctccccatcccctagttcctcaagcaggcgaacgagtgcctcccagagtgaaccagaaccctggagtatgcaaaagccataggataaacagggcattgacctggggttatcag

SEQ ID NO: 318145 - DNA, 4001 bp, Homo sapiens
tctcagagacttcggacagggacattcacgcagatacagacagaaagacatccaggggcaaagggtgtcaaagtgagaataaggtacctccagaaatttcagctggcagtgctaatggcgaccatgaatttcagacccaaattttgcaaatctctaaagcatgacatcaacacttgttgcctactgatgacaggccattttgcttatcagaaagtcaaaataaggccagcaaaggtctgcaaatgtatccttgtgcactggaatgaaaactcgcactcgcttaggtgaattacaaactctccttcgctcaaacactcagcatttacacagcaccctgtcacctgccctggtctactatctgcacagtggtcgactaaggggtactaagcacagtctctacccgaaagcctgactatactacgaggaggcaaaagctggggacagagggccgctgcctgaggggtaggagaaccgcaattctaagaacggtagccgtgacatgcacaaacccagctttccttccctgcgcagaaccacccgagggaccgcaccatccccgctgggacaggacacatttccccagagaaagctaaccagctagcaaacctaacttgcccggggctggctggaggcgcacggatcaagctccgcctctctctcccgcctaaagcaggcgtagaatcttcgcaaaacgtcacagggccaagactgagcgcgccaaagcgggacccacccccaggagacgcggatgctgcgggaaggtccctccccttcctctctctgcccgcgcgaagctcattcattctagaggcgggctgccagtcctccccggccgcccatcccggcactgcaaatccgctagacgctttgtctcgcgccggccggaaactggggcgcgcacgcgagcgcgcgctcgcgctccagctccccgcacctggggcctgaggggccgcctctccgcgccggctccccggattcgagtgcgaaagcgggagctccttctcggcagtcccaggcgcgcacttaccacgtcccagcgggtatccaaaatctagaaatgggcatcacggccccccagcgctacagctcgagccccctccgcgacccctgctccgctatgaactctagattctttctcctttccggagaccgagaccctgttccttcagaaggacgcgtgcatcctggcctctgctccctccccacggcagaacccggtgagctggtcgccgcggttgcgcccccgcccctccttggcgctaacgcggccgccagctagcactcacttgaggagcagctggtcgtgttccgccttgcacttgcccagctcgatctgcagcttggcgcgctcgcgggccgtgtcgtcgagcgcgcgtcgcgcgtcggccagctcggtctcgtagagcgccttgaggccggtgagctcacggccgcgcacctcctcgcgctccgtcacctgcagctgcagcgcgctgttctccgtctccaggctgcgcaccttgtcgatgtacaccgccagccggtcattgagctcgcgcagctcctccttctcctggagccgcgacaggcgcgtggggctcagcggcgtggtggggccgccagcgcggctgcccatccgcggcggcacgggggtcgcagtcgccatggcgggcggcggagacagcggggcggcgaggccgcgagcgggaccgtgataaggaggggacggcagggggcgaagcggggaccgaaggcacaaaccggcgacctgcgctcacgtccagacgctggcgtttagaggaacggagaagcacctgggatggcgggagctcgattacagcacaaagggcaaaggcgcgcgggggggaactacgaatcaatcgatcgatcgcgaaataccctttgtaagaaaacacacacacccactcacacacgcacgcgggaaaatgcaagacgagggtgactggaggcccagcagggttcgcgccgccgccgtctcctgctcgcagcactttgtttcctctcaggctgcacggagcggcgggcggggggaggagggccgggaggggcgggctggaggcaagccgcggggggcggaggtggcgcgggccgcggcgccgcactccccaacatggccggcacgccccggcgcctccacgtgactaccatgggccaatggggagcaggcagcgcgcttcggcggttcgggggccgggcctgtaaatttaaaatctggcccttgggcaaccgtcagctcggccctcccggctgggcggttcccggaccaggctcagggctgtaaggaaggacgcctgggactgcccacccgcgcggctctgggcccagggccctcccgccgccccgcggggaccccttggaggggccgggcctgagaaaggcgggaaggagcccggaggtttccgggacggatctgcgccaccgcccacactcggcggttcagggaaattcaaatataaacgtccctaaaagccacacgcgaaactcagagtgtccccggccaccgcgggcgtggtaaccttatcccccgctccgctggagggctcgggaaacggcctggaggccgggacgctgtggaattacgtaataggcacttgagtccgaggttccaaatgcacggcttgcaggttccaagtaccagcctttatttttctctccggtggaaaactgtatcaggcaacttctttccatgaaagtgagatctgtgcgtcttgaagccgatagattatcacagaaaaaccagcaaccctgattttaaatcatttgccaacagtgttaatgggcggttcctaatccgtttcttaatttaagggtttgtaaaatcaaaaaacagctcagaaatgatacgattaacatatgacggtgagtaactacgagagcaagctgtttcatactccgttaaaatcaggtacataaaaatctgaacttgtgaaaatttaagatgaaataattttttgcttttaaaaagaggctcccaagatgtcactggcagctacttctattagaaagcacattcatccctttgaaaagttcctaatttttagctaacatttattgggactgagtgccagcaccaggcttttcatggattacccatccacacaatctccgtgtgatgtgggaaactggattgtttctatttgaaaattcatccgggcgggcgcggtggctcacgcctataatcccaacactttgggaggccgagtgggggaggatcacctgagctcaggagttcaagaccagcctgaccaacatggtgaaaccccgtctctacaaaaatacaaaaattagccgggcatgatggcgggtgcctgtaatctcagctacttggaaggctgaggtgggagaatcccttgaacccggaaaggggaagttgcagtgagccgagatggcaccattacactccagcctgggtgacagggagaccccgtctcaaaaaagaaagaaagaaaccatccattttatagattcactgtctgaaggctgctccgcaggactgcgtttgacaggtcccaggattctaattgactcgagtctggcccttagctataccctagatgaccaccttaccacctattaggaacgcttctgtaattaatggttacttacttttaaaatggcagaaatggagaccaggatattctttaactgttaatcaagtcatgtacataagaattagtgaagagcactgggagctgcatattcatcccagatgaatttttggcactctgtgaatgatgacattctccttattaatggttctatttcctgtccggtttcctaaaatacttccttgctttttggggggtgggggggtgggggggaggatggcagggagacggagtcttgctctgtcgcccaggctggagtgcaatggcacaatctcagctcactgcaacttccacctcccgggttcaagcgattctcctgcctcagcctcctgagtagctgggaccaacgccaccatacccggctaattttttgtattttagtagagactgggc

SEQ ID NO: 318146 - DNA, 4001 bp, Homo sapiens
gaaccacccgagggaccgcaccatccccgctgggacaggacacatttccccagagaaagctaaccagctagcaaacctaacttgcccggggctggctggaggcgcacggatcaagctccgcctctctctcccgcctaaagcaggcgtagaatcttcgcaaaacgtcacagggccaagactgagcgcgccaaagcgggacccacccccaggagacgcggatgctgcgggaaggtccctccccttcctctctctgcccgcgcgaagctcattcattctagaggcgggctgccagtcctccccggccgcccatcccggcactgcaaatccgctagacgctttgtctcgcgccggccggaaactggggcgcgcacgcgagcgcgcgctcgcgctccagctccccgcacctggggcctgaggggccgcctctccgcgccggctccccggattcgagtgcgaaagcgggagctccttctcggcagtcccaggcgcgcacttaccacgtcccagcgggtatccaaaatctagaaatgggcatcacggccccccagcgctacagctcgagccccctccgcgacccctgctccgctatgaactctagattctttctcctttccggagaccgagaccctgttccttcagaaggacgcgtgcatcctggcctctgctccctccccacggcagaacccggtgagctggtcgccgcggttgcgcccccgcccctccttggcgctaacgcggccgccagctagcactcacttgaggagcagctggtcgtgttccgccttgcacttgcccagctcgatctgcagcttggcgcgctcgcgggccgtgtcgtcgagcgcgcgtcgcgcgtcggccagctcggtctcgtagagcgccttgaggccggtgagctcacggccgcgcacctcctcgcgctccgtcacctgcagctgcagcgcgctgttctccgtctccaggctgcgcaccttgtcgatgtacaccgccagccggtcattgagctcgcgcagctcctccttctcctggagccgcgacaggcgcgtggggctcagcggcgtggtggggccgccagcgcggctgcccatccgcggcggcacgggggtcgcagtcgccatggcgggcggcggagacagcggggcggcgaggccgcgagcgggaccgtgataaggaggggacggcagggggcgaagcggggaccgaaggcacaaaccggcgacctgcgctcacgtccagacgctggcgtttagaggaacggagaagcacctgggatggcgggagctcgattacagcacaaagggcaaaggcgcgcgggggggaactacgaatcaatcgatcgatcgcgaaataccctttgtaagaaaacacacacacccactcacacacgcacgcgggaaaatgcaagacgagggtgactggaggcccagcagggttcgcgccgccgccgtctcctgctcgcagcactttgtttcctctcaggctgcacggagcggcgggcggggggaggagggccgggaggggcgggctggaggcaagccgcggggggcggaggtggcgcgggccgcggcgccgcactccccaacatggccggcacgccccggcgcctccacgtgactaccatgggccaatggggagcaggcagcgcgcttcggcggttcgggggccgggcctgtaaatttaaaatctggcccttgggcaaccgtcagctcggccctcccggctgggcggttcccggaccaggctcagggctgtaaggaaggacgcctgggactgcccacccgcgcggctctgggcccagggccctcccgccgccccgcggggaccccttggaggggccgggcctgagaaaggcgggaaggagcccggaggtttccgggacggatctgcgccaccgcccacactcggcggttcagggaaattcaaatataaacgtccctaaaagccacacgcgaaactcagagtgtccccggccaccgcgggcgtggtaaccttatcccccgctccgctggagggctcgggaaacggcctggaggccgggacgctgtggaattacgtaataggcacttgagtccgaggttccaaatgcacggcttgcaggttccaagtaccagcctttatttttctctccggtggaaaactgtatcaggcaacttctttccatgaaagtgagatctgtgcgtcttgaagccgatagattatcacagaaaaaccagcaaccctgattttaaatcatttgccaacagtgttaatgggcggttcctaatccgtttcttaatttaagggtttgtaaaatcaaaaaacagctcagaaatgatacgattaacatatgacggtgagtaactacgagagcaagctgtttcatactccgttaaaatcaggtacataaaaatctgaacttgtgaaaatttaagatgaaataattttttgcttttaaaaagaggctcccaagatgtcactggcagctacttctattagaaagcacattcatccctttgaaaagttcctaatttttagctaacatttattgggactgagtgccagcaccaggcttttcatggattacccatccacacaatctccgtgtgatgtgggaaactggattgtttctatttgaaaattcatccgggcgggcgcggtggctcacgcctataatcccaacactttgggaggccgagtgggggaggatcacctgagctcaggagttcaagaccagcctgaccaacatggtgaaaccccgtctctacaaaaatacaaaaattagccgggcatgatggcgggtgcctgtaatctcagctacttggaaggctgaggtgggagaatcccttgaacccggaaaggggaagttgcagtgagccgagatggcaccattacactccagcctgggtgacagggagaccccgtctcaaaaaagaaagaaagaaaccatccattttatagattcactgtctgaaggctgctccgcaggactgcgtttgacaggtcccaggattctaattgactcgagtctggcccttagctataccctagatgaccaccttaccacctattaggaacgcttctgtaattaatggttacttacttttaaaatggcagaaatggagaccaggatattctttaactgttaatcaagtcatgtacataagaattagtgaagagcactgggagctgcatattcatcccagatgaatttttggcactctgtgaatgatgacattctccttattaatggttctatttcctgtccggtttcctaaaatacttccttgctttttggggggtgggggggtgggggggaggatggcagggagacggagtcttgctctgtcgcccaggctggagtgcaatggcacaatctcagctcactgcaacttccacctcccgggttcaagcgattctcctgcctcagcctcctgagtagctgggaccaacgccaccatacccggctaattttttgtattttagtagagactgggcttcaccgtgttgcccaggctggcctcgaactcctgatctcaggcaatccgcccgcctcggcctcccaaagtgctagaattacaggcgtgagccaccgcgcctggccatgaaatacttcctttcttaacctcattgagaaataaagaatcgaaaagcttagactttaagtattcaagtaatcttaaagggaactttaaaatctaaattactgatgagaaaaccggccgggtgtggtggctcagcctgtaatcccagcactttgggaggccgaggtgggcagatcacttgaggtcgggagttccagaccagcctgtcaacatagtgaaaccccgcctctactgaaaatacaaaaattagcggggtgtggtggcgcgcgcctgtagtcccagctactccggaggctgaggcaggaggcaggagaatcgcttgaacctcagaggcagaggttgcagtgagctgagattgcgacactgcctaggcgtcaaagcaagaccctatctgcaaaaaaataaaaaaaattttttaaagtt

SEQ ID NO: 318147 - DNA, 4001 bp, Homo sapiens
acatttaaaaacatggtaactccaagcattcttccaaaaacaaagaatgaacattggaatagtcacttacaaggacttaacgacttgtattaaacatattttacactaaagtactagatggtctctagttcattttagctcaaaccttccttaattcttcgagtaacttcaccagactattctttaagtcttagtaattacaaatagaacctgaatgagaaagaaaattcagaattaaagttgttatcagtaagcctaattaaacagtgcagacagaaagatggcagtagaataaagcattctacattaggaatagggagaatataatcagtagttcacagccccatgaatgaagcacagcatacaacaaagtctggctgggatttgggataaagtggacaatatctgtctgctcttgagtggtaactaacaaactaaacagggatatagactgtggcccctattaatgtgatactgtacctgaagtaaccaaccacactcagcaaaacatgtcaaccagagactgaatcctcttttagtgagtcgtctcccttactggcagttttcctactttctatcttaaaagggaatccacacactcaacaccgcaaaacggtaagacatctcacccctatattgtggctctggcacttctggtccgcacaaaagccatggttctaactagggtgggatttatgctccccgttcagtgaagggctgtggctgtttgcagggtgcaggctccctgcgttgactctcgcttcctgtcacacagtggtatcaccaccgtgacggacccttgacattaacaagtctttgactgaaaaactgatgtgatctgcagccagtgaggggatgcgtggtggccctgccgagtacctcggcagggtcaggagggtggcactgtggccaggcacctccgcggcaccgagcgaggtgagcaagcctttcctgaagtttcccttccttccacaacattaacctgccaagcctcccacccccaccccgccctattaggaaaagtcacgccggcagctcactgaagggcagggggacagctcctggcgccccacaaaagttgggctcggcagctgccacaacttaacgctcctacaggagagtcgggccgacaccgcctcctccgggggcaaacctgagctgccaactttcccactgcccactcctctgcgcacagcagcccaaactttgctgtttgcccaccggccgcaccccgggcgagcggcggcggcgctgaccttcaagccagccccgggtcccgcactggccgccgcccgccccccgaacctccctgcctcccccagatcccctctccctgcctccctcagccctcgtgggaagcccgcggtgttgggggagacggctgcagcccgaccccgcgtgtcacgactgcccacgaccctcagggctccggagagcccgggtcccggcgcctcggcagcccactcaccattggtgaagggctccattttccccccgccgcggctccttacagccggagcgcccgagcttcctactccgagagctgaggcggcccagctgactgagcatgcccagcgcggcctccaagggctgccagggaggtgccgcgaggggcggcgccgctccgccgttccgggttttcgtggcagctgcagaaagagcgagggaagcaagagggaaaagcacagtcaaaccccctgctgctccgtggacaggcgaggtgggagcgggttcgcgctgggggcggggcctaggcggggccgggaaagcccagcccctacctgaagtggacccggctgcggcgctctccccggccgggaacggtgttcagtcactcaacaaatgtggagccctactgcgacccgcccgatcccggacgccgagacacccgcactgcgccagaaaatcatggtcccagtcccaggagcggacattccagaaacagaccataaataaacacagaagacacacgagtgtaaagtcagtgccccgctgcgaattaaatcggggtgatgtgatggcgagtgagtgggtagttaattcggatggcttggttagacgaggcctcgctgagcaggtgccactgaagccgaagtctgaaggcagagcaggaacctgcgggcgaaggtcgctatctgaaccgcgaatcgctggtttccctggggaggttggccgcggagggatcactgctcgaaggaccgagggagcgggcgctgtaggtgttttcggcagagatgcccgcccgcatcagagtgcctcaggagggcggtgaggaggagacggaagagagggcggggacctcgcagggccgagggcgccctggggtccagtcccggggctggcggctgccttgcggcctctaggtgcgggcggataacaaaacccggcgccggatcgcccggcccgggtcgcgggcgccgcaggatgtgggcagaaggcccgcctgttccgagccttaaatcaacacctgcggttcccgggggtgctaccactggggcccgcagcaaggctccgcggcgctaggcccgagaaaccgaaactcccctagtcgcccctgccccccagcactcgcgccattgcctccagccccgagccaccattgtttccagtgccaaatcgggcagccccgctagcctccgaggccgaaccgccaggggccccataagccccgaggaggctcgtcgggaaccgcttccttatcctctcggtatgcgcatcgccaccaccctcgctgcagaggccgccgccctcccagcgcgccatcaccgcctcctctgcctcttcccctccctcagccccggcccctgcattgacttggctcgggctgcgcctcactgcgcctgccaactgtcacacgctctgaggctttcaacagcggggcgccagggacaaacaagccgcggcaagcgcaaacagcctgctcaaacagggacggccagggtgttgtttgaccagcactggaattggaaactaggtttcgaagaagtcaaatcgaagtacaatattgtattttaaactgcctgttgttattacatccctcacaacgcacgctctacttgaaacttccagtggataccaactgcacttagaataaaaaatgaaactccttgcctaactctgggacctcatcagcacatactcaccatattttggtaacaaaggccttcatgctgttcccggaagtcgccaagttccatccatcattgttaataattccttttgctcgctcctcgcacaagaactgtttcttctgcttagtgctttgcctactgattccatcttgtcatttaagtctcggctcaaatgtcacctctgcaaagaacccttgtctgaccatacatctaaaatagccacaaacactctataaagacttggccttgctttatttccttctcagcactcatcactgtctgaaacaatgttttggatttgttgcttattatcagtctcccttctcaagaatgcaagctttgtgagggcagagtcgtaatcttttttaaggctgtatccccaatgcctgggtaagtatacaataaataatttttgcatgaataagtgaaggacatagtggtgtttagagttcacttccactgctgcaaacccttccagttaatgactccatactgaatgatgtgtttgatcagtacagagaaggtgtctgtatcatatgatacctcagagctgctatctccctaatgtgtgaaaggtaatcagaaccgttaggctggcccctagtactgacattttagaaccaaaaatagtgaaccacaggagctgatgtatcccagttcagatattatatagtacacgcagagctagattttgttaacatacttcacacattgtattgcttaaataagacgctcttctctatattttaggtcatgtcatgttcccttgaagttccttttgcaaccaaaccacttagtataggagatatttaaaacactgcagcttgttaaatcacctcacctcacttcacctgtaacctacagtctatc

SEQ ID NO: 318148 - DNA, 4001 bp, Homo sapiens
caattcatattgcatgtgttgctttaagttttagatttctacattgaaccaagttttgctgcagttagttactccagctacgtttcagtggacttgttagcgtaactgaagttcaattttaattatgattcatatattagtcagtaaacatttcttctacttaaaaatatttatttaataaagtcaattgtaaagtctgaattaagataaattttggccaggcacggtggctcacgcctgtaatctcagcactttgggaggccaaggcaggtggatcacctgaggtcaggagttcgagaccagcctggccaacatggtgaaaccccatctctactaaaaaacaaaaattagccaggtgtggtggtacatgcctgtaatcccagctactcgggaggctgaggcaagagaatcacttgaacccaggaggcagaggttgtggtgagccaagatcacaccattgcactccagcctgggcaaaagagtgagacttggtctcaaaaaaaaaaaaaaaaaaaaaaagataaattttaaaagtagttggctgaatttaaaatgtgttgaaatatacatgtgaatattatttagtactattactcacattagagccatgaataagacttataatttgaaatgcacaagaaattttcataatcaaaaattttagatcttcccaagtttagaaaatcctcagatactcaactttggtcagatatggagaattagctatagaggatggatttagctaaatcaaattttaaaagtctaaaactaaaatcatattaaatcaatcatatctactaaaatgtcacttaagtcttcaaaagttgttttaaaaatcaccatctaatataaatggctaaaagcttcataaaaagtaaaaaataaggaagatttcagcaaattattaaattagataaacataattacattgatatttaggtaaactgaccaaggatcacattttggtgatcatgagccatgtcaaaataatcccattcctatctcttcctcaactctacccacaaaagactacaacaaaatacagaggtagttatattaactataaattaattaaaatttcagagtaaaatcagccttacagaaactattctgggacgtattatttgttccaacattacttctacatacagcagccacttgtctacttcatcagctcaacatattaatcattactctccacatcctctgtaaataagattaactggtatggtcaacagactaatcctcccccagcccccaaaatgtccatgtcctaatccctagggacacggttacagaccttgagatggaaagattatccaggacggcccaatacaatcacaggggtccttaaaaggcagaagaggttgggaggccaaggcaagcggatcatgaagtcaagagatcaagaccatcctggccaacatggtgaaacctcgtctctattaaaaatacaaaaattagctgggcatggtggccggtgcctgtaatccctactcggaaggctgaggcaggagaatcgcttgaacctaggaggcagatattgcagtgagccgagatcgtgccagtgaactccagcctggtgacagagtgagactccgtctcaaaaaaaaaaaaaaaaaaaaaaaagcaaaagaggctatcagagtgaaataatgaaaaaggacatgacttacctttggtagctttgaagatgaaggagcagggccaggagccaaggaatgtggacgacctccaaaagccaaaaaagtgcaggaaatggatcctgcccagagcctacagaaaggaacacacagccctgccaactccttcgttttagcccaatgagatccgtatcaggcttctgacctgccaataactttaagataaatttgtactatattgcttaagtttgtggtaatttgttatggtggcaatagaaaactaatacaactagtccccacaacatgcctgacattcatggctgtacggctccacttctgtacttagtggagttaggagcttgcccaagttcagctgtggcatttcgagttatgcttggtatagctattaggtaattcaattaacttgcaaaatagatgaagaaagcaattctgagaagatcagctgaaatcactggaaaaactcaaaaaggcaagccactaaaattgttgttgaattaggtaggagacaactctaaaagactggggaaaaaaattgaaagtctagacaaattttgcactcggaccgcttcacaggtgtccacattttcatttcactttataataggttatagggtcaaaaacttgctgaagcaaaacacacaggggtgagtttctgttttaatattgttccatttcctttctctactttgccctgaaggcaggctttggtcacagagtggtgtggaaatgccaacaggtaaaattccaatgagtcccatatttctatccagagaaaccagaagtagaccctgtaggctatacagcatgggggaaatcccagaggggagagaatcagaaaagaggatcccttaaatctgtgcatgaacctgcaaaagttacagaataatcactgagctacatatgtgcagaacagactcaaaccaatatagcaaagtctattagtttctattgctgctataacaaattaacctcaagcttgacggcttaaaacaacacaaattatcttaagattctggaggtcagaagtctacaatgggtctcactgggctaaaatcaagatagcaacagtgctgtattccttctggaagttctggagagaatccgtttctttctgtttttcagcttctagaaactgcttacattccttagcttgggcccccctcccatcatcaaagccacaagtgcaggctgaatctttctcacactttgtcactctgatactgactcttctgcctcactttctcacttttaaaaaccttatgactacactgggcctaactagataatccaggataacctctttattttaaggtcagctgattagcaaccgcaactctaattgcaacctaactcctcttcattatgtaacctaaaatattaccaaggcttcagggattaggaaatggacatctttggagaccattattctgcctaccatacaaaggctaggagaactaaactaacattggagccactggccacagatggtgaaacagaactaaggtctgaacctgagcagggtgatcgccagccaaaacaaaaatatcaacattcttcagaggataaaagagtctacacaatataacacccataatgtccaggatgcaagccacaactacttgaaatacaaaggaccaagaaaatgtaaacaatcctcaatggaaaacgcaatcaccagatgatggaattattgaatactttaaagcggttattataattatgctccacgaggtaaagaagaacatattgaaataaacaagaaagtaaaaattctcagcagagaaatagaaactataaaaagtaccaaaataaaatttttaaacagacaacaaaaattcttaaaagaaaaattcactgaatggcctgaagagcagaatggtgatgacaaagaaaaaaaagtcagtgaacttaaagattaacagaaatgattcaatttgaggaacacagagaaaagaaagattgaggaaaaaataaacagcgcctcaaggacatgtagggcaatatcaaaaggactaaaacatatgcagtcggagtcccagaatgactggagaaaaatattggggcagaaaaattatctgaagaaacaatcacctcaaacttcacaaatacggtaaaagacatcaatgtaccaattcaaaaaggaataaactcatagaaaaccaagacacaaaatgctgcaaaccaaaagtaaagaaatactcaaaatcagctaggaaaaaaattcaatatattacatacagggtaacaattcacattaccatggatttctttgagatggagtctcacgcagtcgcccaggctggagtgaagtggcataatttctgctcactgcaacct

SEQ ID NO: 318149 - DNA, 4001 bp, Homo sapiens
ctatctttatgtatttaattttttaaaaagaactattgatatttccaatgcatgcctgacattttagttatttaattgttaatcttgagctacaaagctgaaaatcataggtcaaagaatgaattccaaaatagactctaatttggtctaggtttctgaaaggaataatttcctagctgaaggtttttttttttttaattttcacatttgagataagagccgtttctgcttttgtttttctgatcttagaagaacatagttggaaggtgaagggtttgaggtattgattaaatgtcttgccaaattcttgtctgaaatgactttccttgaagaaaatggttggagaatgttcttggtgtttggttcttgtgctcatcagtttggatacaggcctgacttttatgccagttggcttctaggtcacagagtaaaatggagaaacaagggaaaatggaagaaagacaagaaaaatccatgggctacggcagacactcaatttgtccagtgcatataattaaagagatgaaaaaaaatgctctctgacctgaacttggacattgggttttctctagtgcctgatttgtctacagcttatgtgttagagagcacattgctcaggagcagaggccaaaaaaaggaattttcctataaaaagaagaccaccaccttggataggccagaaagaattctaactttaagatattttttaaaaattttcctatcagagttgaccccgctctctccttatccttcctttctactctctgcctccaattacttgaagctttaacatgggaccagtgatacctttatgttcccactttctctgattaagggtaacctgggatatgagagcagcatgggagactttaaagatgggaccatggcatcagagcaggtgcttgggctgagaatactggaaacttattgagttcctggatttactagccctttcttcaatttgtaggtcatttctttctatgtataagacaaccttataaagtaaatattagaaagagacaagagatgtaagggagaggagcactacacaacataaagggagagaagaagatggagtcccaagtaaagttctctcaattccccacctatccataaggctgaacttatgcctcacattgagcagtgagattctgttcatgggacagtcacctctgtttcaataaggactccttacagattgcgttgcactgcctttgttggagctttaagaattttgggagagattgtagttgttgaccttggaatttggatttttaagtactgaagctatatccattcgctcattatataaagattcagtatgcatgatcactaggaaatgtggatgtacgtgtgtttggactggaagcaagtgatgggggaaaaaggctttgaagacatatgaaattaagttagattaacttttcgagagtataactatgttatggtttttgttcattttacgcctaaataatatttgaatttataatatgtgattctctcctctcacagaagttacagtcagtatttttctttctagagaagcagaaagccacatacagaagcgccaatgcaaagaaagagcacctatttttgctttgggctttgggctctgggagatgtagttgtatctatcacagtgtctctacccagcaatatgtgatatataattataagtcaaggataagtttttaaataattatattagactgtgatttgtacaggtgagtattatcctttaaatttttagattagaaagctacatgtcaatttcactcatgaggctgttgctctaaaatgtgtaactttccccaccttcgacacacacatattccacacatgtaatacatatacacaaattcccttgggttgccttctggagccaacaatgtagaagagaactggtcctgttaccttagtgttgtggtctgtcgatgtgagagccatgggatcatagaatgctgccctgatatgcaggcatggttggcaccaaggaaagatgaagaaatgacacaggcagttggatattagtagtccagcggtcagcatcatcaaggggtagtttgtgaggtcaaggctggttttcatgacatcagcacagctgaggaggtgaactaggaccactgaagattattaaaaaggtcggatctacaagtaggatcccactgaaggtttcatctaccacctccaaagaagcggagatcatagagggaaataattctaaaagacttagtctttttttttttgagacggagtctcgctctgtcgcccaggctggagtgcagtggagcgatctcggctcactgcaagctccgcctcccaggttcacgccattctcctgcctcagcctcccgagtagctgggactacaggcacccgccaccatgcccggctaactttttgtgtttttagtagagacagggtttcaccatgttagccaggatggtcttgatctcctgacctcgtgatccacccgcctcggcctcccaaagtgctgggattacaggcgtgagccaccgcgcccggcctctaaaagacttagtcttgatttcaggagctcagttttaacagaaggcatgaagagacaaaggactaagaaggttcttaacattaatctttttctatctctttatacctctctctttctcatccgataggcttgataagattgcccgatatttcatcgagaaaatttgagatacaagctaacaggtagtatttaccttatctccccactaataacctacaggcttgccttcatctgtgttcatcactctcctgaaacaaaaaaattgccctctcctatcgaagaccttccttctgcacacactggtgatcccatctcctggtgcctattttttttccaggttttgcactttctctgatcacctctcttgcttcttcaacctccttttctccactggatcattattctaagcattaaaacataatctagaagctcccaccttttaaaaaaaacctctcatcccagtatctctattcctagccaacctactatttctcttctagtcttcaaagccatacttctcaaaacacattctatctttattctccatatgctctgcagctctcaccactgcactgtgtgctttccaaggttagcagctgcatccacactgccaaattaaatattttttggtcctcattctactcaacatctcagtataaaacactgttttccacgcctttatttagaacatttgtctgatctcagctttcacggcaccctactctaggcctttctcttgcatctccagaccttcattctccagcttcttcccctctagtccctaaatattgtatctcagggctcagccctgggccgtttttctatctgagtattcattctgattgctttaaatatatgtttataatgcacaaatgtatatcccagcccagtcctcccttctgagttccagactcatagatccagtttaagtcaaatatctcatatgcattttgaatttgataaggccagaattaaactatagatcttacttccccaaatccaacccttccacagtcttcttcatcttagaaaatggtactactagtgcagttgctcaagctagaaatctgggagtcatccttgaccctctttcttaccctccacatcccaactatcaccaagatctgcccattgtaccttatctttatctctgctaccaacatgatatgccaaagcatcaccagctctcacctgggttcctgcagtaaccaaactactgatgtccctgtgttgacagagcagctggaggaaactatgctacctcttcagcctcatcatgtgcctgttccctctctcattaggccctggccacatgtgcactctttcacttcattataagatcttccttacctcaggaccttcatacatgctgccattgatccgaatgtctttttctctaaccattcccttcctccacatgtttcctcttggctagtgctttcacaccttttatgtcttagctgaaatatctt

SEQ ID NO: 318150 - DNA, 4001 bp, Homo sapiens
gtttcgcatgttgctcaggctggtcgcgcaaactcctgacctcaggtgatccacccacctcgtcctcccaaaatgctgggattacatgcgtgagctaccgcgcccggcatgctgcataatattctatattacgtgtatatcactgttaaaacagcttatcaattgatgaacattaagtgttcgggttttaaatcttctagcaatgctgacaaagctgcagtgaaagtcttggcacatgcctttgtaaacaaatgtggctatcaaccaagtgacattattgttttgggggatatgcacaattttattagatttttaaattgctgctgggcgcggtggctcacgcctgttaatctcagcactttgcgaggtcgaggcaggtggatcacctgaggtcaggagttcgagaccagcctggccaacatggtgaaaccccgtctctactaaaaatacaaaaaaattagcagatcctggtggcgcgcgcctgtaatcccagctactagggaggctgaggcaggagaatcgcttgaactcaggaaggcggaggttgcagtgagccgagatcacggcattccactccagccagggcgacagaacgacgctccgtctcaaaaaaaaaaaaaaaattgcttggcaaaaagatctgtatcacttaaaactccctccaaaagtgaagggtagccatgtccctcatcgcgagtcacctgggttaaattactaatctgtaaatgttaaatttcgccaatcttcttagtgtttcaattcggagagtcatgttgtgaaatgccaatctcttagtccaccttttaaaaaactttgcaggggttctccaaggccctcagaataaagtccagattcctttgcagagctaacaggatacaggagactccctgctccaggaaacttctaggggcttctctcctggggcctgttccctggttttgggagcgctcgggcgaccgcgagccagagcagcgtctcgctcatctcggacccaggcctggggctccactgacgccgacggagccgggctgctgcgggagtggagccctgggggaccagaaggggctttcacttcgctcctgggcctcccgagttccaggctcgggctagccccgcgcagggaggcgagcgggcccggctccccagaggccgaggccggcgcccgtgctccttcagctcggcctctctcccccgacataggcgctccacatgcttcatttccaaaattctcagcaaaactccgcgggagaccctggtcacatgcctggaacgagaacaaaccggggcgtgtctgtgccggacggctgggaaccaaagctatttccatagaaatagggccggccagccttgagttgtagccccgccagtgcctgaaacgccaggaggaggggacgagttgccttttaaaggcgtagcgacgagaataagcccccacccgcggcaattcgaggctgaacaatagtggtgcagctcgggacgtggtgcgagggcccacactccactggagcacgcgcggaccaccgtgcctcagctgccacaaagggagcctcgccacacgcccgcggccgcctcgcagcgcccgccaagaagcgcctggcggaagggcgcactctcaggccttccaccggcgaccttccggcgggagcctgcgggcggcgcaggaacgaccctccttcctctgccccgcagcagtgctgagtaatggtgagagcagcaaggcccttggccgccgcacgtaagaaaaaagttgtaataaaaagaaaacaacccgggaaactttactagttggttcgccaggtacaaacctatgcggaaaaggcggggtacaggcctcggaggccggacccaaccagtcagggaaagaaagagggcagaagccgcaggctgcacagcctcacaaccgcccagagggcacggcggccctggggctcggtctcttccgagcagagcaacctccgtgtctatcagctccttccggcgttgcgattggccacaggctgtcttggcctctcggacgcccgcctcctagttgctaggggtttacttccccaaagtacacgggccccaccttgtggcgcaaccgctcctgcatggaaaacggatctccgcccaggggaagacgtgttaacgaataagagcagccccacacatttattggctactttgagtatcagtcaaagaactgctcactcgcctttctattgtacttttcggttattggtctctcttagtgccgatctgttactagggaaacgagatcctcacagtctcataggcaggagtcaaagccaatcaagagccacgccttcatccccgagtcagtgcccaattactgttcgaagagccctgaggacgcggtcgggattggtcatcccgtcgcccgacctggccgcaacaagttagggtgagtggcagttatatagaccggcggcggagcacgcgtgtgtgcggacgcagttgcgtgaggggtttgtactatcctcggtgctgtggtgcagagctagttcctctccagctcagccgcgtaggtacgccggggtgtgggcggggcagggaggccagaggactaagccgagccgcagcacttgtgagagggagaagtctgagtggcgctcgcggcggccgcgccagtcgcgtcccccaccccaacccccaccccaacggccgcaggcgcgcgcggcggacggacgggcgcgcggcggctcctcgctcccgctcccgtcccggctggggcgcgtggccgtgtccgccgcgtgcgcgtgctgcgtccaacggcctcgcggggcaggagtaagccgcggccgccgcctgggccccagggcggtctctggggccaggggtcccgcgcccagcgtttcccgcccgccaccctctccgccacgcgcccgcggcaccttttcctcccctggccaagggatccagtcggttcggaccagaaggaggctttcgtttagggtgggggcagcactaaagtctgattggagtcttgcggtccgcgcgtcgcagaagcgccttcggttttgcagagagcaaagagggagcagcgagtgcacggagtggtagtaacaaccaatgttctttccacgccctcactgtgtgtccggcactgtgcggagccacttttctgcctttcatttgattcttgcagtgagctggcgaggtgggtacggctatcctccttccttagcggcccaaggcacgggtttggagagcggggtcacaggcacgcacgggaagggcggggatttgttgacgccgggccctctgactccgagctccccgcttcccaagcctgtttttagtctttgcccccagagcacttgtccctcggggcagcatcagcctcaaaaggccacctgccgagaaggctgcagcggcatttgtacttgggctagttctgggcttccagggagacaagggttggaagtgggaatgtgacaaaggaaaagggtttgggcttcctttctacgtgtacttgtacaggccctgggtagatgtgccgccaccgtagcttctggaaaaaagtagggaaaacgatgagtaagtgcaaatgaacatggactgtgttcctcatcgggtttgaatctcagattgctgatgggaaattcccgccagcgggaagttaggctccggttttagacgttgaatttttttttctctactttttttttaattggaggagacttttgcagaaagaccttgagaagattcactttatagttgaagggaatgaggtgcaaagcgacgaatttaagatctcactagcatctgtgggttaaaatacggaattggaatagaaaggttggcgcccagttacagtatactatttggacctctgtggagcgtgtcatgctggatgaattactggtgttggagatgtgttggaaaaaacaactgtgacagtcgagatctgtggatgaaagtttgtgtacactccgtttatttagcatttactctgctgggttcttgtgtatatgcagaaacaagatgcttttcttcag

SEQ ID NO: 318151 - DNA, 4001 bp, Homo sapiens
gctgagcacgtggcacaggaaggactcccatctcaagtgtcgagggatgacctgatgccaatttattgctgttccatagattttataagaggaataaaggcctcaggacttgttccaggcccaaccttcttccctagaactgaattcccaagagccctcatgagggtccctgcccttatgctgctattttacgcaaaaaggatcagagccccgtgtcccctgcggtgggtgtttcagagtgtgggcaccgggctgctctgaagccaaggaaatgaccagccgggaagaaggactggaaagcactagcctgtccgctggccccagcttccctcaatgtcatcatcggatgagcagtttaggctgttctcccttcaccatgagccagaggaagggtctgttgtaggtttcactggccactctccttcgtcgtgtcctcatcatcatcaatgacttaagactttctgagccatagccaaagacttcaggcagcagctttgtgttctagccccaagtgtagcatttccttgctgtgtgactctcagcaagttacatcacctctctgggcttcagattcctacttatctgctttattttttgagacaggtctcacccagtatttgctttacatatgtgactgatttagtacatccatctagcctgcttggtgggcttattattattgccacgtttagcaaaccattgatagagtttggatgttttgtcccctccaaatctcaccttgaaatgtgacctccagtattggaggtggggactagtgggaggtgtttgggccatgggggtgggttcgtccctcatgaatggcttggtgctgtcctcggggtaatgagtgagttcttttttttttttttgagacagagtctcgctctgtcacccaggctggacagtgcaatggcttgatctcggctcactgcaaactccgcctactgggttcaagtgattctcctgccccagcctcctgagtagctgggattacaggcacccaccaccacatcgggctaatttttgtatttttagtagagacagggtttcaccatgttggccaagctggtcttgaactcctaacctcaagtgatccgcctgcctcggcctcccaaagtgctgggattacaggcatgagccactgtgcccagccaagtgagttctgactacgagttcacgtgtgatctggctgtttatttatttatttatatattttttaagatggagtctcactctattgcccaggctggagtgcagtggcatgatctcggctcactgcaatctctgcctcctgggttctagcaattctcctgcctcagcctctccagtagctgggattataggcaactgccaccatgccaggctaatttttgtatatttagtaccgacgggatttcaccatgttggccaggctggtcttgaactcctgaccccaagtgatctgcctgccttggcctccttaagtgctgggattataggtatgagccactgcacctgccgagatctggctatttaaaagagcctggcccttcctccctctccctcttgtaccctctcaccatttgatacacaggctccttcctttagcttccaccatgactagaagcttccagaggactcaccagaagctgagcagatgctggcaccatgctgcctgtacagcctgcagagctgtgggccaaataaacctcttttctttataaattacccagtcttgggtatccctttatagcaatgcaaaacaaactaatacaccatgtcacctggagggagtagctgaggcctggagaaggagaggacttacccacagctcaggtttaacacagtgtgtggtccaagacctaagcctggcagggccttccactgtaccaggcaagacaagggtgaatcccaccctcactcaggggcctaacatcccctttaaggttggggaaagtaggaagtaccaaggatggcactaaatgagaagctcccccaaggactcctagaataaaggttcatgtgtcctgtgtcctcagcacttgatagaccacttacagaccattgtgacagaccattgtgatgctgactatgtagagattcacagaccactgtgacactgactatgtagagcagaaaggctggttgttccccaggctctagtcttccttagtaataggcttttggccaggtatatgtccacattccccagcctctcttacagccagacatagctgtttgaatgtcaaacctaatgtgtgtgcaacttccagggagtgtccttaaagagagggctgatacatttcttccctgttttgtccttcctgtggtctggaatacagagtgatggctggagctgaggcagccatttttagccatgaagtgatgtcgggaatgacggcagagcagaaagacagagggagtctccttcccttaggactgttgaggggcaattctccatggcattcttatacctcttgtgacaccttttgcgtggaaccatcttttcaggatgtttatatgacaaatagcctgggggagcaggaatagtgtctcactctggagcagaggacagatttatttcctgaccaggattataaagataatgcctttctccaggttgaatgttgaccgggttcgttagcagcctcttatgcttataagattaggagtttcctaagctcagtatatctcagctctgacatgagccctgtgtgcacaggatccacctgggcctcctgctccagccccatggaacttaggaggcaagtaaaccagagcaaagataaagcttgagctgcctactgtgttgtgagtaataaagtcctttgtctctgacctaagagtcctgagtcttctgctggcatctgtgcaattgtggtaagctcgttgttagtttgcaagtaggagaaaagaaatctcagacccttcatatgtctgacaaggacttcatggagcagagcactatcattagctctggtgcactttttaaagttttcctttttctaacttcattgagataatatttattttaataactatatctcacttaagcttacaatttaatatattctgacagatttatacagttttgtatatttttaaatttcaacaattgtttgcagactgtattatacctaccaatacattcaagatatggaacatatccgtggtcaaaaattcctttgtgctccttcccaatcagtccgtaacctccccaccttagccaactagcattatgctttctgtcactgtagactaaagttgtgatttctagagttttctataagtggaattatatagtattcctttattgtgtctatttcaattagcatgctttttgagattaatccatgttttcgtgtgcatcattggctctttttaaaaaaattttttcaatggactccatttcttagagcagttttaggctcatggcaaaattgagcagaaggtacagagatttcgcatatactcccgtcctcacatacacatagacttctccactgtcaacattccccaccagagcgagtggtgcatttgttacagtctgttaacgacactgacacatcagtatcacccaaagtccatagtttacattaggattcgcccttggtattggacattctgtgggtttggacaaatgtctagtgataggtatccccaattgtagtatcgtacagaggagtttcactgccttcaaaatcctctatactctgcgtattcagccctccctccccataactcctggcaaccactgatcttttcactgtctccgtagttttgcctttttcagaatgtcatatggtatgtagccttttcagatcaatgtgtttcacttagtaatatgcatttgagattcatccatgtctcttctatggctttgatagctcatttctttttaacacagaataatatttcattctctggatgtattacagtttattcacttacctgctgaaggacatcatgcttgcttccaagttttggcaattgtgagtttggatgctataaacatccacatg

SEQ ID NO: 318152 - DNA, 4001 bp, Homo sapiens
gaataaaattccctgcgtgcagctgtaaaacatacacctgtccttcagggactgagttcaggataaccaaacattccttataataagtctgcacactctgctgtgccaacagagaagaccaattatatgtgtgagacgatctgccatgaactacttggtctctgctggccattttagtactaaaatttatgacagcactaagcaaaactcccaaagtgcagaaagctgggggctggggcagatcaagtcaaacatgtcgcctacacaggcccctcagtctccttcctcaagccaagcttccactcttccccccgccccgggccactctctgcaggacagggtgttcagaaattgcttgaaaagggagaattatcttgaaaccaaagacattcatttagacttgaacaaaggtggttgtttgagggaatactagggaaaaaacaacttagaagaagggaaaggaggcatatagatggaagttaagtcagactccacatagtttcaattaatatgatttttggaaaggctcttacatcctcatttctgtggaggccgacttggccaaagtgctgaaccaaagttttgccatatagaacacagccacacaaacaggcccctcctagtcaatcactgaatccagcctctccagactcaacaatctgacttaggatctcagaattccaggaaatactagggatggcttggctgcctccttggttataggtgaggaaacaggcgaatggtgaaatgacttaaccaaagttcccagagctggcacatttatagctgagatctcccaatactgttgtcttactcctgcacgcaaaaattagtggatgttttgttctttttttgtctttcaaaggacttggtttcattgttaaaagaaacctcactgcaagttaccaagctgtcaaaccctgaggcgggatgagccactatttttcaaatccgtgcaccagtagtgcttctgtgacatcacccaacacagaatatcttaaaatcgatttcaggaatggatctcgtaaccaaaaaacagcttgttcagaaaggggcacctatgcacgtagcagatgccttctatctggtctccatcttctatcaggtctccctttctctctctttattactgccccccacctctgggaaactgccacacccagccactaagaccaagactttgcgcactaagactgtgtcgacagataagcagaaaagtacagcactagtttcatctagtgttctgccctgtgtttcagttgagagaaatttcacacatatacacagacacagacacacacacacatactctctctctctctcttcctaagaaatgaatatagagcagctaaaaccagataagttctagatccctgaggcttgagacccaagcctgagactgttcttaattggcctcattgacagcagatgcccagctcctctgccccactctctaggatcctgcacagatgtggccaaattcttccccaccaaaccagctttagactctcctgggcctggcgatccatgccttcttcttcacccctctcctgaagattcctgtgactatgggtctggaagccctttctgccaagacaccactttcctcttctggtctcatttggtttgtctgacccttggctggttctaatccttggtggattccttcacatactgctctaagcttgccctttgactgcattacctcgagcctttctacaaggcaccagctctatttcctggccagaagtagaaattccctcccccgctgcgcagaagtcccactcacagaattcggcttcattgcttctctgcctctccagctccattcctcgaagagcagagatgacaagatgtaggttctgtgtatgcatccatgttctcactgatggctcagccagcatctctaaagttttttttaatgattaagggcctttgggttcccctgtggcacttccttggaggtaagggctcaggtgaagttgttcatttggctgttgatcccaggggagcacagggaatatgaaacagggaagagaggaaagctaataaagaatgtgttaagaagctttgggcaatcagggcttcctctagcaggaaacccttaggagactgcagaacattccttggaatgagggcaaggactttggattatttatccagccaggactttccctctttggccaagggtcattccttgggcaataattccctggcacttgcagactaacctgtgtgcttccaagctcatttcttttttcttttttccttttgtctttttttttttttgagatggagtcttgcactgttgcccacgttggagtgcaatggtgcgatctcggctcactgcaacctctgcctcctgggttcaagtgattcttctgcctcagcctcctgagtagctgggataacaggtgcccgccaccacacccagctaatttgttgtgtttttagtagagatggggtttcactatattggccaggctggtcttgaactcctgaccttgtgatccgcctgcctcggcctcccaaagtgctgggattacaggtgtgagccaccatacccagccgcttccaagctcatttctatggctgaagaatgccctcaggcagagagaagcaggaggttgtctgtctacacagcatgtgactacagccaaactctggggtggccaaggggacatgggttggacaccaacagcgtctgctacaaaagtggttgttgccacccctcagaatccccctctctgtgtgatcttccagattcaatgtaatacgtactgaatgctgccaaatataatgtaccagactagactcaggtaatcacaaagatgtgtaagacagagttcttctccacacagaactttcaatttgatgtaagagacaaacagaaataaaagtctttatagaaaagtaagtctttatagaataaagaagaatatgagaagggctgtattagagccatgaatcactggctgtgagagctgcgggaagatgagattaattttgactagagggagaaggctatcagggcagttttccaaagctaaaatattttaaacatatgctaaatcgacagacatccaattcccaccaagagcaaaagaataaacattctttcgcagggccctaaagccagaaagcagtgaaagaattagaaccattttatctcaattcacaaaaggaaataagtgacatctttcagtatcaccccatcttctagatgcaacgtttaaaaccaagtcacaagagcaagatgttcttcctgctccacgttcaactatgcatttgaaatctgttctcatttgtcgaaatgagcaattaattaacagtctttgtgaagttctcagactcaacaagtgtgcccctctcctgctgcctctgccacaggcagccactttgcatgtccctgcttttgaaagacaacttaggaatgaagctaaacgagacatcagcagttttccaaatccaggtgaagaaagtgaatgacttcagcatgaaagacagggctggggcgacaggggagagcaggagacggatgagtcagcccatgttcgtggaaagctggggtttgttggaagaatctcaagctttcattttgtggtgtttggaagcttaattcccagcttctaattaaacatataaactgtaatcacaaaggtatttcacaagtagttccttggatgtggcaggggttctaagaaccaatttgagatgcagggaggagcgggaaaggcgtggagaggaagcaggcctgggagtgagagtgtactgggcttcaggaagctacctgctgaggaggtgctggggaccccacacctgagctccacactggagggatgcagacagagaggatggggatggagccgtgcagtggggcctttttgttcttcttgcccaggtccttctctcctgcctctctggctgcccggctccaagtcagagacttgaatatgcagctggaagtttgggtattggcaagaaatagcaactgcacccca

SEQ ID NO: 318153 - DNA, 4001 bp, Homo sapiens
gtataaatactctacaaggactactttacactgttaaactatggataaaagccttttaaaaaaatgtcttgtgttgaaactgccttcccccaaaaacatgttataaaggaatattaagttaaaaaaaaatagaacttggccaggtgtgatggctcaagcctgtaatctcagcactatgggaggccgtggcgagcagatcacttgaggtcaggagttcgagaccagcctggccaacctggagaaaccccctctatacaaaaattagctgggtggtggtatacacctgtaatcacatctactcaggaggttggggcaggagaatcgcttgaacccgagaggcagaagctgcagtcagtgagccaggactgtgccactgcactccagcctgggtgacagagcaagactctgtctccaaaaaaaaaaaaaaaaggaacttgactatgaagtttaatgttaatgtcagatgagtcacaagcaatttttaaaatctgagcttccctaaattagtgctgtacaactttaaaatatagtacagaattcatattaaatacagcacatcaagaagttataaaatattctaatgaataaacattagaatgctctgtaacatattaaacccttagtaatgaatgtttccagttgttaatggaaaatcaaatggaaaacatgaaaaaaggagttattaagtaacattttgtatttgtcatacagaaaattcaccaattatggacgtttctccaaaaacgtgtcaagagaaagagaaaaacaaaaatgcatgactatgaatctacccaagtcagaaattcaaggccctgtctaaagacacgtaagtgtttataaaaatactggtgagctatgtaacatctacagaacaaagcccattttattctttcatccggaggtacatcaggtactgatagtctctacactaagtgtgtccaaggactaaaagagaagcatacatacacgcaacgatgcaatcttctcatcctgggtgtcttcactagacctattttcttgcaggcttttctctcctgtaactcctaagcgagggctaacaaagagacaacgcaattagtttgcaccatctggatttggctctccacgtctctgttcagactctttagaatctgaaaggctctttagggacatctttaggaagaagtaaggaccagagtggtgacttgcaccaaaacccaaatgcagtgacacaatcgtatagctcaccgaccaatttatctcacttccttttacgtaaattggcaagccttcccctttttaaaaataaatcttcctgaagtcaaattttggggtccatgttctgagaagagcaaaatcagagtactgtatttgttttgctccttgactgttagaataaaaggctactagcagaaaattcggcttgaagttttctgaggtggcaagctaggatcgggctgttactggaggctacatacctgaacggcccagagccgctacctccctgcctgctccgctctgctttctctgcaatcttcgacaagccgtgcactttgccttttctcttcgaacctgagagagggcggcacgtttcagggcaagaaacctacccaccggcttcgggggggtcctgggcccgaggcctagcacccccgcccgccctcggtcccgtcccggaggcagctcggctgagcttacggtgggcgagccttgagcctgtacctggcggggcctcggccttcgctggagagcctaggtctggcgtcggggtgagattgagcctctgaccctcccgctttttgcgggtatagacccgtagcggccacattgctatcccaccctacccccaggccacgggtgcctctggactctcgatggcctgccttcctgaggatcagggctaagtcacagggagtcagcgtccaggcgaggcccgcggagcagcctcacagcaactaatcgagcgaaagcaaaagccccagaactggagccgccgggcctcgctcccgcgcttttatctctgtgaggccgcgcagaggcttctgggaaaacggaggagcgcggcagccgcccagccttcctataggggcccagtggtttctggccttctggcgcaggttccttcaactccagcgaaacgagagttttttggaaaaaactttttcctcgtccagaaaaaggtttaattcagcccctcctcctccgtctgagcacttaggtttcgcctgtggctgcatgcttaattcaactgggcatgcaggagtaaaggcgttccctcctttgggtgggcccaacacttcctctgagcaagctctccctatcagcactgcataaggccttagtaatggagttttaggccaccagcacaggcagtcttgtgaggggttggcctcagtgcaggaaggtcacaaagaggactgaatgcaccttaaagtgacaaggagcttctccctgaggaatcaacttcagtcccctgggcctgcaactgactgggaagctatggtaattaagaggctaaccaagcctctgaagatcccgggctctaggaggctgcttctggacgacaaacagtcccttagcctgtgtccaggagccatctctagacatctgggcatccttgtggttaaggtagaagattccataggggctctcctccttgtgccctgggcctcaacttgttgctgcaccagaccgatctgtttcttcttcttcttcttcttttctcctttcttctttcttctttcttccccttccccttccccttctcctcttttttttttttttttttttttaagacagggtctggcttgtcaccctggctggagtggagtggtacaatcatagctcactgcagcctcaaactctgggctcaagtgatcctcccacctctgtctcccgagtagctaagactacaggcacatgccaccatgcccagctgatttgtaaatttttttatagagacggggtcttgctatgttatcccagctggtcttgaactcttggcctcacgtgatcttcctgccttggcctcctaaattcttgggactacaggtgtgagccaccttgcccagccttggttcaacttttatgtaacaaaattgtgagttgtttttcagttgccatgaaccctgaggtcatgtaacctgagcatgcctagatgaaccaagcatgcagccacaggggaaaccaagtgctcagatcaaggaggagggactgaattaagaagtagatatggcatggcaggatccaaccgggttgagctctggcttcatcccatagcaggatccagtcagatcatgcctcccagcatcacctcattacaagatccaatcagatcacatctctttaccctatgcttataaaaaccaaaccaaaccccagcttaggaagacagatttgagcatttcctcctgtctccttgccagcccacttgcaataaagcttttcttttcccaaaagccagtgccatggtattagcctctgcattcatcaggcagtgagcccattgactgctcggtagcaaactcttctgctctgtcaattagagatatgttggaattacctccctttctctccataccctaggttgaaccatctggcgacatcagatgagcatattatgcacataacaataaccatctttttattctaaaaagtggaaatatttcataacatttaaaatgcagtttgaagagataaaactatgaaaagcttaaaggtttttctgtaacacctcagtcttgtatgtgcgaatataagcacatatatatccacagtatttttgtaatataatcactgaatattttatttaaaatctgctcacagaaacatttatgataatcaatttactagataattaatcatcaaaatctagctttctaaagaacagatggtaggcattcttacctggttttacctcgggttttgagtcattgaatcaatatttactgaacaccttaatctgtattaagcactgtggtaggtcctggggatacagaagtgaatcagaaatggtccttcag

SEQ ID NO: 318154 - DNA, 4001 bp, Homo sapiens
aaaagataacaggatcttgtagtagatgggttatgtgaaattacatagagaaaaattctaaatataagtaatagcaattttctcccttcaggtaagaaataagacttgcatttgtgatatcaaaaatcacctgagaaatgaaaagcaacccaaaagtacccaggaggcccatttacttactgatgacaactgtgccattcccaggaatatcttggtcggctgggtaagaaatctgatgtcccttggtttttcactctttggggaaatctgagcagcaccctgtgatcataatctctgacatctgccctgtatgctgtactgtgattttgaaaaaagaaaaattattatattcatggaatattaactaaagacaaaactacaaataaaacatccattatatagtagtgacaatcctcctttcccaactagactatcagttccaagagtctaaggcattttgtttctttttgttcattgctgaatccaaagctcctagaaccgtcttggagtagtcagagctcaatgaatatttggtgaataagtgaatgaataacacctatggaaatccacagatcttaacagtaaaaacataataagcattaaaaatctaaatgtcagaagtaaactttagaatcaattcaagtttgatcatatgaatgagtgaaactgaagtggaaataatcccccaataaaaaaaataattcatagatgtttattacaaacttcaaacttaacaaaacttttaaaaaagttaatgagctgcaaactgaggaaataactctaaaagagcatacccagatttaaattaataattttgtaacttcactatcccaaaacaatggcagtactgtaaaaacatcatagggagttcaatggtgtgagtgatgcaagactcaggaatgaaaatgagcttggatttcttcacttcctttagcctgacaattataaagggtcaaagtggaagaaatgtacaaataaacatcactgtgttcctactaatatatttagtgtgtctatatgttcaggtggtattgatgaccttattttacactttaaatttttattaaaacatcttttgctccctctgctgtttcccagcagtaaacccagagaaccccaatcccagagttactattttattttagaatagtggaaaaacaaagctcttgctcacggtcttattctggctgaagtaataccaaaacaaccaagttcatcgtggtctcaaacaaaagaggaaaacttagtctttaccaatgaggctacgatggcaaatttgccccgaatcttttaagggggtattaacacacccttccattacaataaattttttgaattactgtatagttgttttatgaaaagtgattggaacaattgactcccaagtttaagtatcttggaaaaagagcatgagactttcagtctccaggataagggtttcctccacctctgtgattcctgctgcactttgagacagaacccacagaaatcttcaaaaatattaactctccgtccaggtcagcatgcccaggaggtcacgtcccacttcccagctcttgtcccacttcctaacacttgtctgcgcgaagcagtagcagtcagaaccaggcaccagagcgccccctgaaggtagaccggggagcggggcctcagacatatcagcccgtacctggccagacagttttcctccgccgcgcatctcaggttgtacatggacatcttctgcacgtacgtggacgcctggatgtagtaggggtcggccaccaggtctgggagacctaaacgtcagcaggcgacgggcgcagcagtgaaacaacccggcgccccccgctccaactccctacccctctaggtcccttactcctcacccttcgcccaccgggactgcagagtggagcggaggacagcaagagaactggggacgcccgggactgcaaagcaatgtgaaaaggaagcaggaggggccagacgcgcggtttgcactggattccagggctgccactgcaggcgcgtgggggagggatcggatctgcgaggaccggggcccgccgcgcccaggcagccacgtcgagaagccacatagctggggaccaggtgcacgggtgcttccagcggacttgggggtacttaccgtactggaagtagccagtgccgtatccgggccggtacctgcccccaggtctgggcctttcataagtatcgtagtagttgtaataagggttgtcgtcagagtacttgtaggggttgtaagggtcgtcgcccaccatgccgtccacgcggctgggcggccgcaggttactgagcgcaggaacttctcccggcgctgtctggttctccgcgcgcgaggcgccagcttcgcgggctctagatgtcgagtagccagcttggaaccagtgacgggcggtgggcctggggcggccagcggtgactccagatgagccggccgtccgcgttcgcgccgcggcggtgcggttgtcgcggatcagcaggatcggagtgcggggctgctgggcggaggcgttggctgcaccagggacggcggcgcccgggtcccggcggcgctgaggctggtactgtgagcccaggctcagcaagctgaacacctgcccgttgttctcccattggatctgctggcgccaggcgcccggagccgccggcggctcgcgcgggggctgctgttggccggcggcgggaggggcgcagtgcactagcgcgcagagctgcaaaggcccgagcaggagcacggtccaggcgaagcgcatcactccttttgccagattgaccccgctcgaggaggacgtggctcacagaaaataaaaacggggctcaaatcacgtgagggaaggagaaatcttcaaccaaggaggcgagcggagcacgggtatctcagtctccaccaagcaatgccaagggtgggattcagacccttccccagtcaaggcggctgctcggacgtggcacccttccctttcccctttctcagtcctggaaggcaacggggagcggcgcggcagtcccggagagcgggcagtgtctggagtgaaggaaggaggagagattttaaactttctggcacgtttgcaaagttacacaagccgttctggcccggccgcccctcagctatttgttcacgtaatgcgattggaaacgtgcaaggcggacagctcctcgcctctgcccctccctctctcccgtccctgccctcctccccccagacacgttgcacagggagcgttaaggggaaagaacaaaacggaacacacatcctgagacacactggcttaatctggggcgaacatgcaggaatttcaaaaaactcagacaggcgaaggcagccaggccatggggcgacgccaaaatatgcacgaagaaaaatgctattaggtcaccagcccttgagaggcgggaagtcgggaggttgggagggtgctgggggtgagaggggggcgggggaggattgtgactaaagtttatccataaaagagttaaccagacacatttcccaacgcacactctctcgcttttatgggaagcgccctcagcaaataaaccccaggatatcaaattttgtttttctgtgtgtaggtaatatgagaaatgggttacaaatttatttcctacagtgaatattttaataaccaaaagtgaaattgtacagggaacaaagccagctaacgctgcagctatgaataaacctgtctctttttcaaaatgccggcctgatttgtactttgagtagaagtggagaaccatctttcatctccacagtgtctacaaggaagattcattaaagactagaacaagtctgcatgagaaagcactcagaaggcatcttcacatatgcattttataagacatttttctccttcatcttataaagaagtttgactttggatttaaaaaaaaattaaatcacctctgttaaatactgaaagtcagtaaaacatcgcatgctgtttaatttatcttccaatctaaacaaagaagttgctgaagaaaca

SEQ ID NO: 318155 - DNA, 4001 bp, Homo sapiens
tattttagaatagtggaaaaacaaagctcttgctcacggtcttattctggctgaagtaataccaaaacaaccaagttcatcgtggtctcaaacaaaagaggaaaacttagtctttaccaatgaggctacgatggcaaatttgccccgaatcttttaagggggtattaacacacccttccattacaataaattttttgaattactgtatagttgttttatgaaaagtgattggaacaattgactcccaagtttaagtatcttggaaaaagagcatgagactttcagtctccaggataagggtttcctccacctctgtgattcctgctgcactttgagacagaacccacagaaatcttcaaaaatattaactctccgtccaggtcagcatgcccaggaggtcacgtcccacttcccagctcttgtcccacttcctaacacttgtctgcgcgaagcagtagcagtcagaaccaggcaccagagcgccccctgaaggtagaccggggagcggggcctcagacatatcagcccgtacctggccagacagttttcctccgccgcgcatctcaggttgtacatggacatcttctgcacgtacgtggacgcctggatgtagtaggggtcggccaccaggtctgggagacctaaacgtcagcaggcgacgggcgcagcagtgaaacaacccggcgccccccgctccaactccctacccctctaggtcccttactcctcacccttcgcccaccgggactgcagagtggagcggaggacagcaagagaactggggacgcccgggactgcaaagcaatgtgaaaaggaagcaggaggggccagacgcgcggtttgcactggattccagggctgccactgcaggcgcgtgggggagggatcggatctgcgaggaccggggcccgccgcgcccaggcagccacgtcgagaagccacatagctggggaccaggtgcacgggtgcttccagcggacttgggggtacttaccgtactggaagtagccagtgccgtatccgggccggtacctgcccccaggtctgggcctttcataagtatcgtagtagttgtaataagggttgtcgtcagagtacttgtaggggttgtaagggtcgtcgcccaccatgccgtccacgcggctgggcggccgcaggttactgagcgcaggaacttctcccggcgctgtctggttctccgcgcgcgaggcgccagcttcgcgggctctagatgtcgagtagccagcttggaaccagtgacgggcggtgggcctggggcggccagcggtgactccagatgagccggccgtccgcgttcgcgccgcggcggtgcggttgtcgcggatcagcaggatcggagtgcggggctgctgggcggaggcgttggctgcaccagggacggcggcgcccgggtcccggcggcgctgaggctggtactgtgagcccaggctcagcaagctgaacacctgcccgttgttctcccattggatctgctggcgccaggcgcccggagccgccggcggctcgcgcgggggctgctgttggccggcggcgggaggggcgcagtgcactagcgcgcagagctgcaaaggcccgagcaggagcacggtccaggcgaagcgcatcactccttttgccagattgaccccgctcgaggaggacgtggctcacagaaaataaaaacggggctcaaatcacgtgagggaaggagaaatcttcaaccaaggaggcgagcggagcacgggtatctcagtctccaccaagcaatgccaagggtgggattcagacccttccccagtcaaggcggctgctcggacgtggcacccttccctttcccctttctcagtcctggaaggcaacggggagcggcgcggcagtcccggagagcgggcagtgtctggagtgaaggaaggaggagagattttaaactttctggcacgtttgcaaagttacacaagccgttctggcccggccgcccctcagctatttgttcacgtaatgcgattggaaacgtgcaaggcggacagctcctcgcctctgcccctccctctctcccgtccctgccctcctccccccagacacgttgcacagggagcgttaaggggaaagaacaaaacggaacacacatcctgagacacactggcttaatctggggcgaacatgcaggaatttcaaaaaactcagacaggcgaaggcagccaggccatggggcgacgccaaaatatgcacgaagaaaaatgctattaggtcaccagcccttgagaggcgggaagtcgggaggttgggagggtgctgggggtgagaggggggcgggggaggattgtgactaaagtttatccataaaagagttaaccagacacatttcccaacgcacactctctcgcttttatgggaagcgccctcagcaaataaaccccaggatatcaaattttgtttttctgtgtgtaggtaatatgagaaatgggttacaaatttatttcctacagtgaatattttaataaccaaaagtgaaattgtacagggaacaaagccagctaacgctgcagctatgaataaacctgtctctttttcaaaatgccggcctgatttgtactttgagtagaagtggagaaccatctttcatctccacagtgtctacaaggaagattcattaaagactagaacaagtctgcatgagaaagcactcagaaggcatcttcacatatgcattttataagacatttttctccttcatcttataaagaagtttgactttggatttaaaaaaaaattaaatcacctctgttaaatactgaaagtcagtaaaacatcgcatgctgtttaatttatcttccaatctaaacaaagaagttgctgaagaaacagccttagagtttagattttggtaaagagaaggaagtaggagtggtcagaaaagaatataggtgggggataaattatgctgactggaaagagatacataatggacgagttattcatataccactcagggtttgggcagtgctagaaactttgcaacaaaaaatggttactaaatggtctgatttaacactactactcaaaaccagattttggtaaccattttattggtctcatcattgggctattgtccagacatacttcaatattcacatacctctgttagtctctgtctctccatatttaatcaccacattttggtggtgtggtggacctctgctgattttgactgcctcacatccattttccttttctttctagtaagaacaaccggattttcctttgaggggcttcccacccaccccactcagttgcatagtggaaggactgagcatttatgagacttacccacttcaagaagtggtcatgagatccaggtttggccaatcaagccatctctctagatggtttaattttatctgggatctgaatcttgagcagaaggacactgtcaaaaatgttgctcctcaaactactaaagaaagtgcccaggcctggcgcagtggctcacacctgtaatcctagcactttgggaggccaaggcgggcggatcattatcattcgaggtcaggagttcgagaccagcctggccaacatggcaaaaccccatctctactaaaaatacaaacaaacaaacaaacaaacaaaaaattagctgggcatggtggcacatgtctgtaatcccaaactactctggaggctgaggctggagaattgcttgagcccggagaattccttaagcccaggaggcagaggttacagtgagcggagatccaccactgcactccaacttgggcaacagagtgagactccatctaaaaaacaaacaaacaaatgaaaaagtgcccattatgtcttgctacatggatccgtcccctgccccgtcacccaagctactttaggtgagtacattctaagacctggttcttcagcatttccttctttctttcttactccccgacccacccccccatcccccccatacattcctttgtgactgaacatggtcagagtcaatttct

SEQ ID NO: 318156 - DNA, 4001 bp, Homo sapiens
tcaaccgggggctgcaactatgacagggatgacgaagtggcctccggggacctccagggaggggcttgatgtttccccccagggagccaggagggagtaggaaaggcaggaagagagagcatgcctgaggcagccatagctggggcaggagcagggctggggaagccctggaaaccacagcaggggttcgaatttcatccgggggcgtccccgctgagggcttccgagcagcagagtgcaggaggaagaaagcctgctgggagtgactcagggagagtgaccagggagagagcctggtggctgggtgggggtgaggattgaagaggaggaatggttgaggggcacagaatgagcgaccgtgtcccaagtcctcctttgaggggcacagcacacggcagctgacagcgtgtggcagacagagggccaggcagagcggcggcagaggggccggcaccgccccagccccagagtccagctcccgacacacagggagacgggggccagggcctgggagccaggctggggacgacctcaccctgtgtgtcaccaggaggggcggcaccatcgggctctcctgctccccgtccccttccataccctgaggaccagccgcatcaaggggctttgagcaaaagcaggcgtcctgggaaaatgacaagctcaaactggcctcaagaacttttcacttcagggttctttcagataaagtactttatgcattaacaaatctccatcttcccggaaatctattctcacaattggaagcgtgctccctacaaaccggacagccccataggccccgaaacagtgcttgcttctaggaattattctagagtcaaaagtaaggtcctcttgagagtggatctcaggtaactgtaagcccagctggcagccaggtagccggaaaagccaggctgagccagcacatccccggtgcagcttcctgcagcgagcggccccctccccacgacgcccccgggtctcccctcaccactgtcccatcgcaggatctcagcaaaccgttccctcccacgtggcagcccaggttgcataaagttgattcgggtcagaccagccccgagaaagcatcccttacaacaggagcgaagcatgcaccccagaaggcaacgtgcggccgcagagcagggagacccgtgcgcctacaggggaccctacaggggacccgcaccgcccgcgcgccctgtcccgggcaccaccaggccccgcacacgaggctcacccagagccgcggtgccctcccgcccgcgggccgcgtccaggcaaagccgctccggagtccccgggctgcgcgcagggcctgccaaggcgggcggggcccggaccagggacgagcgcggggaccggcgatgcgggtccagcctcccgcgggagccgaggtcggggctctgggaggcagagaaagggttgtgggcccggttcagggtgcaggggtctggggggaggagcagaacgcggggcggggatgggaagcggggaccccgaggaaggcgctgagggaccaggatgcgcgtgcgggcggcgggaagccggcgccgagaccgaggcatcgggtgcgggcggcggggacgcgaactgaggggcggccgcggggagggaaggcgccgcggctcgcagggccgcgccgcgccccaggccccctccccggcccctcctcggccgcgcctccctggccccagcatccctggcgtccgcgccggctcccggggccgcgcgccctgggcacccacctgggccttctgcagggcgctgaggcgcagctcgtgcacgaaggggttccgccccgggggcgccagcagccgagcgtcgctggcccctgcgctggaggcaggggcggcccggggtccgcatccccgcagcctcatggccgcgccgtcccgcggcgagcgcagccgagctgcctggggcgccgagcggggccggggctagctgggcgcgggtctcggggcgcgggccgaggatgcgcggcggctggagcgggccgggcgcgcaggcgcgggaggtgacgtgggcggagcgggagcgccggccggggcggggcgtccctggaagcctcgcctcccgccggccggcaggggcggcaccagccggagttccgctacctggtggtttctctggggtctgtggggggccggggccgctggggaccgggggcgcctcctgcagccactggagcacagggatccccggcagggtctgcgccaggagaaagggaggtcccccgggcccgcgaggctgccacgtcgtccccttccgccgctcggcccgcctgctcgcggggagggaggaaggggcgggcacgcgtccagcttacgcgcaaggcgggccaggccctgggtgccgagccccgggctgttccggcgaaggccccacgccattcttcttattcgttgggctcctagctcgcaccggcgaccctggaagctgccccgggctgagggagcttcttccagccgcgcctcagcccaggcgactcccgcctgaggtccactcgaccttaggaccccccagacctcgggatcccctcagatctcaggacccctcaagcctcaggaccccctcagacctcaggacccctccgatctcaggacctctcaggcctcaggccccgcagggatggcccaggcaggaggcgcacataggggccctgactgtccgtgctggttgtgcaggggctgcgatgagatcccagcgctttctcacccgtagctgctttggctcgggcattgcccttgtggtgctcaggagccgtgtgaggagccccagggtggggcccataattagccggagcgagagtaggatgggctcctgcctccgggtgaacacgcttggatttcagaactcacgcaggccttcggtcacagtgctcacggcttcctcaccccggctggccctgttggttccttcatggccaacggacctcacccagacagagccggtttgggccacctggccaaccccccagggtcctggctcctggggatgtcactgctgtgttggccccagctgggccccatcctcagcagacgccagggagtgccccgacccctccaatgaccctgcctgcgcccttgtggacctcatagtgcagcgggctggcagagacccttctgtgtctgagaccggggtgagggccaggggtctgtgccatccacatatcatgcacagagaaggccccggcaggccagacccgctgcatggccttattcctgccccataagagtcccagcccatattcctgccccataagagtcccagcccatgcctagcagcagcacctgtcccaagtgccacacccacggggatggggtgagccctgtgtgctggtgggcattggtggctctgtggcccagccaccagcgttgcacccacctcctgggcttttagtggccacttgctctgatccccaaaaccagagcccagcacccgaggccacccaaggctcctcaccgaactgatcatcaagaaagcccaggacacaaagcctgccagccacagggcagcacctgcaccccagcgatccaggcggccccacctgctgcctgagtgctctggagaggaggggccctagggtgtcccagtcctgggatgagagcagcctcaggactggacttggagagccatgaaagtggggtcctcccagaagcacaggccaggaagcggtgtgtggcggaggggaaacctgctggagatggtgcagagccagattcaatggggagagctgccagagagtcatggctgtgtccccagaagatgcaaaagtcctaacccacagcacctgtggccgcgaccttatttggaaacagggtctttgcagatgatcaggttaagaggaagtcattagggtgggccctagtctgaaatggcttgtgtccctatagagagggagattcggtctcagagacagacacagagagagctccatgggaaggccagggttctgctgctacaggcaagcagttcccaggagctggagaggcctg

SEQ ID NO: 318157 - DNA, 4001 bp, Homo sapiens
aggcacccctaccaccgccaggcacttctccccaaaacccactgccaaacgccccaccaggacccactgccatgtgcccccagcccccagaacccaccgccaggcaccccccagcacctgaggacccacctctaggtgcttccccagtacctaccaggcaccccttccccctagacccactgccaggtcccacccccaggacccaaaactgggtgccccccggacccaccgctaggttgccccaccaggacccatcacccggtgaccccaatacccaccgccagctgcccctccttcaggacccaccaccaggctccctcccagcacccattgccaggcaccccgttccccaggacccatcactgggcaccccccttggacccaccgctaggcactccccctccaggatccactgctgggcaccccccttggacccaccgccgggcatccccctcaccactgcctgaggctgccttggcctggccccttcctagctgctgccctctctgcctccttcacgcagatctgctgagaggatcctgcataagcctcctgtcccaccatggggaggtccatgcagcatggagcccaggcctccctcgagggagactgggaggatcccgccctgtcaggccttcggatgagatggcacccttggccaacagcagccctgagccaaaggcaccgacaggctcagatttctgagctgaaatcgtgtttgctgtttgaagcccccaagtgttggggtgagtcgttcatcaacaatagacaactcctcacaccacgtaggcacttctgtttcgtctgtttggtaatttccgtattctctttttttaactggcattctctccacatccctaagtcacacatggcagcccgcttctttcctggtggctctgactttcggtgctcttgccccttggcggggccgctgtcctgtggctgtggccacacccggagtgagaggctggaggccgtgtagcctcatggccttggacatgagcaggcccctggacgatctctccttgcctctgcagccaccagcccgccctcagtcccctccccaagactcacccaagcagcgtcgggatcttcccggtcagcgtggagaaggccacactgagctcagtgagctgcgccatcttgctgagctcccgggcgatggaggcgaggagggggtcctcgccgtcgggagtggaggcgtaggtggggggtgcatcaaaggccttggtgggcagggtgagcgaggccagccgggggaagcccacctgggccagaagctgctgcacgtggcccgcatgcagccgcacgttgtgcaccacctccagcttgcgcagggcacccgggccagccagacgcagcacgtgcaggagctggctggggctcaggctgtccgcccggaacgaggggcagtgcacccgcagaggggccgggcccgctggcctcagagcctgcaccaccgcctcgaagttgccctcagtgacgaagaggtcggcgaggacctcgacggggcgcccggctgcgaggggctctgcctgcagctcacagcaggtcctggccagcagctgggtgcggccccacctgcccagcgccctcccgcacgggcaccgctgcacctgcacatctcggatgcccgtgaggtcagccacccgcagccgccggcggctccggtcctgcagcacgtggtccgcgaggccgcgcaccagcgcctccaggcaggccctgcaggttctgtcgcgcaggtcctgggggtggtcggcaccaggacccagcagcgctcccagccggaactcctccaggggccagcgccccagcaccgcgcgcgtcacctccgcctgctccagcaggtagctggctttgaacaggagtgggtagaggttgtgggccacgctgtccaggctctgccgggccacctgggggtgggacaccagagcttctgcagaaatgaagcggagtgacctcattgtgtccatggcccgagacaggaccgctccccacgactttccccaaggcgtgtgcccttcacgcctatctttagctgcagcagctgtgagcagcctgccctgggggccctgccacggggccttatgatcatctgactgctattttggtcctgggacacctgcgtctgcccggcctcggggcacgcagccgttgggagctgcttggctcaggcacccagccgttgggagctgcttggctcaggcacccagccgttgggagctgcttggctcaggcacccagccgacacagaaaggcagcccgtgcccatggcagggctgggcagagaagcctgtgctccatgctgcagaaagccagtcttggcaggcgttcgtgctggcggccggtgaggccagcgggcaggtcctgtttaccatccaagcggggctactgcccagctctgggcacctcccccaccagtcaacggggcagagaacaggccaggcccctgcgcctcactcggtaaccagttccctttccacagtggcctctggggccgctcccacacttcgcctcgcatctggggtgagacgagtggccaggaatggagctgctgttttgccccttccctgtgcctttccttctccccaaggacccggcgggggtggcttccctactttccatgggagagagtggctgggagaggtggagcctccctgatggcctcggatgagcccccagctctctctgagctgcagtgtcctgtctgcaaccctgccgcctgtgcggcagggaaagctgcagggaatgggatacacctgtgttggggggcggtgcctgatggttcactcccagcactgaccgtgttggacagctgatgggtgctgcactcacctctccccgtgacactgccactcagggcagggtcagcacacatcgctgcacacatcactgcacacatcactacagggcaccacgtgtccatgggctttggagggtcacggccatgagacagaggctgagggagactgagagaagtgagtgacggagactgagacagagacagagggacagaaactaagagggagagagacagagactgagggagagagaaagggaaacagaaagagacagactgagagagagacagaaagggagagacagagactaagagagagagagagagactggtaggcagagacagagactgagaaagacagacagacggggagacagaaagagaaacagcagtgggagggggaaggctgctgagcaagcttggagggtgctggtcatgggtgccccaccagcctccctgtctgaccctccccagtttgttccctgagcctgagcaatgcctctccccgggaggcgacccatgcagaagggactgtgctccgttgtggggcccaggcactgtccagcaggcggaggtgtgtgtgaagaggtgggtgggccctgaccccacccttcaggggtggccgccctcggccagccgatgtgggcccccgggctcccctcatgaggtgcacaagaggtttccccagacacacggcccctttccaggaccagataagagaatctcgaaggacacagtagaaaaacatgttccattggtttttatgattaaaatttttaacaattcagtattgatacaaagtaaacacttaacaacagtggcaggtaacgccatttcccagacaccttttgggttctgaaaagtggtttccagaaccttcctttacctactcgggctctgtgtggcccaacaccctgctgtcactgcggggcccctgggtctcggagggtggagaccatggctaggaaggtcagccaaggtctgggcccctgcagcctccctctcgcttactgttttcccttcttttagagaggggtggtcctcttggggttcccattccagcaggaccactcagcacaggttgggtcagactcaggcccagctctggcgccgccgtcccaacctggggccacggctctgggctccttacaggaaatgccatgacaaacaggcgttctttctcagacctaactcaagtgct

SEQ ID NO: 318158 - DNA, 4001 bp, Homo sapiens
ccatcattagcgcagtagtcttgtgatgaatatgaggagattttacaacagcccaagctctggatacatttattgaagatgtaacacaatttgtaatgttaatataacgtaatgctctgccacgcatggatgggggattctgacaatagatgtttagagtaatggctgaagatgctagccagtctcgaaggcccaaaagtttgcagttacattcccaaggattagaatttgcctgaagatgaatcaatgaagacaacggcttaaggacccttggatgcaaggctgtaagattattaaatgacagattaaggatcttcaaagatgctcccatattttcaaatgtatcattatcaatgctaattattctgtttctatctaacttaaggtaaattaaattctttaacaaactgaatgtgtcagaatttaaattctctaaatcattatgacttaagatcaaatgtttaagattattaattccactaaacccatccctagtaacattcctaattcttgaatttttcaggaggaggtattccagattggcaagtcctttaaatgcaaagggctgtattgcttcaataggattatgagacaaagaaagtcttctaagacttttaagtacttcaaaggcatttgatggtacttttgttaaattattacttcctaaatacaaacaagcaaggttttcaagatgttgaaagcctgattctgatatcctcaaaatgttattgtttgataaatcaagtatccgaagagcaaccataccaacaaaggtaccactcccaaggacagtgaggcgattcctttgtagatttaagtactgaactgaaactagatcattaaatactcctctcggaacaaaagatacctgattatactgtaaatataaattacgaagatttaaaagtcccttaaatattccaggatctaagcgtttgatgaaattattatttagaaatagaaaatatagatgcctcaattgaacaaaggcttttggatatacatacagaatgttagaattatccaaatacaatgctacaagagaatgaagtcctgttaattcactttcatttatataagatatattattcccagtcagatacagaaaaactgtactttcaggaaaattcttaggaatactcgaaaggcctaagttacggcagttaatttgtctcccagtgcagagctgacaaacagacgaacatccaagtatttctttgtggagtaataataaaagataacaggtaacaaccagaaacagtcgtaggcaaggcagagaaaactgtaatccacacatatccctgttcttggattttctgttcagatcagaattggctataaaaagagaaggtaaagctttaaatcacgaaaacttcatcaaatgaattttttttataatactataacttctgtattctattttaattaggatcagccaataatactatcataaatcataccatggtaatagcaaaaaataatgagtatggaatacgttctagaattattaacatgatcaggccattaacccactatttgacaaaatagttcagattaatgaaacatttgctaagttaacttaaaaattacaattgattacaacacaggtgacaaatgatgtaggaatgagaatctttgaatttaatatgtccctttaacaacataaagtctaatatcaaataacattataatttatgaaaatacaaattcactacagaacaattaaattctaaattacagtttttcacagaactatttttcatgtcagctagaagttcatatttaagtaaataatcttaccaagaaaaggaaattcgtattattaacactcagctgattcagtaaaggttttctttttaaatctgaagaacgacatttcttaactccagtttgttctgtggcactgctgacctccaccccaccacttttttttttttttttttaagtcaccgtttgctcaggaaacaccactcttcacattggttcctttacagtcaatgtgtaaaacagaggttgccatggatacaggaagctaagagacaggaagtaattttatctgtgtttcaaaagtattgctgaacggaaatctcaggaacttattttttcagaatgcagttagagttttcctaatatacacattgaaatatctcctataatataaaaataatagtttttaaaggatacttgaaaacattagttattcagaacccaaatatcaatcaacagactctagctatcaaacaacatagctactgaatggaaaaggctagttcaaataagatgtatatcgagtaatacaattttttgtaaactttttaatgaataaaatatttatgttgtgttaaatacgcattgaagacttaaactttatgctttattcctttaataaaaataggggaaaaaatttagaatgaacataaatgttgttatattatcctccagtgctctttttaaaattttcaaaatatttttggttgcaaaaaatactgagtactacttaatacgtgaggtactaattggtagtaagctactaattagtagtaacgcactaattggttgtgttgggttataagatgttaagaagctgcataccaacttactgacataggttatctttgcaagaaaaattggggagagtaaaagaggcgatgtttcgccctatatatatctgtatcagtttgaatcttttagaacaaaaatggagaattttttaacgtcatttttcaagaatttaaagaatcggatataaattgtttatattatatattgttcagtcattaactttctttcattaactttaagctagttgcttaagctttctaattctgacttttattaatattactaatagcctgataatattcctaaaatatcaagttatataattgtatacaactctcctttgatattaaagcagtttcatttcacatcaacaattactttagaaataatatgaattatgtccatattagaaagctgaaataatacctagcattatctttctatgactaaaaattcagcaatgcatactggatagcagatcgttatcaaaatgacttatgattcttacacctatccattatggctggttactgttattgctattttatgcattaaaaatggaaaacaaaacaagtgacagaaatgatatgaatttgaggtaggggctatgtttctcaggtccattttgtttagtacttccaataatatacaaggtgatatgaagcttgtcccatggatttttcaatttcttgggaaaaattcagagaaagggtcctttgaaataaaaataaaattaaagagaaaaaacccacaaagtaatataaccagagtatgaattaattttgttctttatgccaaaaatatccaaagcagtaaagaacacttattaggatgcaaaggtaaaatttttaggaaactgtattaaggaaaaatgacaaaataaaatctcacttctcacattctaaaaactgaaggaaactaaactgacttcaacaaaacaagcaaatataaatagtacactgtaactctcaggttgaatggtttaaaaaaaaattcctatctccagcaaaacaaagtttagtctttctgttcatttaggagttgctgttcttagagacaactgatcaacaatgattcctcattatccttttctgattactaatgttcattacaactattactgaacactacgctcaacctcttaaattagtcttctatttctttccaggaaattgactcattgagctgttttcctctcattcttgttgctgaaccttcttttacactgcctttgtcttcaaatcatctcatgcttctggtattaatacacaactattctcttttccattcagattctccccatacaaaaacaagaatgtataaataacagagcaattgttccattagctcttttaaatatacatcatctgtatggatgcatgtattcttttgagacacagtcttgctctgtcggctgggttggagtgcaacaatgtgag

SEQ ID NO: 318159 - DNA, 4001 bp, Homo sapiens
ggatttctttgtctcccacatggtaacttgatgagcttattctttttgtatattcagtggttggatctctataagttgtagccatgacagtgacagtggttgacaaattccagcagagctgaaatccatggactgcatctagaatatcctctccttgggtgtggtcaggactgtggcataggatggagtgttcccaccgaccttggaaactgcccagccaggaggccagagcacatattcgggcgctgcattcccacagattgccagagagaccaacggttgtgagggatctcagggagtttaagatcttggaatcaaggctgtttaacttgttgttatccatgaggagtattttaagattgggcatcgtttcaaacactgtcaagtcgatggctttgatttcatttccagtcaggtctagcttttctaaagtgccccaggtccactccatcccacatgtcaagttgctgattttgttccattgtaagaagagcgtgtgcagactgcttagccgtaggaaatgagcaaaattaatcttcgtcagctggttgtgctctaggtgaagctctctcagtttaattaatcctgcaaatccattgcgagccaaacttcgcaaacgatttgtgctcaaatccagaaactccagactacgacagtcccagaacaggcgtactgggatagtccgcagggagttggaacgtaaatgcaaggtctgcagcttccgaaggccatagaagagctctgggtgcagagatgacagctgattaaaagacaggtccaaattttgcaggttaatcagttgggtaaaagttgtgtttggcaagtaaaatattttgttggaacttaagattaattccttaagtttatatagtccttgaaaagcatcttcttttactgttgaaatttgattgtgatctaagtggagccaagtaagttgactgaagctggcaaattgatctctttcgagctctgtgatgtgattgtgcctcagggacaggcccagagagcccttgtctgtggcgtttggcactgagtggaagccctgagagtcgcagtagaagagcagcttctcgcagcggcatttgggtggacacgccatacccagggcaggcagcatttttaaaaccatactcattgcatatattgctgccagcataggggcccctaatggccacttgaaatgtaagcctgcagaatataatttaaggaaaacaagaagataggatatttttcagcagaacatatgggctatttaaaaaaaacaaccaccaccaacattatagcaaaagatttcactgcatataacttatttttcatttactgcagaaaaattaaccttattggtatgactggaccaaaacttaagccatttaaaaagaagataaaacatgtctctgtcatcatcgatatatgcttttacctaaacctcaaaatccaaaatatgatggtgatttccctcataaaatgtgaattcggtagcttattttaaaagcgtgattccttgttgaatgtacaagacatataaatgcacagacttacccattcttctgagcacattggaggctgcattcagtcgcggttgttagactcaacgcagtgagtctgtaaaaggctctaacatgtaggagcctttgaccagtttcctgttttctgtgtcccaggctttccaagtaaaattgaatccaccaggacgagttgttttttccttaggatatccctctggaaagcattggtttcattttctgtgattgctctgatccctaaatcagttttgaatataagttattaaatttctccacctctaactgctcagctggttaatcaaagcttcagtctcctttccgcagccgttagttctcttggtcttaacttgttgatggcagatgggtggcttgttgcagagaagagctcctggagcagcatgagtgcatttactgaaaagcttttccgagaaacggcacaagaatggatttgcttatgtgctgcgaccacacagaactgtatataggctgacgtcaccggatgacgtgtcttttgtttgggttttccagaagctttactgttataaagcaccatgctttgtaacagcatcggggtcgttgcaggaccccctgattacaataaagcgagaaagaagaactcctgacttaaaaacatgatattccttcagtgtaggaagcagcagtgaggttgtaataaaggctgcattcaagaagacccatctgaacagtgagttgggttagcagagtgatgatttttaatgcttgtgagagccagtgttagactgccgattctgcatagagagatcatctaaatgggcagaagcctgcacaatttatgaagtgctgatttaacaccagcctatgcaaggtagtgtcgctgcactggtagtttggaaagctattcagttgccttgttgtcatgcttggttaaaatcaaagtatgactatgatttgctttagatgtgttgataaactagctaagtgggcttggcttgtttgtcatcaagagcttaacattataaacgaagaataaagggggaggggaagcttgcaaaacaaagcatgtggttatttttttctttgagaatttcaggggaactctaaaaagatttctctttctcctattttataacaatgttttgtcgccatactgattgaaaaaataatgctgagttgatctttaaatgtcctcctgggaggacaaggcaggttgatacagtcattttaatgcacatgccctaacagcaaagcagagatgatttaggacaagtgataccgtgtagctggattctgacatggccccttgtattttacctcagaatctcacctactccataactaaaagcctccgctggtactgaggttggtggttgtgacactgaaataatagagcatttgcaccctagttcccagccaccaagtggctgacttaactgagcctactgctgttgttagaacctgtcttgtgaatacaaaaggtcactcatgctttggactgggatttttgttttgacttgattttgcttgccctaactccagtttctccctgttgaatggtgtcttcacttttcagacctcagttgtggatgtatagctccatgtttagtgttatataaatgcaaaagatgtttctagatgttatattttcaggcctgacaaaggtaagcccttttctacatcttgccttattgatttgacccaacatacctatttctcccatatcattggcacttaccctttgtgggtcttgtctcagacctaaggacagacatctttaaaactactgatggtgtctgtgaaacaagaacatcgttggcctttttggttctgagggattcatcccactgggcagatctaagaagtaattgtcttgggtaaaatttttctgttgtagtgttgtgctggagtgagagctgtgagactccaaggtcccttccttagggctctgtgtaaaggtgctatgaaaactgcagcagtgcaggtgtgtggtttgagtcctcctagaagtgatcccaaggtagaattagaagtacaagaggcaaaaatgcctacgaagtacaaagggagacagaaggcagcaggaatgctctgagagtcttcgtaccacagggcaggtctgacacctgtgaagggacagaggaagcaaagaagatgagattggcattgtggttcttagacacattttgtaggctgaatggaaattcccaagccaaagttgccagtgaacagactcttgagtccttagtaatgagcctgcactagtacgtcctctttgttccttcttgctggttaaagaagggaaggaaacaagtcctggtttagacccggggaatgctactccccctctgaccttaatccttcctatagtctctctcaataggctagaacttcttaacctggttccataaactgtcttgtgaaatttttttgcttgttcatttttctgtggataaggttgagtccgattcctacagggtctctcaccctaggtttcagagc

SEQ ID NO: 318160 - DNA, 4001 bp, Homo sapiens
gatcttgattccagggatatatacttaatcataagaagttgacaaagctggtcttcacacactgtcataccattacagtaaagtgctctatagggaaagctaaaaccacccaccacatagcaatacacaggaatattcctttcccttgacaatcttggtagcaaagcaataactggtaaaatagaaataaatgttgcaatgagacttggagtgcatttcaactacctaatggtggcaaattgcataggcaaattaaggtcccccaaactgctctcattttgggaacaagcatactgtctttgtgttacagccaggcaagcaggccggggtaaatcctagcttgggcagggatgctgtggcatggtaagacatccaacgaaggcacacggaacagcacagagcgtttcaggatgttctctcttaataaacaaatttctaggaatgaagcaaaacagtcccttgcttggcacacctctccatccaaaagacagtgacttaataaggtaacaatttaattatcaggatacagatgctttgaatggctaagtaggtcattgtgttcacagggcagatgtcagaactgcttgccagatgacaaaagagataaccttaggctgtttttattccatttatacaagacctaactcacacattagagcctctgctgtttacagctttactctaaggatctatgaggaggctccaagaaattcccttgtgccatttacacctttagaacttaaaataacctgcacatatggtaatatgagcctgacagacacagtcctgcacccagccaggcagagtggctgtaaaacagcgtctgtgttttagtggcattctgtgcctgctgcatttcagcacttgtgacttagtaatgtgaacatatgtgtatcaagactctgcagcccttctgcttatcgcactcgagaaggagctgtcaatgtacaggggttatgggattatgcgcctgtgctatctgaacaaatctccccacactccatccgatcatcctcaaatcccactgaccaaatactctccttcccctaatattggctgtgcgctcccccacgtctcccgttttccgccccaccttacctctcactgtggtctctaagacctctcatcacctctgtagacgtccctatgatgtcccccaaactctgtagccccgccacctctccaggtcctccatcaatcctgtagaccctctcggcaggctcatcacctctgtgacccttccatgggccccgattaccgctgaagacctttcccacggcttcttatgaccactacagccttaccactctccctctgttgctcctacagccccttttcttactcagggtgaccctccccacgccctcattacccacattactcaagcagatccaccccatagtcactgatgatccccgcaaattttcaccaaggcgctcccgcaatacgtgcagacccgcgcccggccaccgccgccccgcagacgccccctcggcagccagcttccggacggcggctgccccgcttcccgcccggcccgcggactcacagggcattcgcgtgagcacgttgcgtggcgccttcctgctccgacccggacccctccggcccgctcctgcggccccgtccccttcctctttggccaccatgagacggcggaggcgctggatgcgctcggggtccggggcgggcgcgtccgggcggcgacgagtcctgcccgagggcccgggtgcggcgggaaccccagagcccgcggccgcgccccgagcccgcccgcgcccgcgcccgccgccccggactccggtcctgaggaagctctcgtactccgccacgttgttgaagcagggggcattggggtagggaatgggaggcaggcggggcgcgtacagggccagcagcgggtcgaagctgtcagagctgacatccagccgcgggctgggcgggcgcgcggggctcccggcgccagccgacctcgccccccgctcccgctcctccatgtttgaaaggcccgcaagccgaggccgatgggaagaaggaacgaagccgccagagggcggcactgcgcagccgcggcgcggggttgcactgcgccgaagcggccgcgggagggcagcacctgtcctcgttccacccgggccggggggcgtggtacgcggctccgaccagcccgcgcctcgcaccgcctcctcccatagctgacaggttaacgctgtcgactgctgcttgacctgctccagcgcagtttccccgtctgtatcattatcacttagggtgtttgttaatactctgggttccccgggaatgagctcgggatcgcatcctagcttgagctggcaggaagcgtctggaggaaggcaatgaatgtctcagtttgcttccatgctgagtactactgatagggtgggaagaatagcctatctgggctcaaagtatttagcgtgtttctcgtctgaaatatgatataaatagcacctaccttatagaactgacctcaggatggagagatactgcctacagagctcataatagatgcatgtcagccaatactgggtgtctgtcctccatttcctataccctgtgcataaacaaatttgtgcttagtatcaaagaaaattcattatatcactgtctttctaagcattgctaaccaattggaagaaacgaagatccagctcttggaggaaactatggaaaattcccaagacctgatcataccacttgctactttatagtctcagttcggcaaaatattttttggttgattttaaaatgacagtctactcttcgcggaaggcccagatataaccttctcatccagcagagccaaaatgtttccactcacctacaggccacacatcacttgcccgtcaccacattctcaaactgccatcaactagtattctctgtactagttgctttgtgtacatttcagtttccttaagacttaggaagtccaagagaatactggagagtaccttagagagcaagatgaaaattaatatacaactctgaaatataccttgggatgaatgcatactacagcgaagacaaaaccatcaagcaggccgggcgcggtggctcacgcctgtaatcccagcactttgggaggccgaggcgggtggatcacgaggtcaggagttcaagaccagcctggccaagatggtgaaaccccgtctctactaaaaatacaaaaaattagccgggcgtggtggcacgcgcctgtaatcccagctacgctggaggctgaggcagagaattgcttaaacctggaggggcggaggttgcagtgagctgagatcgcgccactgcactccagctggggtgacagagggagactccatctcaaaaaaaaaaaaaaaacaaaaaccatcaaacagtggcttctaattggtagcagtacaggtttctttatggcacaggttttgaacccagcttatcactttgttcaaaaccccctgcctgaataaaaaactcaaagctgcagaattgctggcaattcaacaaatgagcgctcatccccacatcatatggcaaaactgagtgatagcctttatagtgtcatttaagacccacagaaagcacgtttctctgggtggttttcttgaaaatttgtactctaatgcctacttgtattttgatataaaatgctgtcaacttaccattaagttaaaattgccaatcaacagctacattatcttacttccttcccacccagcctatcacagtataccgagggccttgctgccgaagctgctgtatattgacaaccacacatatcagaagcctttggggctaaaaatcagattgctggctgggcgtgatggctcacacctgtaatcccagcactttgggaggctgaagcgggcggatcacgaggtcagcagttcgagaccagcctggccaatgtagtgaaaacccccgtctctactaaaaatacaaaaattaagccaggcatggtggtgcgtgtctgtagtcccagctactcaggaggctaaggcagg

SEQ ID NO: 318161 - DNA, 4001 bp, Homo sapiens
ggaggcgcgcgaacaggtagaccaggccgcacagggccgccgcccctgcgagaggtacgcacgggcctggtgagcgccctgcgcgggtcccgggggtccagcgcgtgcgcccctgccccacaccccgaccttcatgaaagaagatgccggcgacccagagcgtggcgaggaacagcgggaagtactcgctgcagttcaccctgcggtgggcgggtgggatgagcgcgccggccgggatggtcctgcgacccggacccgcctggggctcgctccccgccccgcgccctcccgccgcgcctcactgggctcggtagacgcgctcgaactcgggtgggccggtggtgagcggcggcgacacgcggaaggccctgcgcgccgagatcacctgcagggagaagtaggctgggggaggagggggagcgggagtcaggtctggacacccgaagccccagagatgggagtgggagggatcctgcaatctggcccttcacttggccgtgtcctctcctccctaaggcggaaccccgccccctccccgcccgaggagacctctcgtctcacccatccctggcctgccctgtgtccctgacattcagcgaggagggcagggctgaagcctggggcgcagagaggccctgtcccaacctgtgagtgtatgggggagggtgagtgattcaggcacagggacacctgctccgcgagagagaccacttgagtccttgtttctgaatcatttcactctcaaaacacaggcaaatgcagctttcaggtccctggccaggaagtgcctcgggagtctgagggcagagctggctgcatcctcccaggtgcaaggaagcacactccctgtagctaacagtccctggtcacccacctaccagcgcccaccagcagggccctctgaccctgcctcaggccgggatcactaaagcctgcgtccctgtgcctccaaacctcagtttctctgttcctgcattccggtcccaggcctaaatctgacagacaccttctctcctgctcccaggaggttgcagctgggactctcctagcctaaccccaggaccccagggctggggtagttgcagagggtgggctggccctaaagtttctctgtgggcaggagcccttctcttggtcaggtgaggccaggccagaccacacacagaccagtgctggctgtgcgctccctccccagacctcccgtcggaccatctccccctgagtcctgcagccctggcacctttggttctgggccctctgcagatgggtgtcacagggtggccatccagctcagtgcaggagcagctggaggtcaggctggcctgtctgttcagccccttcagagccccctccccaggctgtgccttatcctagcccacacactgtggagtagtggtgtctcttaggtggcaaggatatctggccaaggaatgtgtcctttagggccagtctgagaaaggcattaagcaggctctttttagggggctggaggaaggagtcccacctctaccctgctccacgtggtcccagtatggaggtgcctttgaagcagagccagggaatgggggccgcttgctgggacgcccagagaggggacagctggaaagagcagagatcagcttccccaagcccatggctatcctaccatttgtcctggcacccttgccacccccaagtcctacagctctcacagccaggtgccccccagttccctgaaagtccccaccctcttccagcttgggcctgggctggagtccccacctctgccctccacctgggcctagggggcagagggcaagctgtagggatctaaggcccaccctcttcctagataggaaccagcccaccttgcagcaggactcccaggagggtgacagcagccagtagagctacctcgtccttcatggtaccgtcggtgtggtggcacgggctgtgtgtgaaggcgagctggggaacgcttagccccgtctgctgctcagaggacggcccaggagaggaagagcagcctcggtgctctccccgccccatctcagtggagggggtgcacgggggtgtgaccataccacacagagccagggagccaggccaagccagcagggaggaaaccaaagtctgggcaggggagagcagctagctggagaccgcctcaccacttcctgcttgttcgtgccccttccttgcctagtcccgcgtggcagagcccaagctgtccatctgggtcagctccagctgtgggtgtgccccctgctgcaccaccccactttctccagggccttgcagacccccacatcatgctggagccagccccaggctcccggctaactcctccacccaccttatctgttccctgtccccatccaggctgttcctggcaacccctgccaaaccctcctctgcggaagcccttcccagtgcctttggcttcagaatggagtcccagcgcccccccagccacactgggccccacaagctctttctccttcaggaaacctcatgcctgccagccttagtcgttgtaggggttccatgcacaagggccaccctgccaggaggaaacctgtccaaggccccctgggtggcgggagggtcagcccttgtgggccatccctctcccaggcctctcttgggcctcccacaacagtcacctgctgtgtctttctgccccgcagccctcttgcctcaaggtaacaaccctccaccaccttcctagacggctgccctccccacactcaggccctgtggtctggacagtgctgactcctgccccttccaggcctgtgagatggacactgagccaaggctgactcaagatggtgagatgtagttctggaaacttccttaggactttgggacaggaaactcagagtggggagggggactacggcgggccaccctgaggacagagcccacgcagggccaggtggagaggaaaggtggcacccgaggactcctgcctggagttctgggtgtctccctcgccccgcctggagcgcccccggccgcccccctcgccctgcctggagtgcccctggccgccagccttcccagttgggcctaacggtcacttcctcttttggcttgagtgggtttgcggtggcttttggtcagaagtggcaaagtccagactgacccagaagcacgggcaggagctgggggaggccacaggccgtgctgcaggggtcgggccgcatggttctgccctcgcacctggtccttccttgctgccccaagctcagctccagcctgaggctcggagcctgttgggctctctcagaatcccttcttcctcctctgggtatcgcccctgcccccggaaaccagatatgccccagctgggggctctgtgagctcctccagggcaggggccagggctcaggcccggcccctgctttagaccaagctgtgacagtcatcttggggctcagtgatggaggactgcctcctagatcccggacacagatgtagtgccagggagcgatggtggccgcgtcctcagactctgcccactcagcctccttcctccctgaaacctgccccacagggcctgcctgaagggtgggatgcagcccaccacgcaggggttgacgctggtgccagtgggctgtgcccagggtgtctgtgtgcaccacgcatacatacctgcatgccccttggtcagttgtcacacacccatgtctctgtgcttgtgggtgtccaagtgtcttcgtgagtccaggccctcctgtcagccaagctctcatttcctccaaggcctgaatgtcctcccgtcggagttcatcccctcagtccacagcaggaagccaaagcctaacatcagcagcttctgaggaagtcccttggcagatgtgcagggcagggacctgggtcttggccccgggagccctccccgggtctcttggttcccacctccctccctctgagcctgcccaggctgtcagggccctgcctgggctcaagccagctcaagctgacaggagggccagccaagcccccacccctgc

SEQ ID NO: 318162 - DNA, 4001 bp, Homo sapiens
ctgtattctcttcctcatttacttatactgattggacaattcaggcagtgtagatgaaaagtggattctttatagtcagatgagtttgaatctgagattgtcacttaatgtaagcttggacaagtaacagcctttttgcctcaattttcttgaataatggattaattttaagggttataatttctgtgctaggtttcactttcctatttttttttggacgtaggatcttgttgtcacccttgttggactggtcacctttgtatcttcccacatgtagcataagtgccttctatatattgtaggctctaccaaaagtgtttttggaatgaatcctacttaattccatttgtatccaagttttccaaccaaatccccacttcaaggactttccatgtgctagttgccttttctagaatgcttttttctcttctctagctaatttctaatcaaacgtcaggtctgaacttccttgagagattatttatttatttacttattttttgagatgaagtcttgctctgtcacccaggctagagtgtagtggcgcagtctcggctcactgcaacctccacctcccaggttcgagaaactcttgtgcctcagcctcccgagtagcgggattacaggcacccgcccctatgcccagctaatttttgtatctttagtagagatagggtttcaccatgttgcctaggctggtctcgaactctcgacctcatgtgatcctctcgcctcggtctcccaaagtgctgggattacaggtgtgagcctctgcacccagccccttgagagatcgtatgtgaaatcctagttatatgctcacaaaacactgcagtttcaaatcaaagcatttattacaactgtaattaaataactgtttaaggtctccccacctgctagatttctttatgaaggcaaggatgttcagcttattgttgcatccactatgcttagacaatataggctaaatgttggttgttggctataataatagctattatggacattcaaataaatttttgaatgaataaccctgagcaattctgtttctattggtgctgtgacattatgtacaaaagtacatgaaggctgcttggtggttcccatattattgactagacataaacactgcttttcttcaccatattatagcaggctatttcctcatgtttatgtttcagccagtgacaactacagatcccaattggccatgctgatgttaaacgttaaaggatggctgccaatgagaattgtgcgccgggcaggaacgtgcatcatgcttgggcgtgagaaatgaatctgagaccaggtaggtactcagagaggtataatccgagcacagccatcacatcccaagctcattcagtgagctcaggtctcaccagtccctgctctgtcttgctgttacttttgacaagtaactttgctggggttcggtttccttggctgctagacttctgtgcaccttctgtttatctgaataaactttcacctcattgaactgctgttgctcaggtcagcctttggcgtctcctatacttcccagggatatgaaatgggtccctcagacaaatactcggtctgaagatgaaacgagggcagaactcaagtcgcagatttgtatcatggataaacactgagtaccaagttagtaccaagaagtaggaaccacactggtgcctcccgctctcctccgcacgtgcacaaaccctcaactgcccctaggagttggtcatctggcttctctggggtaacagccacatcctccataaagggtcaggagccccagcctccagagactccagacagttttctcaaggacgcgaacataccctccccgacggcatcgtacccaccccttcccgggccctgtcaccttgactgcccgtcccatggctctcctcaccgcggccgctacctccagagcagtcgagtagccccgcctctcagcaaccaatcaaagactgaactgtttccagccccctgtagtcgcgttactaatgcgccacaacgaatcactaggcagcatctcccttttagccccgccctcctccaaaggacggaggaggcgtttgctaaacgggcgtttgctaaaggcgtttgctaaacggatgggaactggtaaaatcgcgaggagccgcagagcccaattactggccagaagagaacggaaatcacctggacgccatgttagttaggggcacagtcacttccggcgcagggatcgtctgctaggcggactaggtttgtatatagtggatggcgtcggcacccgcgttttgttacctcctgtttagggtataggatcgtctgtaaaagaacctttattttaacgtttcccagttgcgactatctctttggaaatgtgcataaataaaagccaagtcctaacagctgcagcgggcattgattggaacactgactcctaaaaattttatgcgtatattctctcatttatttccatagaaggtgaggttaaattactcgctgaagttcgcacatttagtaaatggagatctgggatgcaaatccgctatgcctgaccgtaaagcctagttttaccctttacattttgcctattcagctctctctactccttggttttgctgataaagaggtcagaaatgggtaattaatcagcagcatcataattagaaacaatcataagtatttaagtgcgtttcaacttatgaccttgcaagcatcaagaaaaaactctgtagtcacgttactaacgcgccacaaccttttcctattgttcctattgcataattgttctccttccctacccgtgtagcctttcaggttaacttttaggtaaaattgacttcttattaaaaatgaaagatctggaccaatggatttccaaggcccttttctttctctgtgatctatgttattctaaggaattattgcaagtcattctgagaataacaagataatcgattttttaaaattaagatgcattcgatttgcagaacatttaacgtaatgaagcgattaaaccaagtatactggatattgtcttttatctgagaaacaataaactagatgatcttggaccttgcattgtgttttctgaatgctgacggtgatttaaaagataccccgtccccgctcccccattttcagtgtagactcatagtgcagcttcctgaaaattcataacttattgtgatgatttcttgctagctactgtcctgaattcagttaaccaaagtccctcatctgctgatactttaaaacagttctataatgacagaatcagttcagttctgtggctcctcttttcttaaataaatctgcatgtctcctttaactgttccacatatgaggtgggctcttcactattctagttgttctgggaacatggcctggtttgtcttgtcaccccaaaataatcaaaaggctaaggatccagttaaaaaggtttattcaactgtaaagtgtaagggcagtcatatgggaacatgtagacaccaaagaatgctgatcagtgcttccagcgtaaggaaaattgaagatggtttatataagacaaaatggagatgccaaacagaattacaacattttccaaacaatggataacatccagatttaagatctgattggctagtattgattacactctaaggtggttgcttaatattctatcgtaaaaaagtaacaatcacaagggtctacagctctaatattatgtagtccaggtttgaaacgaagaatagggagtctgattaatgtataacatctcaacacaaaggtcgggaagcaacaatagtcatgcaccagagaagaaaaacagctgtattacatgactcagttttcaaggcttaactttgcccccttggcttaataaatttggaaggttctgaaatttcattgtctttttaaagtttgcatctcaaagtataagtcgcagaactgaacaggaaattccagcatgttcatcatgtaagttcacagagctatgtagtaggcagaataatggcctccagaagata

SEQ ID NO: 318163 - DNA, 4001 bp, Homo sapiens
tacaagaacttttgtgcacaaatcatataaaattaccttccgactatgtgtataagttgaatatgaaacacaaatttcatgttcagacaggtcccatccccaatgtatcttattatgtatatgcaaacattccaaaatccaaagaaatctgaaacacttccggtctcaagcatttcaggtaaggactacccaacctgtactttctaggcatatacttatcataaaatgctttaaaactatttaatatagttgaatccaacccttgaaaagcactttctgaccttgctctaatggcaatattataatgctttaaaagctcaagagttcctattcagataacacagataactaatagctatatgttaagtagattatttcaactgttctctgaagtgctacattattaccaagaactaggattcctaacttgacagctatgaaactaaagaaaactatcacattttatatctcaaaagcagttttgaagtcatgaccacatcttttcctccaaggataacagttttatttccactcatttaaccaggtctttttttaatcttgtgtctttaacctagggaatgtctttgaatcctgtagattccaggcaaattttatacatatgtatatttttctggggagaattttcattgcttcatattctcaaaaggcatccatgatcaaaaaagttaagacttaatatacagcaatttacacttggctataccgacctacttatgtgtcttgttagacagtttcaccctaataatttgtacttagaacttcaaaattggcttagtagtgcagctaactgaaaatcactaagcaatgccccaaagccattttagatacttgtttctatcaacctctctccacgatatatttctaaatataatttaaaggtcagaacttcacctgtctcactatctctccactcccctttataatgaaatgcaggcagctgactatcgtgttacaaatctgggtattctgaatgatcaagaactggctgtgtcttcaaccgaagtgaacagactgacccaggcgatcactccagtctactactcagagattagaaaatacataatatttaagtcatctggctcaattctattcacctctcttaattctcttagagcaggaaaaaggcacgaactccctttcagaaacttggaacaagcctgcgtgctacctagattacgaggggccacaaaacagtgttaaagcattcttcagctcagtctgtaactgaaaacggtttcccaaacaccttcgtactgtagaatggctgctgggtgtttcgccttgaccttctttaactaagcaaggtgcaataagagggtcacagggcacaagttaaagctgcaaagggacagaatcaaaggcaccctatccgctgccagggacaattttgttttttaaaacttaactacctcctccctctgtattccacacgtcaagtttttctttccctgctatcgtcagcgaagattacgtctcagagtcttctgtcacagcatgacacttgaacgatgtgacaagatgccgtcagcgaatatttcacgccaacataaagtcgtgggagaaatgctgtgtttgggtgggaaattagctgcccaggtaatccagcaggtaggcgtccttcctctgagcctcagtttccccgacagtgtgacaagagggcctggcagggctggtctggaagttcttccctgtctcgggggtgtccgccacacgggccgagcccggccctgcagcccccaccacacctgtggccgaggctcagcgcctcccgtgaggacgcagctggggctcaaccccgccctcctggaccgggctaccctcacctcctgccaccatctttacctgtccccgttagcagggagcactctgcgagaagatggccaaaaggtccgccgccgccgctgtcccgggtaagttcatggccgagcctctgctttgggctgaccccgtccgcctccgcctctgccgccaacgtctccgccttccgggccgtacgccgccgccacgtccgcaaacctgagatgcgtcatcgcgtcaagtgggcggaggtgggaaggggcgggggaggacgcggagggcagcccaaaacgggggagtccaaccacaggtccacgcccggcacgcaggcgcagggactcctccggggcccgggggcgggtccaatccccgggcccgggggcgggtccaatccccagccccgcccttgactccgctccttccgtgccgcttcactccccgaggaaaagatttggtggccaagtcagcggatccaacccgcgaccaccagcgacctactggctgcgtctttgtccagcgtccacactgcgctggcagagactgtcgggtgcaccctgaggacgaggcgtggctcaggatgtgtcggggagctgtcttgcatttttttcttgctgtgcatctcgaattttctttagggtgggaaaggacacctcaaaaacactgttgacatcacggtttcagaaaattgcgccatgtttgttacccttttcatgctgaagactccagactgctgcagaagaggcagaattctggagagaaatccttgggggaccgaggacgagggttggagggggttgtctcacccttcctgtttttaggtgagggaagtgagccacctagagtcaggccccaggaaatgttttccctggctcgaggagtcaagggagtcaacaaattgtaatctaacttattttggtttgaaaattaactgagtcattggtagtcaccattggactctatggaatattagcttattaaataaactcatgacttcatacatgatttttatcacaaatgtgttaaatgagtatcataatgtgtttgaatttatgtatgactttggcaaaagccgcaactacttttgcaccaacctaattaatgaatgtaaagcattttaatgagtctgatgtctctcagtgttgatattagagacgttgcactttgacaaccatgctaactgttacgacaatatccattttaggcacaaatagctggggtgcagggtgcagagcagtgcttttcagaatgtctgaatatttatacattagaaagcctttgaagcttggttttaaattgtttttcaaagagtatgtttttggttttctggtaagtgcctctgcaaaggttaggagttttgcattgcaatagttttcttttattagcagggataggcactgtgcttcccagcgccacaaaaaaaaactgcaggagaagacttttttaaaaagtttgtctgaattgttctgtgtgttgttgccctcatgacacccctgtctgtaaccatttatcactgagacgttctctcatcagcagacaaaggatatattccctgcttgatatgtaggacttcggctgcttagccctcatgaatgttaatgggaatacaaccttctttctgtctataggttacttttcttattttaatgtcaatagacagcggaattaatgtgagagccaaagtgatagatttcaagcacttctataggaccgatacctgtatccttcatataaataactttctcaaagatatctgcatgctcttgaatagttatttgtatttaacaaggatgcaaatattaaactttttataaaaatggaagaataggattatattttattattagaatatacaaaagaagcagttagcgtgaattttggccaagttccaaaaagccggccagtaggaacaagcattttgtctttgagaaaaaggatgtccccagtgctcagcagagccaaaggatttttagtgtttcaagatttcacctgacacagtttctgttaaaacgctatagatgaaagaatatgtcatttctaggaatatgtgttttagtcactaacgtttagtttttgtgagttgccctagagtagaagttgtactgaagtgagagtgtaaattgatgcaacctgttaggcaatatctatcaaaattttaaatgcaactgactgaactattacattgc

SEQ ID NO: 318164 - DNA, 4001 bp, Homo sapiens
gaaaaaaaactttttttatttagccaggcatggtgatgtgcagctgtggttgatcccagttactcaggaggctgaggcgggaggactgaggaggctgaggcgggaggattgaggagtcttgagccaggaaggttgaggctgcagtgagacatgactgtgcctctgcactccagcctgggcgacagagtgaggggagggcagggaaagaacacggggcgataataagcccaacatgcccctagtttacagatgagaaaagtgaagatgagaaggcttgaccagttgatacaataagcaatgaaatctgagtggttttttttcttctaacccagcaatcgaggctagtgtggaagagaatgagaaaaataattcaaccagagcagaggacctgtgagggacattaaaagataggttaggtcagactggtcccaaatgccaaactaaagactttgaacttcatcctttcaagcaagagaaggatttccagcatttcgagaataagggagaaagaaactaaatgcctacagactggttagttagctagggacaggcactgcaatagcccaggtgagagataataaaggtatgaatttaaaaatacacataacaaattagattttaacattggttttaaactaaaatccccaagaaaaccactgaaaaaccttgtctcttttgtaaatctgtttcaggaagaaaaacctctaaccaacaaatttcaggaacatttactgagagcccaaagggagtaataattgaccaacaatctaacatcatcagagattttaaacaggcctgataaattaaaactagaattgtcaacaatattgcaggaatctcaagttcacaaagttcaggctacctaaacaaggaatacttatatgcaactcattgaacattttactaagttttccaaaaatttcttgattttccattcagaggagtttcagttggtcaaccaaaggccgacttatttccacatgaaagccctgatcctgctcacagcacaggatcttgtaaagggcaaggacccaataaacatttgcagaataaatgaggccaggcctacggtgcaggaactccctccatcacaggcgactcgaatgctagtctatttcgaataaagatctcaacatcccggaatcaagtctggaagaaaaaccctccggttagcgttcgccagccttcccaggtcgggcctcctgcaaggccctcaaggcgctgttttcccaaagtaacgccaccgtgccacttcccaaagatgacaacctctcagctccctgccatgttaccctctctccagccagatccaggagtcgcggacgcctggggaagtctcccagcggcccgatccgcgtcagaggaagcgttttcgggagagggggctgccgccacgacaagcgccttcccgcgccctactcaccgtggccgggcggccgtgctcggggccgtcagcggcgtccaggcgcggggccggggcggcgggcgccggggccgtggcggcgggcggctgcctgtgcttcccggcgcgcttggccttggcctggatgcagcgctggtgcagggcgaaggtgtgttggcgctccagctccaggcgctcgggcgacacggcctcgtagcgggcctcgcaggtgctgtggtggcgccggcacagctcgatgcgccggcgaaggcgctccatgaccgcgctgtgccgcggcagcgcgaactccgccatggggcaggtgggcagcaccatgggccgcgggctgcacgggccgggcccggggccgggcctctcggggccggctggcactgcgggcttcgctccccgcggctacccctctccgcctcacggccgcgccatgcccccgagggcagcggagcgggctcgcgcgcggcggcgggttttcctcctgccccgctcggcccgacccccagccggcgcttgctgcctacctcaagcctcggcctctccccaccgccccggccccattgttttccgcgctaccgccgcggccgccatcttaaaattgttttcgggcctctcggaagaaggcggggcctcggtaagagaccttgtgcatcacgactgatgagcaggggccctggccaatcagagaaggaagaaccggccgcccgagggcgtggggacgagcacgcaagaggcgcgctcgggcgccagagcggtatttaaaaggaattctcaagcgaagggcggagggaagcccctgggcgggccttaatcctgggggcggagctaagcgtgactgacaggagcccgtccaagaggcggctattggtttcctgcacagcacccgctgaaggcaggcccttccggctaccccgagaaaaggggaatctggcaggcgagtgcggcgcagctggccagtccctgtcgcccgcctggcagtacagagaccttttttttaaattattttttaaatttcgactttgataaactctaagtagccacgctattttaatgtcagccgttttactttgaccttattccttgtatccagccccataattggtcagaatcgtctagtgagctggtagtttcctcttgcaacattccgaatcactggtagtttccacctatttgtaaaagcccgagcaagtttcaaaagtgcagtattactcactacttaaaaaaaaagtccagaagatgtgagcaaaagcatgcaagagtgcagctccattagagggaactggaaatgcaaaggacgacgtttcaccacaaccaccgccttccaggctcaagcgattctcctgcctcagcctctccagtagctgggattacaggcatgcgccaccacgcgcggctaattttgtatttttagtagagacggggtgtctccatgtcggtcaggctggtctcccactcctgacctcaggtgatccgcccacctcggcctgccaaagtaccgcgattacaggcgtgagccgccgcgccggaccaaaaacagtcctttaggtaaaactgagttactcaacaaaaccaaaccaagacaaattatgccccattattaaaactaataggcaaaggggagtagagggactggagcaatcaaacagtgttagtactaaaactagatagtgtgatgccaaaggatatcaggaactctagatatgggcactctaattgctaaaaggttaagcaggaggtggcaggaggctgcacattgagatacaccatcagtagttcaaacattcgttactctagctttttactagggctcatgaggttttattttaaaatcaagagaaaacaacaatcaaatatgtcttcatacaaacgcagcagaaaaatacaaatcctaatgttttaaatggagaaagtgggccaccaaggcaaaagtgccataatgcagtcctgcttttttttttttagcattcaaacaaattttacaccagaactaaactatttcttaatagaaaaaatagtaactaggagcactacattctgtgtacatacttttctttagtatgtaatctaaaaatttaatagcacataaaaaactgggctaactttcaaaaatacccctaaagtatttaagtatatgtaaaataatggagtctgattctgaacaaataattttctaataaaaatttcaaagttcaatggttcccctaagtcttaaagaatattatctacaaattatcagtagcattccctccttttctgagctgctgtccacactattatacaacagaaactactgcaccgcaatcacatgggcaggaagaggcaagggctagacagaaaagactgcatcaaactcacgtggtgagataaaagtcattatttcactgtccataatagtttctgcctagtagtgaactctcacatagtggccaattatacgaagatcaacccactaattgaacatagtcacacacacacactgaaggttactatgaagaaattcagtcaaaagcagacacttaacacagggctttaatgtaacaccatttagtaacatgacaaattgaaaagtgaggagtactttgtggat

SEQ ID NO: 318165 - DNA, 4001 bp, Homo sapiens
gtaacttgaaactgaactcgcacatgccgcgcggtggatacccttccaaagggaacagactgtgtccgctttgcttatttttggtaactttaaataagactttggatgggtcgtcttcccaactcatttaccaatttaaccactggacgcaggactgagcgccccacagctttcggccggagtataacacgcgcttccccactcggttccccctgtctgccacaaacaaaccagatgtaatagctgaagaatgacgacactaaaatcaacctagagattcacatctaaaagggccgcaacacgaaataaacttctctctcttcagaggcagcggggaagaaaaagaaaaaaaagcctaggtgggttcggtttgatccatttccgcgactccgtgcgctcaggggctctgggctggtgcgggcggcttaaccctgtgagagccgagaacgaccccaccgggatacgcgggccccgggctggcggggggtgcctcacgccgcgcccgttcccccgccagcaggtgcccgaagccaccccaacaggccgggtgcgaatgccggaacatggccactttcctgagcgggatgatgccgccgccgccgccgcacgccgcccagcactttgttaacttggcgcgcccgggcgaggtggctcccaggaggtgatcattgccgtccgagagctacagagcccctggcctcgcccagcacgggtgtggggccgcggcgggaggaagaggttgggtagcagccgctaaccaggggcccgcacgcctggcccctcggagccccgcgcccccttcccaggtgcttacctgagggaaggagccctcgcggcgcgggttcctggggtagtctaagtgaccccggtccagcatcaggtagagcgagaaaatcaccacacagaagatcgcactgccgaacacggtgaactggcggcttaacttcattttcctcgatagactcggggccaggacactctcctcagccaaaggagacagcgcactgtggactctaggaagcagccgccggaggctcccttctcccgggctgcgcgacctccgcgctctcggatgcgggtgcgagtccccgccttgctccgcacctagtctccggcgccaccacacgcccttggccttcgccctggcctgccgccctccccggggtcgggcgcccctctcgaggcgagactcgccggcaactgggaaggggggcccccacaaacttgatcgcaagctcagcgccgacctccggcagggcgcgcggggcaggcggaggagaggtcgctgcccgcacttcctgccaccgccgccccaactgagtcggcaggaaaagttttctcgacgagggcaggcgtgtcctcctcacccaggggaggcgcgggttcggcagctcccgggccggggccgcgcagctaggtcagagaagcggaggggaaaggaacaagatcgcgaggagccaagccctacaacttctgggcgggacggtcgggcccgcccccgcggcaccggcaccgcccccgcctaccccgactgagccccttcgtgctgctgccgccgccgccgccgacgctgcggctgggccgatgtgcaccccggactccggggctcacggattgatgagtttcctcagagctagcgtccgctcgccagactctcccgccccccgccgcccctaccttccccctcccggacccaggctccgcggggaggcgcagggggcgggcggcggcaacgcggaaagaaggaaaaggagagcagggaggaaaggaccgtccccggagagaagcccgctccagctgcagccgctagccccctccctctttcccgccccacaaacgcggagatggcggcggaagcggcgaaaggaagcgccggttctccagcgccacttggcgctccagcaccgcccgccacgagcaggaggagacagcggcggcgcagcagccgctgggtcaataggcgcccgcagcgcctgagccgagcgggcggctggccccgccccctcccgacgctccgagatgagggggcgggccccacggcgcccaatcacagcgcgtcgcccggcggacccgccccgcgcctgcctcccagtgtcccggcgataggaagacctcacagggctcttgtgacctggcaggcagctttctgggagttgaggccttcgggggcgttcaggcgccagcacccccacgtccaacaggggttgagcttacaccccacttccctttgttgctcaggtttcctatcctaggacactcgggcctggcgtgcctggaagagtacttggtgacgggctggaggaaatgcaagagaagagggcttgcacattctcttcgggctcactatttcctcctttggtgacagcctgttaaaacctgggggaaaggagactgacaaagggccgtccaggcacatgtagaaacatctgactacgaaatccatgagtgtaatctgagaagtgatgcttctgccagttattgatttattgcctctcagctccaaattcgccctttttgactgcactgtaaaaacggatctgagccttttaaacagtttttcgtttgccttctgggactgaagctttatcagcagagggcgctgaagagacattacagaaaaaaaggattttgcttcctgatttctgtgtattgataagcttttgcagcatacctggctttctccactgccaaggtcctatagtgctcagtaactagcaatttcctctcacatgcccaactctaggagctttgtagaggaggtgagacactaccccatgaataacttccctggcaccctagaggcatttgcagcaagttgcagagggcacatcttccacaagctttgcagacgtagcccaatggtgacttctctgccattcagtgagccaggtcatgccctctccaaaaacgtctagatcttagccctgggaggaattggggaggttcttcattgggcactctgtctctcaacccaagagttagttataaggttagctccttatagctgctgttgctatattctttaaagttctcttcttgctagtgaatccttcattactctaatcctctattatagttaacaattctttttattaagccttccctgtcccgggagtagtcccaagaaatagacctgcaaagatgggattaaaggtcagtttgattgaggttttgagctttagctccttgccaaagggaaatgtaattcatgacatgctgggcatctcaattaagcaattacctgtggttgatcctgatgaagtgccaactgaagcctgtgccttggggccccaagtggctgctacacttgactgctatggttataaagatgactagaaagactggtgtgggatggattcttttgcgtgcttttgagtggttataaagagaaatgacaagcacaggttttttaactctcagagttatggtatgagaaccagagatattctgcagaattccaaaagctctggtttattgtagcaacaagaattatgctgagaatcaaacaaaattttaattttcatgttactgaattataactgctattaaattcacacatattctgagtttttcgtgtaaaatggtgttattttttaataatagaatctcaatacttgaaatgggttggacccagatgaaaccgacaatcttaaacacgccaactctttctcttatcagtggaagtaggttgccctccagtgtctaaagagactagccttgcttgaaaaccttgactatagaggatgccactatctagatgggctccctgatttcaatggggatgacacgatctcagaatagcagaaaccaggcagcacataaccaacaaagacaaggtgggcgcacatgtaccttaaagggcagcaggaaatcagactgccttggcttacggagctgctctgagaacaaaatagataggcagttgaaatagattattgcttgatatttataacaggtaaaaagatctaagtcaggtagccaaaacctgacttgagtcacca

SEQ ID NO: 318166 - DNA, 4001 bp, Homo sapiens
tttttggaataaaatactatgactttctgctcacattttttttcttttttttttttaagctaaaagggaaaatcaagtgctttaaagttaaacaaaagaaccaggtctgcaactccagtccccaccctgcagccttttgttctggggacaagtggccgtttccaactgcagaggcagatgacaagcatttattttttcatctaaaacaaggtttttctttcgtcttttattggggagggggagtggggaacgagggctgcgtgaacgccctttgtccgcctcgggctgccgtagagaccgcagtgcggactgcaccacgcccaccaaccggtgtctcccggagaaacgcttcagcaccaccccaggagaatagagcgcgggctggggctgcggagggacccggcgacctctgtcaggagcgaggggagggccgggacgccagggataaagggaaaggcagagaccagagctgcccacccagggactcccagggcaacaaagccaggcaaactgagaggtgggggcgcgcggcccccgccagcccgaggcccgggcggagcgcaagcccagccagccgtgcccgacgggggcgccgcagtgtgggggggcaggtgtggcgggcggtccggaggcactgcggcagctcgggtggggctgggggcggtctctctgtgcgcccgaggctgtgcccgccggaccctcacggccccgcccagggtccccggcgtaccgctattcggcctccgcagagcgcgccactggtgcgagcaccgggcgaggagctgaccctacccgctgacgtctccctcaccgacccccttcaagctaccactcccgaggctgggacttctaaaagcagcagccccaccccgcaacttggggtcccattgtcctttctgagagctgcagccaaggccccaagggcggtagcgaggcgggctctgtctggtggcgaagcgcaggcggttctgcatcccagcatctccccggggaggggggggcggggggagcgggcgtggccctaggactagcctagtcattctgaggaaagaaaggatcgggaggtttgaaatcagaaaaggcgtttctcaggggctgaggtagccgtggtgaggatgaatcccacgcgggccctggcacatgggcttcggccccaggtctgcggtggtgggggtcccagccttttcctgaggccagaagaggactgaaaggagtggttgcatcaggtctcccccacccttctgcctcctgcggttgcggctttattgtggcctctgctcccctgacacctgcatttcacttagcgggagaggcggtggccaactcagcacaggctgcggactcagcgtggtgacagatccctcaaggttattggagactctccctctgggtctcatatctaataattcggattattcttaattagcccagaaagggtctggaccaagtatgagaggtgacgaggagaggcatgggtgcggggcgcgcgggaggagcgcagtgaccgtcgcgccctgggtggggtcgtgtttgcgcgtctcccagcgcgcgtctctgggggcgcggggccacttaccgagctcgatgttgccgatggcacgccgcaggtgctcctcggtcacgatctcgccgacgaccaccagcaagtagaacttgctgtcaaggaagcggtgcgacaggctaggcgaggtggacgccgccgggttggcgatgctgccggacggctccggctcggtggcttccaccaccacggtcgccatcctgccggctgctgtgcctcggcgaagtgtctcgctccggccgctcctctccactgcggcaggagaaaggattatctccgaaggtactgtctccgctccgccccctgcgtcccccctcctctggcgccgcgcgccgcctccccctccgccctctcccagcgccgcggagagtgcgcggcggagaggagcggggagtgagagagggcggggaggcggcgccgcttttatatggagactaggcagggagccgggaggaggaggaagaggaggaggaaaggaccacccggcacatcctcacgcggtggctgcctccgctcttccagccgttggcccggggctgatgtcatctgcagcaaatcatctcgcccgcggcccggaagctggagggacgaggtgtgcggacaatggtcggggcagggccgcgagccaaggggctggggcgcccgctgagctcctgctgcagccgtgaagggggaagacgctctcaacctacaccacccaccacgtacacacccactgcccactcctcaccctcaccctgtctgtgcatgggaatgggatgagtttccattttcggagtgggggtcttttctcttgttggagttgcactagtcaggcctctgccttgtgtgctgtgtatgatgtagccaggttctcaggaactgggatagccacagtgggcagatgcggggctgtgggtaccccgcctaggaagacggaacctgtcttttctttgaccttgtggctttaagaagacgaatttactgatatttaccaatatcaatatttaccaccttcacttaaagaatacatcaaaaatgcaaaacttaagcctactattgttcaggccttggattctactctggcagggccaaggatgaaaaagtactggctttgtggtgctcatgggaaatgagagaaatgcagatgtattatattagataccaatttctttccttaatgtgctgaacagatagtatcagtaataacaaagaataaagagaagatactgtctctactcagcagggttacagtgactataatgtacttttcagttccttggggaacacacaagcaaaattacctcgtgacaatgatgtcttttaaaatacctgtagcattgggaatttttattgcctttgtttgtgtttagaagaactaaaaaatgtgttttttgtttttgtttttttgtttttttttttaaggcagcctatttacaaccgtttctcacaaacatactgaatatagcttctgtcccagaaaaggggaggagggtgaggaaagagcaaaatgtgcaaacatggtatcatagaagactggggaattcgagctttaaggaagaggaatagatggaaattagtcaacatagctttaatactagaatgcctgttagtaaaatatagatgatagatagatagatagatagatagatagatagatagatagataatcacctagatattcttaagatttccaaaataacccagtgtcttaggtgttagctgccatgacttattggtcatgtactctttgctcttatatctttcctgacaccctggcatgggagacatgctgggcagccaagggctggggggttccatccaacatgtcaatctgatcaatgcagaatgaaaataccgtctggcccgcagtatttgggatctgtgacaggatcactagagagttgcattcaccagtaattagatgaagtgtttccaactagctgcattcaccagtaactagatgaagtgtttccagataatattttggttaagatattcaattgctgttcaagaagtaaggccagcaccaaagcccataactggggtgaggggcaggaaatatggtgaagagcactgttttctaaaggtcatccgttggattccagcctcatctagtttgtgtttggttttcctttctttgaaccattgttacttttatgtatgtaatagttttcttttatgcagtttatttcttttacttaaatttatttttaaatgcaattctatgttgctgtataaatggaaacactaatatcacttattaatagaaagtatccctaaaaatatacacaatgaagataagatgtgatcaaattcctgctacatactgttatgatttgctcaagactctgagtccaaggctctcctttcttggttgaaaacagagattggccaagtgttagagaggtattaaagagatactaacacctaactgagttgttctccatgttgcaacaga

SEQ ID NO: 318167 - DNA, 4001 bp, Homo sapiens
gccgaagcccaccgcactgcggcccctggaattcagcgggcggcccgcgccagggcaccgagcaggaagcactgcacccgcgccgcagtccccgggccaagccggaggggctgcggggagcagtcaccactgctttgaaactgaatggctgacacatccggtcctggctcttacaccactccgccaaatgcaaacttcaaaggccaaattcaaactccaaacagaagtcactcaagtgacttagcagtgcagttcgcattcccaggaacactcaaagccccttgggggctgcaattagacaaaccgcacttcctaaaagactgcaagcctccgcgagtgtgcagcctcccgccgcacggctttgacaggcgttaccgagccgtcctcctggagccctgcggccggcgctgggggcgcgccgcctgcgtccgggcccagcccgcggtatctgcctagggactcgagtcccgggcgggccgaggggctctgcctgtcacggccgctgggacctgctactttctcttcggtcctctcagtctcccacccgacctcgggcttctcacccaccccgcccctcttccgaccaccgcccgcctcaggctcgggcctcgccccccagtgcctttgccccggggacacccgtccgggggcgccgccgcagggccgtgccccgcccccgggctcctcggagagccccgattccaggagtcccacaaagccagccgtggccccctacaccttttcgcaacggttccccgcagagaggctcgcacgcctgtcacatgtctgcaaacaataacaaactcttccgcacgtccccgtccggtcccccaggctgggtccggggcgccgcccgactccgaaggggtcggggggtgctcaggggcgtaggtcccggcgagcggcgcgtagcctcgctgcgctgaaccccgggacgccgtgcatggtgcccggggttcattcattgccctctgcccgctctccaagtccccgccgcgaccccggccgtgctgctcacccggcgggggccgctgcaggagacggctcggcggcgggcgcccgcttctccccgggctcggccgctgcgggactcgaggcgccgctgtccggcgccgccaccgactcggtaaggtgggcgccgccgcggctcgcggctccgtggggcggcggcaccgccacaggctggaagccggtcccactccccgctgcgtccgcgggctccggcgacggggaagtcgaggaggccggcggtgaggcggcaaggaagagcggctgctcaggcagctggtccagctccacactccgcactttgcgcagctgccgccgccgccagtccgcccgctcgcggcccccgctgcccgcctcccgcagcagtcccgcggcagccgcgggcgcgctgctcgccttgagggctcctccgccgccgcctgcctcagggctcgtagccctggcgcccgggaatcccgacgacgaggcgcgattccccgccgccgccgccattttctctcgcgggctacattcgctcggcccctgcgagggagggagggggcggggagagcgcagggggcgggcactgcgccgccagcgtaaggcctcctgcgccaactgcgtgagcgcggcccgccgggcgcctggcctggactgaccgacgggcgggcgcactgggtccggcctgcggcagaggtgtgggtggagggcggcccggcggccgcaggtgggagggagtgggctgtgctctccgccgggcgagagggcgggcgggcgaggtggactgggaggcggagggggcgggggcggaggcggaggcgtgggctcccgggactctgcgcgctgcacgcgccgcgccgccaggtagtcccggccgcaccggcgacaggaggagccttggcggcagcgctgcgccgcttcctctcggcaatctcggcccggcaccgcggagctcgcgggaggggagttgcaccttccgaaagaaagaattagttccaacttgggtttctggtgcttgaaggggacgcaggcgagagggtttacagtctgtcattcccactgccctttgcagtgggcgtcgggggacccgggcgtggaccagcctcccaccgacgcgcaggtggcgcccgggaccgtcgcctgctgcaaagcgaaagcaagtcaacgttcagcagacaggctgccgcggaccagaaaaataaagttttgtttgtgttttcttttgaaaagaaaacattccttctctattgtcccacccctgtccctgtgctacagataacaaaacttcaaagttttctgtaataccttacatcctgaagctgctgatttgggacaactaccccctaccctcaccaagtccccacagcctctgagaaaccgttggggcgaggaagggaggcgggtgtccccgtcgatctttagtttttccttggctgtctttgggaaaggcagtcccgtacagaaccacatatagcgcgtttggggaggggaccagcgctgtgccaggaagtgctcggtaatgtcaccctcggccaggtcccggccctccccgaatccgatgcttctcgccgcacgtccttcttccctgcagggtcgggccaccggccgggttccctctgtccccactcctgcagggcctggctgcccatcgctgcgttgtgagtcctcctagtccctggactctacgtgagaaggtgctttgggatggaaaaagcaacatttacacgttaatgatttttgaccttttgtcaactgaggagaacttctgtgttgcgtttatttcttccttcctttcctttcctccagctggtttgtttaggatggggaatctcccaaaacccaggaggaacgtctatagatttactttgtgaaacatgattaaggaggggggaggttggggtgggggggtgcggattctcacggagatagtcttgtcagtcttcacatatttagacaaaagcctgaactatttacagaataattccattgacttctggagactaggtaaaatgaaagcccctttcccagatacaatgttaactgcgtaaccaggttagatcagaggggttttaaaaagtccagatttcatattagctcaatgatttgaaaactgctgtaacatctcccataagatagttttagatcgttacacccaacggtacaaattttgaaagttcagataaatctgttaaaaattaagtctacatttaggctataattatatgctattttaatggcagtcaaatgtatcattcaaaccaaacagtggttatttctcaggtcttcctgggttgccacacccaccaaatcctaaactgaaacggataaactttccttgttcctattttgatctaaagacttttacatttgcacgcacatattcaggtacctgtaagtgagaaaagtaagtggaagactttagccagagtagcagagtaaaaaggagattccagcaaaactgatttttgactgtttgtacagtggttgaaactggggatcaaagggagagggctacccagcgcagcactatgaactagctacaattctctcacttcctccatccaccacgtattaccatggagaaacctaagtgttggtattttcccacagtttttgttgctttgagtcatttttttctttgtttacgtaaatattcaggttgtcattatgcatctgcatatggacacactgatttcttaaagagagaatcaaaggacatgcttaactgaaaagggtgttctccctctgccatatgttaatagaagtttctgagtctaatgcgtgattaagactctagctggttttggtgctcttcagtcctgctatgttactgcagagaggtggatgtcaaatatcaagtactgtaggctctgaattctcttaatatgatttatttaataacattcaggagacttgtatttcttccaaggttgtttctagactgaaagctccaattcctgtttccaagctcttcatttccatcctcactgggacgtaaaccttgcaatgatttc

SEQ ID NO: 318168 - DNA, 4001 bp, Homo sapiens
gtcttgaactcctggcctgaagtgatcctcccacatcagcctcccaaagtgtcttgaaattactggcgtgagccatggcacccagccaaattccaccttcttctagaaaactgctgggtaaggttcctgttctttagggtccccacgactctgtgtccttacacctggccctccagactgattctcaactccacagtggcctacggtccttccttggccctgctccttcacacctctgtgcctctccctgcctagcaaatttcttatcaccctcaaggccccccagcaccacctgtcacctcctccacatttccatggcatagcccctcccctatagcaagggttgtacagtcctggaactaagtgtctgcatgcctgccttctctactgggctcctgggctctctcgggaaagggaccccgttgctatctgccttgtgtccgtagggtctagcagaaagcatgacctagataatgcagaattcagtaaatgtctcttgtatgtgtggaagaaagctacagctaaactattataaaaatgtgagattttatatcacagcttgttccaacagttagcaattaaaggggtcaaggacaccaaaatgtttcacaaaatagaacaagcttccatctgcttacaagtttcacacgctaatcagaagtcactaaatgaacagataaagcagagacaacaggcaggctgggccatttctttgatcattcattcattcattgagctgatactactgaatacttcctgtgtgctttctaagcactggggataaagcagtggacaaatcagacagctacctgttttcacaaagttacatcctagtcggggagacagaaaataagcaggcaaataaatagaatagtttcaaaccagatgagagctaggaaggaaattttttaaataatgaaatagcatgactaagggaagaaagagggtggtcgaggagggcctcacccaaaacgagacatctgaccagaggaaggagcagaaagagctacttgtgccaagatcacggagacaactccaaagacggggaaacagcaaatgcaaaggtcctggggcaaatgcgggctggcatgttcaaggcgggcgagatgagtgggacggggcagcagtcttctgggggaggggcgcggtggtaagggattcgggctgggtcccctctggcactgctggacaccgagtgtgcaatgacaaggcaagagaggagtgcgcggggaggcgggaggctgggcgggtggggagggggttcctacaccactcacaccagcacgggccagcaccctgcccagtcttccacagatgcacaccggggtcctgcccaggcgtctgcatacattcacacagcctgacaacaaccctgtccagaagagacatttccccaccttcccgaaggcaaaaccgcggcagagcgagggtcagtgccttggccaaggtcgcggggacgcgaccccgggcccctgggcacccggcgcaggagtgcagctgtctgccccacctccgggagggatggcgcccgcagaccccacgggcaggtcggccgggccaggccggtgagcaggcccgcagcccggggctgctgacagccgggcggaagggggcgcctgcggcatcccccagcacaggggcgacggctgcggctgccagggccccgcagcccccggcccgccccgaagcccccggccgcgcggttccctcaccgcccctccccgcgggcccggcccgagcagccgccgccaggcctagcccgcccgccgggctcacctcgcctccccgccgccgcgccacggggagagggcgggcgggcggactggcggcgctgcgtgctagtcactcctggctccgcggccccggctccgccgccggcccgccccgctccgctccgccccgccgccgccgccgccgccgccgccgcagtgggtgtgaggggcgccggggcgctgcgacccttccggtcccgctcccttctccgccgctgccgccgccgcggcgcccggtctgacagaccctcgcgccgaccaatcagcgcgcggagagcggagcaggcgcggccaatggcgcctggggggcgggccgatggagggtggcgcgggcggggtcgggggccgggtcgggcgcccgaggtcctgggccggggttccgcgggttcttcgcccccgggcctttcagtggcgcgggccgagtggccatggcgctcgggtgcgcgcagtgcacgcggtgagctggagacgcaggcattgcgcggcccaccggctgagcccgctctccctgcgaggggggcgcagctcggtggagagggtggcccggaggaccgggaaccgggctggaggcgcgcggggctcacaccgcggggtccgcggggagccgggcctcgggctgcaggtgcaggcttgtggcggtgaggcgactggagcggcacgggagcccgcccgtttcggggagagcccggggcgatcgcggggggaggccggcctggcgtccgggagcccggcgtgctagggcccggtaggcggggcgggcctcgcactcggttgctcgctgcggcgccggaggaacgggtctatgggggtgtgggtgaggccagaagccgggtcgaagagggggagggggtgcgaagagatggcggtgtgtagacaggtgacccggtgggtcggtgacgcaggaggagactgcgcttggtggcgggatcacttagttgacaacatctaaaaattaggaggtgcggcagggcgcggtggctcacgcctgtaatcctagaactttgggaggtcgtggcgggtggactacctgaggtgaggagttcgagaccagcctggctaacctggtgaaaccccgtctctattaaaaatacgaagcaatgagctgggcgtggtggcgggcgcctgtaatcccagctactcgggaggctgaggcaggagaatcacttaaacctgggaggcggaggttgcagtgagccgggattgcgccattgcactccagcctgggtgacagagtgagactctctcaaaaaaaaaaaaaaaaaaaaaaaaaaaaaaaaaaaaaaaaagggaggtgctcagtcaagcctctgagaggagtggggggcggggcgaggagtctcttgctcagagccccctagggactgggacccgttgactctgagctgcttttgaggctggatcaggtaccagcggcctgggggtcgtacaggatgggagaggccggggcttgggatgttgccagatctacgttgaaaagtgaagcaggaagagaggcactgaggctgggcacatggggaaaaccgtggagagccggcctttggggactagaagagtgggaacaatggttgacaaatggtgagtgtggtgtagaacagcagtaacacaataccaggatccacagagtggccagggccagagtggggagaaggaacaggactctgcagatggggagggtaaggggctgggtggcgtgaagggtggttgcagaatttggggagggcagctagcctgtgacccaggttccaagggcactgaggtctgggccaggccgcttggaggcaccagagcctcagaggaggggtggggtagaggaacggatccagcatggtgtcccccttggccaccagagggagttttctaaatttgagcatggctcatcgctgcttgaaattctacgtcacagtgtggcctgcattgaggagggcccacacctgtcgctacctcagactcacctgccacctgcctcaagtgcatgagagagaacaggaaaccagaaattgtcaggatcgaggattatgggaaaagagtaaaagcctagctgtcagatctgaggttccaccaaggagcactgatgggtgcttctcattaggaaggcggtgcggtggctcacacctgtaatcccagtactttgggacgccgaggtgagtggatcacctgaggccaggagttcgagaccagcctggccaacatggtgaaacgtcatctctattagaaatacaaacattagct

SEQ ID NO: 318169 - DNA, 4001 bp, Homo sapiens
ccaggaacctctctcactgatccattttagcaggcacagctgatgtgtataccgaactgacccatcacatcggcaggggttcaacaactcaccctaaaaagaaaacagctcagtgtgaatatctgtgtctgtgtctctattttaaaaacctaatgcttcctttcttttctttcaaagccatttactcaggatacagcatcaggctctatcataggaaatgaaattaaaattttatacctctgatgggaatgaaactaagtcttaaaactatttcaaagacattgcttagagttatgacataaatgttctaccaacatacaaaatgtctgcaagatatagctcccaatacccgtgggggaaagctgtactattaaatctctttaataacttttaagtggatggtcagatgcatttcctctgcagttattcttaatcattgctaaagaagaaacgcatggcatcccagaaagcggcattatgcttttttttctaaatgtagcatcataaatattgtcttagggcactatattcctgaaagcctgtatattcttatgcaatttccttacttttaaaaacattacacctaatcttttctcagaccacacatttgtaagggacatatgctatcatttcctctgcatgattactctcatataagtttgcatgcacctacaatggtgtttataattttagaattgtgttgctgtcaaaatataaattgttggcataatagcctttctttcaaagtccattcctatttctcttgtaaaaactatcacatgcttttcacatccgtgagattaagtcacccaaatttgcagtaaggaaagactctgccctttctggttgtgatatgacatctgtctcaagatacatctgtagaaaacggacttcaccttacatctgacaggtttgcttctaagcataaaccaaaatccatcgaataattcacaaaagccgcttttggcattatcactaaagcacctgaggaacatgtagctcctaagccaggaaggaaaaaggaagtgtagatgaaattaaacccagtattcaccactgggacatttctatttgccttcacaggaagggaaaggggaaggcatattggagccagcgctcacagggcagaaccagacgagcctcactggaggcaaactgggaggtaggcgtgcgctgtccgtggtgctgaaagcttgaccggcgcgagctggagccgccaccggctgcctcggggtctcgccgggccttacctgctccgcgccctggaagcagatcttgcagatgggctggtggtgctggtgctggtgcccagcgcgctggtcgccgccgccactgctgctgctgcggctgctgcacaccgagcgcgtctcgggctggtctccggcgccccgccgctcgcgctcgccgcccgcgccggcctcagactccccggggccgcctttcgctgctgccgcctccgggaggcgcctcggaccttccccggagtcgccggccgccgccacttcctggccggcgggctgcaggggcaggggcggaggcggcagctcgtccgctcccctgcaccgcggggccacctcccctagcggctcgcttggccccgcggcgcgctcgggggtctcgggggacgcgggcagcggcggcaggtagcgcggggccgcggggaccggggccggctctcccggcggcggcgtcggcggcggcggcgggggaggttgcgggggaggctcggcgtccccgctctccgccccgcgacaccgactgccgccgtggccgccctcaaagctcatggttgtgccgccgccgccctcctgccggcccggctggcgggccgggctctggctgcagggaaagagagcgcggagggggcgggagggagaggggaaaaggagggagggggcccggacgcctggggctagggggcgggacggggaggggatgcggaaggttctgcagctgcggcggcggcaggcgcggccgttcggtggagccgccggctcggctctgatggaggcggcgccgaattcggctgcgcgtgagagccgcgccgcggaagggggggccggagaagcgagggggcgggagggaggagcggcgcggcgggggtgacggggcgcgggcgcggggtgggctgggggcgcggatcagtgggacggagttcggggttcggctccgagcgggcgggctggaagtgggggatccctcagccgcctccacgggccggccccgcgctcacgtcggttccggggcggatgacccctctccaaacggcgcagcgctgcggctctcgtgagctgggaagtagggggcaggggagaggccgcgggtccagaaaccgttactggatgggccggtgggatgtggcgcgggccgggtggggcgcgacagtctgagccgagacccgcgtgggcttaagggtgcgcgaggcgggtgccctgggcgcgcccgaactggctgagcagtggagcgggaaagggcgcgggacccgggactgtaaccgccacttccaggccctcgctccccgcgcttggagccctcaagggcactctcagggatcctcgagagccttaaaacagaagtctctggaacctgtgtcctctccctgtctgtcccgccctcgaatccctgtgtcctcctcacccgctccctcctgcagtgagcatcccgggttgttggtaaagatcttggtgcctgggaggtcggagcttcgtctcctgaaatggtttatactagtgaaccctggcgccacgttctgtggcttataatcactttcgtcgttgccgcatgaggaagcaaatgacaccgccccttaccctggaaaagtggctgcagccttccccggatcttagttttactcaccccgaagtcaatttctcggtaactccaccctgcaaaacctctgtgggactcatcttcagggcagagctaacagttttctttctggaaaaaaaaaaaaatccctcacctgcagggaactaggctgagaatcgtgcacatgcagtagtttccaaatccgtgcagtgtgagatcataaagcaccggatttatatgcggcagtgtgtctatccgaattttcactgatgtgacgctttcagtctttgacacaaagacacagagcagtcatttttggcagcgtttcatagccgaagacccaggatcagaaaggcaaaataacttgttcaaggttatagaactattaacaaagaacttctgtgttccctgaccagattttctggttcaaatgccaataattttttcttccaatcctttcttctgcctcctaaaatagtattgtagtacattgtgtgtttggcgccattgattcccactaatagatactctgtaatggctgagataaactactagcttaagttcgtttttccatttcacgttttggcagtaagaagtatatttgattcataaagaagacctacctcttttgacagaaattggttccatttgccagagagagaaggtagtgaaaaataattcaagaatgttttgtcacaaatggtctctgatgaactagtttccaggaatgtcctctaacacttagccccttcagactggctatttttggtggcagagtggcaggcagcaagcacatttttaaaacaacaatctccaggaacttaccacgttgaagaaatgtggttgtcgatatgctttcatttttggtcttcacctgtcagaatgacaacgcaagtttgtgtattgccacagtcaagataatcataagccttatgatcatcataaaccttcttcataagttctcgagttaaagactgtctagatttgtacagaatcccctaaataattccatttatgactagtaaatttctaccaggtgtgataaagtgcatcggtactcgaaggacagcataaaagctatgggttttgtataaacggtgtagaataattcagacagcgaagcggcatggataaaggagaaaagggccacaaggctagatgtgtcctctcagttaattgtttctgaaaaataa

SEQ ID NO: 318170 - DNA, 4001 bp, Homo sapiens
ccctcaccaaaacttcaagttcaggccaaatattgaatgaaaatagaacttgagaggcaggctttgtttgtagcatgttgtttctgctaagagttgccccctacccaggctccaccccagtggtcggactgaagtgtacatgttatgttttaacagatgggccggctggcggctgctgggctgtaaaacaggaacgcggattctgcactgagtggtattgaactgaacgctcgtaaagttcatggacatactctgacccagacagaccaggcagatgcagacatgcttacgcatacacactcactaacaccccacagctcagaggatccatctctgtgacccaagggaagttcaaggctgaatttccccttcatatatttacctcattcaccttttaattttatatatacacacactcacacatatacacgtatgtatgtgtgtatatgcgcatctacatcttcatatacacatacagaactatatatctcaacattttcatgtattttcaaaggtctaaacatccccaaattctggacctgtttctgtctagtattttcaaaagctcttattcatgtcaaataagaattgtaagaaaatatcgtattgaattctgtttattccgcacataatataaactacatgcatgtagttggtctcagaaaaacaagctgcttttacccccttaccattaaggggggaaaacaatctaacccagaccgagtcacaaacggagtgtcaggtttaaccttgagttctctgctgtcaattcctgactcaacttcatcacttaaacacgcaggtgctcaaacaaacaccaaccgaccaggctggcaatccctttcgcagcctctaggattctccaaggcactgggcaccagaaccgacagcagctcccgcctggtcctaacgaagtccttcggacaccccttgcgggtggatgtggaggtccgagcacctcaggagggtcatggattcaagtgctaatagaaagcaattactttagaaagttcaaagcccagcagtgctctcaattcctctcagtagctgcagagcactgaagcccccgctacagaacccggctggtactccagttctctggcgctgagacccaccttgagcccgatgagcgctcgctcagccttgagatccagacgcggacgccgggtcttaccgtaccgcacagcgcgggtaatttttcaggaaccgcggtccgcacgccgcgggcgcggaggccgccccagcgctccatgtcgttgccgcagaggggcaggggacgcgtcccggccccacctacccatgtcaattacgccaagttggtgcggactggaaccgcgtcccgggcggagttgggatgctttgacaagaagaagttcgggagtggggatattggcacggagtaaatcccgcccagccctgacctccccacagcggtcacgctcggacgaacggaccgccgagcgccaggacgcgtcccgtcccctctcgccgccgccgaaccgcgccgagaggagccgctagcccggcgcgcggccactcaccgtcctcgccgagtcccgatagcaaaccgacgtccctgctgcggttctaagtgccaagttgcccccagtcggtggctgctcacggcccagtggaccagggcacattggttccggcgggcacctcagggggagtgcggcaagcctggcggccgccgcggccacacagtcgcccacagcgcgctgacaattcacggacctgctcaacgagtgaggcggaaagcagggctaagccgaccaggctctggaggggaggcggggctgccgctaggggcggagccagccccggggcgtcatcagcccatgactggcggagccgacagccagtcgtggtggcgctgggaccgccccgtaaccgccgtccagtcgcctgcggccgagggcaggctggcgggacgcgccggcggcggggaagttggttattgcgaagtgccgtggctgccggcgggcgctgcgggactctctgcaatgggacccgagcagctctagagggaggcggcggccccagaaggccgttggctgagagagaccaggagccctcggagccgccgcgcgcatagcgctgtggagcaagaagccaaccgcagcgcgggtcgacacgccagtatctggcaccggcaggaggcgcggaacttagctgccccatcggaaccccgcccggaggaagctgagggccgagaaaggatgaattccggaccgggtcgcccagccacaagtggaaacctgggctctctggaaaacgttctgatctcgatctggctatctctgaaacaaaactccagccccgcaaacctcccaaagttcagtacacgtccccgtcctcacccctgccctccgggccacctgcagcgggggacttaccggcgcctcgggtctcctcctcccgacccagcgcgtcgcggacacagctggcggccaacaggaggcttgggcgctcgacggcgccggaacctgtgagaccgtcgctctgggcgggctgccgtgcggggtggcatcctctgcggtgacttctgctgtcttttgggtccgccaggattccaaaatcccaggcgggtcgctagaattatccatcttcgtggacaggaagccccagaacgaaccacatctgtcccactctgcttccgccctccttccccttcgcaagctcctggctgggatggagacatcggacgagctcggagatcccgacctctcaggggtcactcgcagccgaacagcctggaatatggccttgtgggcccttcccgcccaaccccctaggaccccactgctcatcttgtcaaccagtttctgagcccctaccctggctgcagcacgtgctcgcacaggcgcgctgagctactaacatagaatcaaaagcagggagttgggtgttcttgctttcccgctgaaacctagaatgtaaacaagccctagaccgtcagctgtgggtgggtaggggcctctccctgcctagaactgctcttgccatgggtaggcacctaacccgtattagtaagaatgaaggaatgcatgctcataacaagaaaggggtcaacctgctgccctgatactcaccttcaccacttacgtcttgcttccagcgcaagcccacttcagaccattgcctcattcaggtcccagaagtcctaagggttttagtctctcagtatgggcaattattcacatgtaagggagctgcaaggtgttatttcaatgccatctggcctctataaggtcttgcatcatagctgacctctcatgagaaggttctgatgaggtcaccagggagaaggaatgtaaagggctggtggctgaaaaggagtgaaatggcccctcttaggtgagctctggcctggtttgagtttcaattctgtctcctcagctccatttctcaatgggaaaaggtccataggaaggttgtcagaagggcaggagactagggcagggatagccctttgcagaccctgaaaaattgctcagtaatgcaaacattgtccatatttaagttctttcttttcttttcttttttttttgaggcagagtctcactctgtcgcccaggctggagtgctatggcttggctcactgcaagctccgcctcctgggttcacgccattctcctgcctcagcctcccaagtagctgggactacaggcgcccgccactacgcccggctaatttttcgtattttcagtagagacggggtttcaccgtgttaatcaggatggtctcgatctcctgaccttgtgatccgcccgcctcggcctcccaaagtgctgggattagaggcgtgagccactgcgcccagccttaagttctttattttctatcttgtggaccaaaggactgctacaggcaaggaagaccatctgactcaattccagaggttccttagcatgctgctgactggcctaggagaatggcctttgcccataaagtattagatgtagaccacatgaatggaatattcaccaggtttctgc

SEQ ID NO: 318171 - DNA, 4001 bp, Homo sapiens
cttcagcacatgttattttaacaggcaacagtgttcaataaataaatgttatgtataccttatcctgattataattttacaagagaaaaaatatatttaagcactagaagtacagtgaaaatatttcatgattccatacgtgcttcgagcgcaattcctgaattaccacagattactgtcacaccataaaagtatgcaagtagcaatgcccaggccaaaagaatgagaattgaatgtaatacgtccgtacctatcctgtgataaatacatgccttactagatttactcattaaaacctgaatctaaaaggatgtgaaacctatgtagatggaaatttacacgcaaggaccacctgtcaaaaagaaatagttcgcaaccttcagcagtttcgctttactattttttccaaaggcgtctccagtggcgattagctacactcagtgtatataataaacacactgtggcataatgaaagggaaattacttgcaatcagaatgcctaggttcaaatctgcctcttactacctgtgtaaagcttcgacaagctattaaaataacgaagcctacatttccacatctataaaagataatacctacctattccacaggctttttacgaagatggaacgcgaatgtacatcaagtgccacatgttatagttgaggtatttattaaaggcaagacttctttaaaaaaaaataagtcgttatcaactcattacatagataatatcaaacttttttcactcattattgcactccatgacggcgtttgataattcattttcgtttaaaatcgccaaaatcgcaacccataaggttgaaagacgctcatacccccataaatatacctaaagtagaaaagcatttgcacgataaccggaacatcaaaaaaagcaaaatttagtaatttcctctataaactcaccactcatttaaaaacacagctggttaaaaataatctactaccttcagtgggtaagaaaatgcgtttgaagagacataaggtgtggacgtttatatcttaagtattcattttacaagggtcagtttgttcaatgtaaccgtatccaaaacacaagcaatcgcaaaacaaaacaaacagaaccctgcttataggtgtcaaggatttaaaaccaaatggatcgcaacaaaagagcctccccgtttagtaaacagattctcgagcggcaggcaagccgaggaccaggcttttcaacaggggtcagctcactccactcggccgtcatctggcggggtatttttcgcgaagtttcaaagtcaacaaagaagttctgtcgcgagggggtagggcctggcgagcaataggcagaaggacgtaaagaaagacaaaacccagtgggggaagggtgcggaaaacgcccccggacggcagcgacagaggcccccttttctgggccagcgcgcgacggcggggacaagggaggccacgccggcctgcagtagccccgaggccccgaccccggccccggcccctgcccggcagggtccccgcccccctcggcggcgcgggcgggaaacggcggggggcgcgcagagggtcaccttccgctccccggcccagaggcccagcgggtggacaaacggcccaggcgtccgccccgccgcgatccagcagcccacctcgagcgccgcggacctggccggggtacgaacccgggcgccgacgcaagggctcgggcgccgcgcgtcgccgacttaccttcctccgcggtgtccatcttgtctgggggggcggcggtgacgcagccacgaggctcccgcggccgggcggggaaagagggaggggagaggaggagggagccgggcccgggcaggtgcgtacgctcaggtgcgagagaggaagcgagaggaaggagaggggagagggagagggagagaggctgacagaaagcgagcgacacgggagggggaggggcgggaacacctaggggcgaggcctgggcggggcgccgaggcggaaggggcgggagctccccaacgacaggcgctgtcacttccggcggccgcggcgtgcactgtcggtcggcggctaaggaggggaggcacctgcatctggggcgcggcgaatcctcgcgtgcgccaggccgcctggggtagtcgccgagactgcgccggccagcggggccgaaacctaatcaggagctgagctttgatggcggcttctggagggacaaagaaggcgcagagcggtgggaggaggctgcgagaacctagctcccgccccagccgacgtgcgagacaaaggccccggcgcggggctcttcggaaggccgggaggttcctgtgacaatgcgagtctgcgccccacgctcccgcaccgtgatgccgaggccaaatggctagagtgggcccaggcatcagcatttctgtttggcagccgggcagttgtggtgcacgttttgaggaactactaaagcctgcctgtgatgaaaaaggcaaaagctgacttcaccaaaattactcccagggagacttctgcatttggctggaaggacatttgagtaaaccgctgaggctggtggttgaaacataatcctctaagggagatcggttccgataccctgagttagggacgcttgcctgggcagagctaaggggagaatgatcaaaagccaagctctgtccccgtcagcacgtcaccctccctcactgtaatccctgactgttttctctaaatgaagaattatttagagaatataaattagaagggccgccacgtcagaattgcctgagtgggagcagtctttccagcctcgaaaaatgtttaaacaatatgcagatgacctagcacaaataaagaatgctagcaaccgctgttatgtgtgagcggtggaattgggagggctcttcccccaatcttcatcaaacagagtaaggtttagaataaaaataatgaaatacagtctttcaaaaagagcagcgcttgactaatgttactgatgtcactcatgttactcaagggaggaaagaactcaaactctacataataatacccactgatttcaagggctggcacggagaattaagcagaccgccattctttatatttgtttttttgttgttgtttgcttatgatttttttctttctttttttttttttttttttgagaaggggtctcgcactgtcacccaggcaggaatgcagtggcgcgataatggctcactgcaatctcactatattgaccagtatgattttcaactcctgtctttaagcgatcctcacgcttcggcctcccaaagtgctggggttacagacatgtgccactatgccctgcctaaatatgtttatatatactaccgccaaagaaacaatttgaagacgatctttccccagcccctctccttctgatccaactccaagagctcaccctccctgtaagacctgtagcagagcacgtattggcctgctgatactaggggcaaagaccgggccgatcagatgttacatggcataagggcgaaggattctgaaagaaagactgagacttgctggaggaagtactagtagtgccaagggcaggtatgtgaccctcggagctgcagagccaggttaggatgaagggaatgtgtgtgtatggggggcgtggaggaagccttccttttgtatttaggtgccttcccttgtgatgttcaaaggaaagttaacctgtcaaccagttttcccttctgcatagtaattccttctggaattgccctaaccttttcgcattcagactttaggcgttaaatataagagtaataaaccaacatttgttgagtccccactgtgagtcaggcacaagttctcacaacagccctttgaatacatgaatcagtcacacctctcttggttgccattgacaggaactcaactgttaggcagaagggaggaatgtactgttgatatggacagactccaagaaggggagggactgctgggactactagaacgagaatgcctctgcccctatggctcagctctgcaactctctctgcaca

SEQ ID NO: 318172 - DNA, 4001 bp, Homo sapiens
ccctgaagcaggagtgcctggtatgttcaagaaatatttaggcatggaagctactgtggcagcagcaaagtgggtaagaaggtgaatagtagaactgaggccatctgaatcatgtagggccttgaaaaccactggaaagaaaggactttgtcttttgctaggagtgagatgagaagccactggaggattctgaatagaggagtgacatgacttgacttgttttaacagtatcactatggatgctgtgttgagagtacactccagaaggcaagaggtaaaacaggaagactggctaggccattgaaataatccaatggatcactgagatcttgagaagaggtcaaatgctagacaggtatttaaaatttttattatagaatttttcaaacataataaaaagtagaaagaatagcattatgaacccttgtgtacccacatccagcttctacacttatcgatttatggccaaacttgtttcatttatactccccatactatttcctctgccaatagagtcctctgaagtaaaccccagacatctgatcattttatctatctatacctcattctccacccctccagcttagccttggggagcagcagactgaagagtgtttcagatgcgttaaaaatccaggtagagacgttaagagggcaagcaaggcacacagggtatgtacagactggagacaagggaatgcggtggaaacccagggtcttctaatagggcactccgaccttagaggattaactgtgatggccccagcagggtgcccaatgcaaagcggctctgtatattataacaatcagttatttttgtacctttctctttctttctctaaaaaagtgtaagttctagaaatgctattacgactctagtttttgaaacacattcctaagaaatgtagaagcaaaagcacaacaaatgattttagcaagttttacacagcatttacaggatacgctatgcttaattcaactcactggtaaaaatacgattcactgtaatggatttaactcttcacctgtgaagtggcttatttgaatcaaaccaccctatccatttttaaagaaaaaacaagcaattattaaagagttgtggaaaagcaagataatgtgatttttagaagggaatggttagctgtatttcattacatcttaaatatctggatacccctaatgtctttcaagatgtcactgagagttcgttctggtcccgcaggtcgcggcagcgtgtgtctttgtcctgctcaggccccggacccttactccactcttggacactcatcttggaaagccgcggcaatggcaggagaaatggctgccccagcaaagtgtcacaggaatcatgcctggtcacctttacacaaacagaaccaccggtttacctggcttaaaagttttgctggacccaagaaacgggtagatttcggatacttctgcgcttccgaggggtcgggaaaggctctgcggttctaactaacccacgactgcccgggggtaccgagcattttagctgtggggtctcccccgcgccagcctctgggcgcccggtcccacaaatctcattgtgtcctcggttctgcccgcgccggctaggcgttcgtcttcgcgtttctggctgaaacccactgtctttggagattccgacccaacgaggccgaaactaagccgggagacctcccaggtaaggagcaccgagatcgccccgaggtgcgcgccccgccccgcgcccggaaggacggcggctcggccgcacctgcgtccgcagagcgaaacctggcgggacgcgggcctccccggatccctggctccggcctcccccgcgggctatggcaggctgagcgccgagcgcgggcagccgtccgtcgcagcacacctgggccgggggccgccgggccctcctctcccggtcacgtggccccaccccggtcccacttacctgcgcagccgccaggaagagcgcgcacgctgcccaggactctgaaaccggtatcgggctcccggggtgggggcggggccgggacgggacgagcccagctttccccgcccggctttgccccgcccggatctgtcggcccgacaaccgctctgggcccaggctgctcggtgccaccagccggcacgtcgcggcaatgaccacacactgggctcttttggaaagagtttacagttctcatcgcaacgttgccatcctcttccctatcttttgaaaagtttgacactgggggagggagattggtgcactgtgcttaaggacccatggcagcgagtgcgtgctagataatgttaaaagacaggagaaacaaaattaaattcaacattttaattgtgatataacttatgtaaatactttccaaaaagtatctaagatattccactgtacaacacatcaaaactatctgagaagcgggagacaataaagtgtaaataaggcacacagtttacactcgtaattgcatcctaaactgttgaatagttgatatttacaaccccccaataacgtttttgcatcctgaattagtccttcacatcttgatatttggcataatgttcaaacacactttatacacactgaccgctccttaaaccactcacagatttaataaataccgaaaaaattaagagatttgaaggcttgatcttctatttacttcaagatgacagaagagtaggtttcttgtgatgaaatactacaagaatgaagaattaacaaactgttgtgtaattcatcagaaaagcatattaactctgctgaagtaccactgaatgaaacaaaaatgaagctgtgaagtagcaatctgattagcaggctggcttctatgtcccatcactctcgtagtcttctattattatgttttcttccatgtctccttgggctgaaaagggctggggctggctagcaggcagttcactggcactattctgactcaaaggaagagaccaggtttccggcacagtggcttgagtgggttcacccagagattcctctgcagaatgtcctccattaagctgggcttcatctccgctgtcagggtctatcattccatgttccctgtcagtcagggcttccattttcaatctgtcagattcacagtgcaggcattaataagaaccaaaggagaagatttttaaattacaccatgagtgtgatgattatgaagccatctttcatttacctacattgtgctgtttagctagtccctttaactataaaaacaaaactacaaggtaaatgacaaactgaataagttcctacaacttaaaatacaaaaaggagctgaacacgatggctcatgcctgtactatctgcactgtgggaggccaaggcaggcagatcacttgaggccaggagttcaagaccagcctggccaacatggcaaaaacccatctctattgaaaatagaaaaattagccaggcgtggtggcacgcatctgtaatcccagctactcaggaggctgaggcaggagaattgtttgaacccaggaggcagaagctgcagtgagccaagctcgtgccactgaactccagcctgtacgacagagcaagactctgtctccaaacaaaaaacaaacaaacaaaaaaaccaaaccaaaccacaacaacaaaaacacctaaaaataaaaagaaataatgtcttcagtaaagaatttttcttttttcttttttttcattgagactgtctttctctatcgcccaggcaggagtgcagtggtgcaatctcagtttactgcaacctctgcctcccaggttcaagcgattctcctgcctcagcctcccaagtagctgggattacaggcacatgccatcatgcccaactaatttgtatttttagtagagatggggtttcaccatgttggccagggtaatcttgaactcccgaactcaggtgatccatctgcctccgcctcccaaagtgcggggattacaagtgtgagccaccacacccagccttcagtaaagaatttttacaaattaaaaaggaaaaaatgaaatagaa

SEQ ID NO: 318173 - DNA, 4001 bp, Homo sapiens
aggagtgaaatgatatacccaaggtctcaccactcagtagcagaggcagttctagaaagcaggcctccagacccttatccaggatccttgcaatgggggcttaggggaattagggaatgggtcatggttactgcaagtggcttggccaagaaccagctaagcagctaaggcttgttccatctctgccaagctaggactcgcctcctctcaaccttgtgccacatccagtttttgcttccaggctgggggcctctgattgcttactctaagggacaaaggcaattatttactaaagctaaccccatccaagatgaggaaaatacaacactggcactcaggaattaatttcacaataagtctatgttaaggtgatgttttatttgtggccctgcctgatcaagatgacttccccacaagaaacgtccaaagcaaacaatcttttttttttttaaactgagtctggctctgagacgtgaagaattgtacacttctttaactgtcctccaaaagcagaaaataagccggacagagcagccagaaggacaccagagtcctatgctcagtgtgtcaggaagcgacccacaagttctggaggaacatccttccaggaaactgggcagatacagatcccccaccccgctccgccccgcaaaaggtaagacgatctgtactcggtttggtgacaagcgttcatctggacaagctggaaacaagtctgaacgggagctgcaggcgcgcacgccagcgccaccgagggagcgcggggagtcctcttctcccagaggaccgacgctgcggggacgcgccaaaaccacccgcgggcgatcccagggggctggcgccactgaaacctccgcaggcaactccgcggctaccgctgccccccaccctactcctgcctcttacccccaaggcaccatttctccccctcaactccctgcccctcggcccaagcgcttcggtgggaaacaacgcccactttggagaatcagaggtgagttgtggggacacgccagatgtccagatcgcatcctttcacagatcaaccaagtcagatacaaacacgaaggagtttgcttctctgacattttaaaaacacaccatcaggcagcacactgagacacacacacgggggtaacagccacagggaagtcaataacccacaggggggctcctaactatcgttgtcccgtgctcggggcagagcgcttggggtccctccctatctccaggccacagcgctctcctgcccactgcctgtgcgcaggatgggaaactacggtcgcccggctgccggaacccagagtgggcaagctggggaaaggcccacctcctcgtcctgctcctcctgggacgcgctgctgccccggggcgcgggcggcacagctcctccgggaagcggcggcggcagcgcaaggactccgcgctccagcagcacgcttgccggagcccacgcggcgggcgcccgggcgcccagggtgcctcccaacggcggcggcggcggcggctgatgctctctggagaagccgccgggctccccttcctccgacagagtttctgagcccgaggaggactcggccgaggaagcacccggagaggacgcggcgaccagcgcagaggctggagtccggctgccgtggccactgcagccgcggggcaccggctctggcgcctccgaaactttctcccccatttccctgtctggcccaaagtgcctcccgagcggcgggggcgcggcgcgcactcagcgcctcccggggaagacgcgggctcctgggctcaggctcactggcactgccgctcccgggctgcagggagccccgccagcgactacatggcagtgacggggccgcaggagcccgctgctaagttcacagccgcccgggcccggccgcaaacggaggctcccgcgcgcggggacatgcccgctcgggtccgcgatctgcgctccactgtgctcccgcgctgcacccgagccgcgggtactgcggcttctccttgcaaaacctgcctccgggacggagcaaggagacgggcagcccgcagagccaatggcagggcaggcgcgctggtgggcggaggctgcgacgcctccggccatgagggcctcaggtaggggaggcggggcccgggcgcgggccgtggtcccgctggagcgcctgggcgcaggggacagggaccaggcgggggtccccggagggtgggggcggagcccagaatcggagccaagggctgagactccgaacttagcgggggagtggctgaccgtccttgggacgtcagagggagacggcgagcggatggtgagaccttggagaagaactggactttgtctccaaaaagtggaatcaagaaaacggacaagaaggagggctctatagggaaaaaaggaaccacacacacacagtcacccacgcacacggactcaccagcgtgttggaggaaaaggacagaaacttcgtggtatagtgagcggacccaaaggggagtgacctctaatctctgcttttccgtttaagctctttgggcctcagtttcctcaactgtaaatggctacattactactggtcttggcaggcttagagcaaatatatataatgcatcagcaaagtgcctggcttggatacacggagcgtttttaaaagactatttcctgtctttatttctgtttgtaaactaaaaagttaagtctgagacttgaaccttttgatagggaggaagataaaaaagtatgtccttgtatttaattaggaccaagctctgtagtcctactcaaattgtctgtctcggtatgatcagctaagcagaggatgaaaaggattcactttccaatgtacattctcctagccctgggttgtaaaccaacaggatacaggacaggttgcttcattttccttacctctaagaactaggagaaagaactttcactaaaggtaccaatagagtacccttaagtccttccctggggctggaggatgctgcctgtccggtgactggaatttccttggaagccagcactcagctcagcagtgggaaataaatgattcctctcttgccttcagctctagtcccattctgagctctggcacagtgacctgggatgtaaattcaaccgcctcagttccatgtacgttgatggagatgtgtgccaggtgcaggggatacaaagattaataagtcaggtcccctgcccttgagcagcttatggtcaagcgagagattgatactgcataatatagctcccttatccattttagaagctgtgataagtgatacaggaaaaatgtgtgagggagaagaggaaagagttacagaaaaacagtagcaggtccttgagcatcttagatttctctttgtcagagcagccttgccaaaggtccttaaaaactggaggaccctaattgaaagccccttcagctaatgagcctttcatgctatcatggtatttacaagtgatacatcacacagagggcttcatcatattggacagcaacctttgtcctgatcagtttcctcccctcaagatgaaggggaaggaaatacgttttgtctatcttgcttcagacagccatactgcaaaatggactccggttgtcaggctttcattgtgacgcttctgaattattcacagggatatgaagacctgctgaggcaaaaggtcaagtctagtggcagctaagttgtgagagcaaggctaaagagagagcacagtggggcagtccgaatttaacccgggcctcacaattactttcctatttaggagttctggtctttatctgagcccctacgtggttgattcaccagagctgaactgaaatgacaatttcagccatgcacataaaagaagaggaggagttgcttttcagtacatagggaaataagaagcaaggtcatggtctgaataaccgacagcaagaatgacaatagttattatcgcctgagtcctctgcatcttctctggatggtctcatttaatcctggcaacaaccttgtgaaacaga

SEQ ID NO: 318174 - DNA, 4001 bp, Homo sapiens
aaactcgtggcataattcagtccttctaatcataaaatggaatgtttgacacagctgagttcatatttttaaaaagttactttgaagtgtctcctcttaatgtagacaagattgagaaaagaaagaaaaaaagtaaaggaagaagaggaaagaaagaaaaagcctaatgtgaaatgatatctactaagtccaaagaaaacaaccaggaaacagcacaacaaaaaacagaggcaaaagcaaagcgggaggttaatgcccctgggttttaaacacagagctatggcttagttatgcatttccagctagagagaggagggttaagtagaagaatgagtgcatgccactaaaatattccacacagatggtgagagttgaatgttagggtgggggtggagatgggagaaatgttagggcaatgggtaaatactattcgtacctctaatatgaagaatgtcacagctagcaagaaggttgtgagagccctctaactttttgtaagtgagtccctcattagtataaaatcagggcacaattttagagcaaggactgattagaaaagtattcacttcagaatgtcatgcttttattaattaaggaaataatttctcttgtatgatgcatctacaaaattcaagaggaataataaatcctcagaaccaagcacagttctcattctgcagtctctttctgcagacagtccagtatgagattattgggactgtacagaattcactgaaatgtaattttatatctgtgctgtaagttagaaagagggatatttatgtttgtctaccggatttatattttactgtttattattttaagtgtgacagcacagactaactcacagcttctgcatctttgactaacagatttaaaataaaaatttgctgacacttcctgcatcacagatgtctaacttctgcgccacaaattagatgtggacatgttcatgtagctacatcacatcacaaggcagtcagatgagttaatgggttaaaaaaaaaaacagctaagcaaacacacagctcaactaggtaaacacattgcatgcagtggctggagattctgcagagaggattctaaatgtaccacagttcattaatattctgttgcacagataaaacatggatcacatctaatgaacgtcacaaataacccttctcttgcactctaatccattgtaatgtcttctattattcaatgcagacagaggcctttctttagaaaaaggcaacatagggataaacaaacagtaagagagaaggagaaaaagacagatacaccatggcctactgatacattctttcacaatgagctgttaagatgtttccagaactggggtttagtaactttaaatatgcagcaatgcttttcctctgactgcaatgcaaaatgctggtctgggtgtccacattagctgaaaccaaatgccatgcatttaagacatgttcctccacctcacactgcagtgctctgaggctgtcagtacaaacaaatgctaaatagctattggtcgccagaaagcgagtgccatgcagaaagcattaaaatattaaagacagacaatacttactccaaggtcagccccggaatctgtagcctttcccgctgggctttcatggttgttatatgttagcacactctattgtaaccatgacacacactccctgccagcgtcccggtgatgacagagagccaaaccgaacctctctaaaggactggactaacactctctcgagggggagggggaggctgcaagtttgggtccttccacctctagccgtaatcaagagatgtcagctgctttcctcaggttaacggcagtgcacactgcactgattttgttaaaggaacgaggcttgcagctctgcatatcaagtaattggtttctgatttttttttttttttttaaagaaagtcgctctactcacagacccacttttcacctcagtgaaatgaaaagtccttttcaccctgcagactggggcaaaaaaataaagcaacagtgtcatacttgtaaaagagtttatctcagcacacgtcaactattccccacctccctgtgatgctctcgaatagaattcagccaccctgaggaggctcatcttacacttcccttggtggagttaactaaatcactcatagtccccaagaaataaatgaggaatagtgccacataaaaataattagatctttctctatatatggcaatcatcagaacgaggaataaactaactgcattaatttgggggaagtcagactccgttgtgccgcaaagacttgtgtgaacaggcaaacccgatgataggaaactaccaactggaaatgcaagagataggcacttggatttttattttcgaaaagctcatttttaagatcgcagtgctgtatactttacaaaagcaatctaatatgaataaggagggaaagaaagaacatgaattttgaaagcctgaaagtttcatcttgtatttattaaaagaacctaatttttcacagcattcataacttggaactaagtgtacttccattgtagtgtatgaagaacgtaactgactcacttcctctaatgcattttaaaatgttttaaaacttggcaacccctggtttgttgaaaagaaacactagaacaaattagagctttattttatcaagaattctaattttcaagtactacaaggcatctctttctctttctctctctttctctctctctctttctctttcacacatacacacacacacaaagagagagagagagacagagccaaactgcggtaaaatagcaagtatattcaagcagttatatttcaaaggctatgaagtcaaactctgtctttttacagatgaagaaactgagggcacacagttggcggctataataggattagatcctggtctgtaaatttactcttatcccagaggtctgcctaagcagggatgccacaggtagctgttcaggttgtgccctgggcaaggagggaagtaggaaccaacatctggtctgctttccatggttttatgcctgcacctggctctgggctgcttccactccatttttctcattttcacgaagtctccctcagctctgtgcccttctggagggctacctgtttctaactccacaaaggtgcatatgggccagtggaggtttataggatactctcagaactcttttctacatccttaactatcaacttgctctggggcatttgttaatgcccattgttaactaggtaccagcttatctctcagtgtgagctcacagaaccaaccaatcctcttatcctttggaggtaacaaatccatacttgaaatatagtcactgactccacagagaggcagctagagatgtaaaaagtaattgtaatttagtagaaaaaagcatcacaaaaggaaatactaaaaagatataatggatcccagctactcagaaggttgaggcgggaagacggtttgagtccagcagttttgagaccagcctgggcaacacagcaagactccatctcaaacaaacaaacaagatataatggaacacaaaaaagaggcctcaactttccttaggaaagttggtcggggaaagttcgaaagcatgggtgtcacagccagattatgataaacaaagaaaagaaaaaaatcagttaccaccctataacaaaaaataaagcgaaatccacaaattctttaacttttaaagtagaccttcatctcaggaaacacattagaatattattcaatagccttctacacacagatcttctgaagtaaacttcagttccatatagccaatggactacaatacattttcacttcagtttccttttactacccctaatttaacatacccaaaagaaaactcaccatcctgccctccaaaactccaaaataagcctcctttcaatgtaaaatatccagaatgccaccattctttccacctaatgtcaaaatacattgacccaaaatacattgtatcttggctagattattcctaaatggtc

SEQ ID NO: 318175 - DNA, 4001 bp, Homo sapiens
cagaacagacttctctccctaagaactggttccaggtaagagtagaggctgtaccgcagccaggactacacaactcagaaatatttaagggattctgtccagctgaaatggtaagaaatcatacgaattatcaccatgttgagcagtggcctagttcatgtgtagcatgtatctctcttcaactttattagttgtcttggaggtttggtgcatggttgacacaacttgatgagcaatactacaaaatgagcaatactacaagagagggtctctgaccatatatggcagaacgagaaaaacatagtcacattacttaaaaggtacaacttcagaatccaacatagtttagtggtatcaacacttcaaactgcatcaaaaagcaaatatgactttgaaacctgccagatgtctctctcatacacacaggtgcacatgtgatttgtgtgtgcacccatgtatataaacagtgtatgtgagtattccaggatgtttctgaaatgtaagaaaccatgaaaaacttcaaaaggaaaaactaagttttctaaagtatcacatatccacatttatactacaaaaagttacaggtataaccaaaaagaacgaaccattttcttgggttctttgaacactgaagcatagagattgtgaagctccaaatctgagagcctgcatcctgtttatctgactgcaaagttgctctcatgcatgttcacatgtacatgcaaggcaagttttgaaggaaaacaaagaatcagtattaacacaactcaaaaggtgtgcccctctaaaagtacaacaatcttacttttctgtgctggacacaaatgtggtgagaaatgcctccttcaaagtcatagtctctcaacacaagtgtcagcaaactcttggaactgcctgtcacttgtggcatgagcttcatcttgacattaaaattctttttctttccccatcttttctatcaaatatacgttacaaaatgaaaaggacactcctgtattagtaataaatgccagcaaaccattgaaaaatcaaaatgacaaagttatgtagatctgcctctccacagatagtatgaaatagctaacctgggctatccttgcatcgtacatctgcatcttataaaggtcaaatatttaatagagaggaacatctgaagggctcaacgaaaagtaccagaagcctcaatgactgggtgaatgaaatggataaacatgatcaggtcaaagggacagacttagacaaagtatctcctcctctttccctttttctcccccacctctcacaaggaaatgtcttattatccacatttcaaaaggagaaaacctatgagaagcacatttatcagggttacccaggaaaccacaaggacgaagaaatacctgaaacagtaccccctcccctagcggggcataaacttttcaaagtgtcacccaatacacaaaaccccagctcctgaggggctcaggcagctccgcctgtgggcccctgggaagtgaaagcattccctctccaggcagagatccccgcgtttttacctttgtgttcgccgaagcctgttcccactcctcaaatgaggcaaagtaaagtttgagagcacagtccaaaaattggggtcagacatatccatttctttctctcttcaattcactgtgggttcaaggccatatgactaaaatggggagaggtaaaaaaaaggaagaaagacaaggccaaaaataaaaaaaaaatcccaattatctactcactccctccagagaaaatgtgatgggaactgtgatctcaagaacaacttggagcatgtctgagaagtacccgtcccgtcctagcctttaattaacacacagcctcctctcaaaggtccgggaaactgatttcctctcgggtctgccctctcctagtcaggctcggccagctataaacagtaattacatgagttgagccgtgcgttctgctcaaagcgctgtctgtgggattcagtcggaggtactttgtcatctgtttggcagataccactcgccgcttctgcgaggggcgggggagacgactattttgaggctttggttccggaggctgttgcttatcagcaaaaccattcacatccgaacatgcccagtgccgagtttccttttggtatctacatacaaggaaaagaatttgaatagaaaaagctgctcttgccctcccctcctgaaaaaagcggaaacttaaaagcacttttaaaaaatgggcctattggaggacttgaacctgacacctttgtggacccttccagggtccggctgggaggaggcggcagggccttgtccctggacagcttggtggccgcgcccccagctttcctgcatcccccaccccccaccagccccggccgcgcctgaggagcgggggctcacgggaaagggagcaggcggccgcggcgcgaccccagccggtgccgggacagccccgcagcctgggccgccgctccccctccccggagcccggaatggatccgtcccggaaataaataaataaacccgcggctgctccgggtgtgtgctgcgcgcacctgaggccgacctgtgattcaccgcgggagggatggcagtgacaacgctccggggaagtccacagtgactcctccgccaggacgccgctggttgtataggaaaagcacgcggacgggaagccacactcaccgaaaacctcagtaaactaaatttatgagtttacatctgttccatcaatgaccacggtgcacacctgtttggcttcatggccggcaactacagatctaggtaatggtgagccccgatgtggaaagacactacctggcatttatgtggcaaatgctacaagtattgccccttcaagtacgttagaccttgaaagggcagaatgaagggggctgaatgttcttgttattcattttgaagaaaggcatggtatttaaatatctccccctatccatgaatgtttgtataaagtacataaagaaaaaatataatttaaattagctgccttaagtctggtgtaatatggcaagaaatactaaatcaaaaaagtatatattcagcaaaaaatacatctaaaaatggcttagtccatgcagtaaataccaggaacaaactcgcttacaaaaatgggaggataaagagaaggaagagggggtgtaagctgacaaggtaggcggggtaaacaaaaagaagcctgctgtgggatcttctttatctaattcttgtggcccacattaatattttcacaccaaggactccaagagttttggatgatgtttcatgtccaaggctttcgtatgcgttatctcctcacattcttacagagcctccacagatccttgcaacccacagaggtagacaaagaaggcattattttctcaattttacatttgggactttatcccaaacattcagggacactaaatgacaaaacacacttcaatagatattaatgagcttggtccagcatttttgccccatgctcttcttttaaaaaatgtttctaagtattgcaaaagatgttttgaaggctgacacaaaagagtgtccctgtgctccggagcagtttctagacctcagcactgttgacataggctggataattctttgtctgaggagctttcttgagcattggaggatgtttagcaacattgctgacctcgacctactagatgccagtgctgacaattaaaaatgtctgaggacattgccaaatgtcccttgggaggtaaaatcacccctggttgggaaccactgctccagataaaggcttctctgagaggggtgatacagagcactggtttagagcaaaaattttgggtctgaattctggatacaacacttactatgaccttaaatctcttctcattttccccagctgcaatatggggtccataataggaccaacctgtaagaggctgatatacataaatgaagaggagatggcatacataagccctttcacgcaatgtctacacacacactgcgcataaatgtaggcagtat

SEQ ID NO: 318176 - DNA, 4001 bp, Homo sapiens
atacataaagtgtgtattctgtaaatagtttccctacagtggaatttctaaaaacagctactctatgtaatgtctttctttaaatgttagatgcaatgggagtaaaagcaaaataggttttgtattaagccacagtaaagttgtaaccatgaagtggcagaactttcaagcacttttatgttgttatttttcacagcatgaagacttatctcatccagaagagaaaatattccttatccattatacagaggacggcaggtgtagaaaaagtatattaagtacaataaaaacctagcactctaataatatattagcaagtattcctttgttttgtagcaaatattttaaatagaaaatagctccattattttaattaatgaaaaataatgattcctttatttctaaaattaaaggcccatgaaaaccatgcccctcacaagcactatatgcttcaactatctcctctgaagttgtgataacagacatattacagaaataacaaaaacttaaaaaaggaatttcttctgaaaaacattttcagatcatttaaaatgaattaaaggaaagagaaaactcacagaagaattactatccagtcactaataatctgaactattcagagtttaacagagttaatcatctttttaacaaagagcctttccatatttaacaactgaccccaaagaggacgtggacacaaacagctgtgcattaccagaactttatagaggtgatgaaaacaaagaaaaggaaatccacagcagtgactaaccacactgtgcattcaaaaacaatgaccacactgaaattcattaaggaggtagtctgtttacttaggtttgaacaatagatggtatgtaaccccaacttctctaatccctcttttgtttagctgcaaataatcctttcgttgcctatattaatattatagtaatatgaatattagtattaataattgatacttagaacaaaaagcagacagctagaccagctgaaattcaaagacttaatattaaggaaacatttctaaatgtgctgtatattctgtattccaagcattttttttaatatcaaaataatatataagagtttaacaatggctaatgattagattctttcacaaagaaaaatatcacttatatacaggacaaagagttatgcaggagttaaccatactaatgttgaacatacttatgttctggcttccttaaacttataaactgccaagcagatgttttgttgttgttgttttttccaagttttctgatttgccaagttttaactcagaatgtatttgtacaataaagtcagagtaatttcatcagagaaacttgggtacaaaaaagcaaggcagtgagttacatatcttttctcatctcaacataaacaaattacagcaaactttgagctgccagcaaaaactttcatttcactgacggggaaaattcccagcagctgcacacaactgcaaggcgatcagacagatgccgccgagcggaggttgatcccgacacaaaactgagtcctgcgttcccagaattgaaaggagttgctacccctcgacagacttcccagacacttgacggcatgccagatcagtgcatcagctgtcactgccagccacaatttaactattcttgaataaccagtagaaaaacaaaccaccaaagtgtcaaactaaaagtcatatctattgtctctgacaaaagcagcttcctcactgaaccctgtgatgtgtcatacctgtaaccagaaactccgtatagcgttgccatgtagatactaagaattatgcacatattcgtgcccagtaaaggaatgacaagggaactttgaaatcctcaatggctggccactgacaatgctacatgtcaagaatggagcagtctcctacctggagccctcttcgtcttagaatgctggactcatccatctcaccctctgctttctctgagcctctcacaacagtctagccatgctgtactacctctacttcagcacgctaattcagagcccggcagctgctaaacacttacatcacgctctagctgattggagcccggagtcagctggtccagcttagttattcactccagcaacttcggagatcacggatgcttgcagttcggtgggagagagcagcaagtgggctcagacacctaatgcatttatccaggtggaggaggctcttgctattagacaggaaatcgtgagatccttgttttctcttcttcagaatgctggctgtggcatttcaggagaccactaaatggctttcggcagtagctttgggtcaagccccatctgaagcaactataaggtcacagtggctaagtaaatcagcggtgacagacacctctgtaaaaggcagccgctgactgggatggtgaaaaactagggcacagctggtcagccaagcagcaccactatgcctggcgctcatctcttccaaaggcatcaaagaaaacaaaaatgtagcagaacacacatgctgcctgcaaacctgaaaacggagggctcagggcagctgctctccagccaccaaaccctttacacctcccagcatgaaagcccattcatttacataaatacctgcccttcagttcctactagctcaaagacagaaacagtttaatttccctcatgataataacttagttctgctgatacctgaccaaaatgtaaaaaggttgggtggaggggattctaagagccatcattagttggaatatttaacctatgtatagtgtataagcagctaaagaaaaaattcccatcgtgcaatttcacagtctgtctcagcttgtttactccgttcatcctcatcttatctcaattgaaagcaaccaagagatgaatattaagttttcattactggcatggcacaggagtaacaacatacgacactaccaattcataataaattattcctccttggtgtctattctaaagatatttaaattgagagaatagtttgatcctgagagagatacaaggaccaactgtactttgtctaagaacgacctctttcactctatccattagaataattatttttcttgaaagttaggaagacaggtataaacatttttttaaatcactaactcctggattttacttaacccagttatctagtgatgtttaaatgtgggagaggggaaggaagtgtctagtggttccctacccattcacctgctattccactggttttccatctctttctgtctgtcaacacactaatacgcttgctctcaattgattagattatgtcattaaaaatagctcagggatttatgaatctaaccactgaggaaaattgattgcattttatgttcccaaacggtctttgcatatatctccagacatacaaagaggagcctgtcaagaaatgccaccccagcagagaagggtgtcagggtgtttttccacttaggcatgttgatttgataccacttaaggaagaaaaccccagagagtttttagctctcgcttatatgtggaggagtaatatcatctctaaagcaaaatacagcacaaaaactggtcattcttcaagtcaaagtgtatcaacgaattctagcacaaatgaatttttaaaaaagatttttaaaactacgttttttgtttaaatcaaaggacaaaaataaaagaaacaaaagccacttaagagaggagaaagggccagccttgttctatcttttggcaatctgtaatgctggtggagaacagacccccaaccttcacaggctcacctgcactttaatctgttcctgcaaagagaaaatctggctcttcagtgaaaacgaagggaacgacaattgttgcctgctttctatctcaagtcaccctcctgagagaggagcacagaaagttccctgaatgtcaagagttgttttagacaaagccttggcagcagctccgaatatatttaccagcttacagtgtcattgctatctgcccacagaggcaaaaggaagtcctgacagattttggaaaaaatc

SEQ ID NO: 318177 - DNA, 4001 bp, Homo sapiens
tgggggaaagtagatctaatatcagtttaagttactctaaacgtatctgcctcttattgtctaaactctgaagtacggaattcaatcactccaagggaccagatttatggacaccaaaaaaacatttcttgaaaaattaagtacatataaataaatattcttattatcgtatctaatcgaatgataccaaattgtataggtaatgggagatacatggctccttccaaatggtccaacacagtactctgggacagtgatttctactttagcacacctgcattaatgtctactaaaaatgttctagaaaagtaaagaatggaatactattagtatgtggttttcccaaatttcagtggtaaataccttgtcgtttttggaaactttaaaacttggcacagttccatgtttaattttttaattccccagaaacagacccttaaggtaaacattactgggctttactttttaagattctctgactacttaggtgggattggtctaacttctactgcgacgctactgtgctccacagacagtattactaacaacaaccactccaggatgcttctctaacgttaactatgagacagttctcgttctcatgagtcagtaagctttaattctacaggttttgagagcagtaagtctgtgccaagctcttcgttgtttcatttttaatgaaggaaaacacgaaaagctattttcatttttatactgaacttctttttgtgaaagtagattaagctttatatgcacacgtacacatacaaatgcatacatataaatgtaaacgtatgtaacatgcactcagcacggtctggaggacctaggaacatagaggtttaatagaccatttatcctaactttaccctcaaagaaccaaagtgatttgaaaaccctaagtaaatttggaagcatgaaaactttgcaataacagaaacagccatctcctatattctctactctctccaaaagacatggtctgggcattagtagtgttcttatccccagggttggatatgttctgtggacagattaatgctggaggcccttaagtggaatggagcaggatgggacgggggcgaggggggcaccagagatggatcttccaatcatcaccataatcttccttcagggaaactccgtagtggttcaaagcccaagacagtcacacaaacctgtatctgaattccaggctccaaccttacggaatgaacctgggccaatgtctcaccctctatgcccgttttctcgtctacaaaatgaggcaataacaagtatctcacagtggaggattaaagtaatgcccgtcaagtgcataacatagtgctgagaacttaagagttcaataagttgtcatctccagcactgttatttgtgagaagtcaccttttcctgttctttctcaaacctacgaacttgtaagatcgagaaatacgaaccaaagatgaataaacggggaaaaccaaaatcaaaacaaacaattctgaaaaacctcttcgtcctcaggagcagagacagaactcgaaagtaaaacctccacctacttgcttcctgccgcagtggctggaagaaaaaaacactgacccgtgtgcgctgagataaacaaactcggtggcgcccccctcggatccggggctgggagggtggcggtgagaccactcccggccggaggctctgacccgggcggaatacgcctgcaaagccgcccgagccccggtggctcgtccccctcggcgcccccgctcccaccggagacgcccaggccgactccctcacctccaccagccgacagctcccgggaacaaagtgtatagagagctctttctcccgccccaccatgcccgccgtcttcacgccgcagcctcagcggccgccacctcctccaacccaggatcgacgcgggcctcagctcagacgccctcggcccgcctcccctaggcccagaacgaccccgctcgccgcttccggcttccgctgccatagccgcgcccgttgattggccacgctccgccgacgccccagaaagagggcgggtacgcgcggtctgcccccagcccacgcgccgatgcttaaagcgacacacaaaagaaaggccctgaccttaggcagtgaattcaggttttgtttcggagattttatttgagtgctttttattctactttttttcctttttttcttgactcgggaaaagattgaagtggatcgccttgagtttcaagtttgcagactgcgcagtgcatgaggatcgactgagcaatataaaaagtggaataaaaagcattttaaagtcatgggggcgggggcggaggtgggtagagcataatggacacatctctagagctctaggtgggggttttgaaagatttagaaaaagacaaggaataaaaataaaagggttggcgtctgagccatttgtcttcctgggatgcttaaaaaaagaaaaaacctgtgtgtgagatatcaaaaatgtaaaactatttttaactaattaaaaataaaaagttgtagggggaaggaagatgaactacttaggtacctcttcaaaacgcagatccttggactttacccataattacagaacaagaaacgagcccggggtccgacttcttaatgggtttaaccagaatcaagcccactctttaagaaacaccgcctcggggattgcaggattgggccacacgagcccagccttggtgagcaccgagaatttaagcagcagcgtgtaaggctgggcgttctaccaccttttaaaagttaagcagccctaagtgctgatgccgacttatttcccttccagttaaaaaccgcaaaaaatcctcagccaggctggacgcctgtgaaattgatgcagaaagtaaaccctggcacaggccgtgtaggatttgccaactttgcaccgaacagtccaagggttcttgtgtgcccaggatagcaagctctaaacgtcgtccacaaacgtgaccactgtctggattttcctagggcctttccccgactcctaaacctttttggtttattttcaaactaaagactaagcagccttttaaagaagttttccacgtcagaacaccatgactttccttcctcctcaacccccaacaaaaactcatttccttattcgtgtaaacataaagtttctctagaacagtaatcgaagacagcctgaggtttcttatgttccgattttttttttttttaaacacaggctattactgttcattagtttggctttatttagggaatccttgaggactgccccagcgctaaacaagcataatcaggggacaacaaagaagagggcgggaagagggccgggggagcagccaagatcatcttactactttttctcttaactgggaattcggtttaaagtttctagtcgcaacacgtgatgtaatcttacctttctatgggagaaaagaaaattaattcttcattcttcaacgtgaagcaggtttaagggcaagcatatgcaattagcattctgattctcagagcagcctagtcttgaggaacagaaagaatttaacttggctgcttttgaaaatctgacttgatactttccccgtaaaagttgggtacagttctaggggcatatgtttggatatggtttttaatcattttctttaatgatggtagggtctatgcgaatcaaacgccattcttaacatagacaatatacaacttcgtgtggtggctaagtctatacatttaaagagagcagcctgaaactaaaagttatgttagcagattcaattcatacaaagacaaagaacatctggaaaggaacacactacagataaaatccttatttatgtagaaactttatatacataattgcatttaaaatggtaaatgaaagtgcaattctgtattgtcagctagtgagacttagctgagcccttcataacctggttctccgggtcagtaactaaagttggcttattcttccatgtcccgaggttatgttttaaggaaatgaatgacacccgtttcta

SEQ ID NO: 318178 - DNA, 4001 bp, Homo sapiens
caaaaatgtaaaactatttttaactaattaaaaataaaaagttgtagggggaaggaagatgaactacttaggtacctcttcaaaacgcagatccttggactttacccataattacagaacaagaaacgagcccggggtccgacttcttaatgggtttaaccagaatcaagcccactctttaagaaacaccgcctcggggattgcaggattgggccacacgagcccagccttggtgagcaccgagaatttaagcagcagcgtgtaaggctgggcgttctaccaccttttaaaagttaagcagccctaagtgctgatgccgacttatttcccttccagttaaaaaccgcaaaaaatcctcagccaggctggacgcctgtgaaattgatgcagaaagtaaaccctggcacaggccgtgtaggatttgccaactttgcaccgaacagtccaagggttcttgtgtgcccaggatagcaagctctaaacgtcgtccacaaacgtgaccactgtctggattttcctagggcctttccccgactcctaaacctttttggtttattttcaaactaaagactaagcagccttttaaagaagttttccacgtcagaacaccatgactttccttcctcctcaacccccaacaaaaactcatttccttattcgtgtaaacataaagtttctctagaacagtaatcgaagacagcctgaggtttcttatgttccgattttttttttttttaaacacaggctattactgttcattagtttggctttatttagggaatccttgaggactgccccagcgctaaacaagcataatcaggggacaacaaagaagagggcgggaagagggccgggggagcagccaagatcatcttactactttttctcttaactgggaattcggtttaaagtttctagtcgcaacacgtgatgtaatcttacctttctatgggagaaaagaaaattaattcttcattcttcaacgtgaagcaggtttaagggcaagcatatgcaattagcattctgattctcagagcagcctagtcttgaggaacagaaagaatttaacttggctgcttttgaaaatctgacttgatactttccccgtaaaagttgggtacagttctaggggcatatgtttggatatggtttttaatcattttctttaatgatggtagggtctatgcgaatcaaacgccattcttaacatagacaatatacaacttcgtgtggtggctaagtctatacatttaaagagagcagcctgaaactaaaagttatgttagcagattcaattcatacaaagacaaagaacatctggaaaggaacacactacagataaaatccttatttatgtagaaactttatatacataattgcatttaaaatggtaaatgaaagtgcaattctgtattgtcagctagtgagacttagctgagcccttcataacctggttctccgggtcagtaactaaagttggcttattcttccatgtcccgaggttatgttttaaggaaatgaatgacacccgtttctattttctttacacaacaattctggttttagcaggcgttcactggaatgcttttaaagcatctcttactctagaatgcttcatttcttgaattgctagttcttacctgctccatgtcctctggcatttcaggcatgactccagaattatttcaggagagcagatacgggatgggtcttagcctctgccttctcttgctgggtctttgttcgcttctgcctgcagagagcgcaggcacgccaaaacgtgaggagcagcttcacttgaccttttaaattagcattttgattccaatcccggaatctcgtgcagttctccacatggcagtaagctggtagctgattccccgtagtagtctcgaaaatacccaatgagaagtttcatgtttaattgccagtcaagcctgggtctatttgcaaaactatttggtagaactaactacttaacaaaaacaaaaacaaaaacccaacaacttcctgtcaagattccttgtagttttcttttgcaaaagaagagtgagccacacttttggaaagcacacagatcatgcagttgattcctgttctaaaaggcacagttttctatcattttatttagttacaccttattgcaacagattatgtttagtaaaattctccagtgctttcccttcccagtgcttttaattatttcaaaggagagtaaaaggcagtggtggtaacagcacgcaagaagtaaaatgcaacgggtcatttccattaatactatgctgccctctgagaaaatggtagatggagtgagcggccttaagtttcacaaagcattaaggacttctagataagtgatttccaaacctgcctgcaccacagaacctaagaaacgaaatcattctctgggagcgaagcccagtaatctgttttcgaagactttcaagggtcatgaacgtgctcagtgagctttgcaccgctattctgaattatggctctgtaccaatttaagaacatcaaaaattgccattcaaattgaactaaaaaaatcatctgacttttaatgttacattcatttagagcacacagcgcatggtaaactctaagaggcattcagagaaatctattaatataaattatgaggaattgttgtgtgtgtgtttgcatttgtgaacaaatgtgaacctgaaaaagccagtccttcaagatggatcccaagtggctaactgggcataatttatttatttttattatttcaagacagggtctccctctgtcacccacgttggagagcagtggtgccatcacagctcactgcagcctcgaactcctgggccccacgtaattctacagcctcagcctcccaagcagctccacagataaggagtgaatattcgccttggccattcccggattccttagctccaagcacacattcttcttagaccacagggtattctcagggtatgcttaaagttattgctgtcaggtgcatctgccatacaacgctatttatttattattattattattatttttttttttttttcttttttgagacggagtctcgctctgttgcccaggccggactgcggactgcagtggcgcaatctcggctcactgcaagctccgcttcccgggttcacgccattctcctgcctcagcttcccgagtagctgggactacaggcgcccgccgccgcgcccggctaattttttgtatttttagtagagacggggtttcaccttgttagccaggatggtctcgatctcctgacctcatgatccacccgcctcggcctcccaaagtgctgggattacaggcgtgagccaccgcgcccggcccttatttattatttttaagacggactctcgctctgctgcccaggctggaatgtagtgacatgatctcggctcactgcaacctccgcctcccgggttcaagcaattctccttcctcagcctcctgagtagctaggattacaggtgtatgccaccacacccggctaatttttgtatttttagtatagacggtgtttcaccatgttggtcaggctggtctcgaactcctgacctcaagtgatccgcctgcctcagcctaccaaggtgctgggattacaggcatgagccacagcgcccagttcagacaacactttaaaaaggaagatataagaatagccgataagtacataaaaagatgctcaacattagagaagcaaattaaaaccacatcaagataccattacatacctaacagaatggccaaagttaaagactgaaagcatcaaatgataatataagggaggcaaattttacttccaccttttcagggttttctggctagacttaagaattaaattaaggtagatcaacatacaagactattttatacaaacttaatgtggcatgggcccttccaaaggaagtgaagacccaaagatggagttagagttgcaattaaataccaaattagacagaatactaaattgtgaaaaagtaaat

SEQ ID NO: 318179 - DNA, 4001 bp, Homo sapiens
ctcactgcagcctccacttcctgggctcaagtgattctcctacctcagcctcctgagtagctgggactacaggcgtgagcgagcacaccaagctgaatggggatattactaatagtcctctgtaaatagggtggttgggaggcttaagtgaaatataagctaatcctcaggataatgtctggtatagtgtgggcactcagtaaacacctgaggagctacattccaaaaaaggcttagatggtgaatatgagtgagtaaaaagggaaaagttatccagtgagagaaacgggcagtgaacagtgggaacactggatagaggagggcctccaatacttcctgaaggacaataaaaacagcacttggaaaaataactgcagtattggatgtgaggggaattggaggcagtagtcgtgccaagacctcaactactgattaaaagcaataacgaaaatgttaggccgggcgcggtggctcacgcctgtaatcccagcactttgggaggctgaggctggcggatcacgagttcaggagatcgagaccatactggctaacacggtgaaaccccgtctctactaaaaatacaaaaaaaaaaaaaaaaaaaaaaaaaaaattagccgggcgtggtggcgggcacctgtagtccctgttactcgggatgctgaggcaggagaatggcatgaacccaggaggcggaggttgcagtgagccgagatcgccctactgcactccagcctgggcaacagagcaagactccgttaaaaaaaataaaaataaccaaaatgtttgcacaaatgataataaatattcctacacagtcaccatttttttttagacggagtcttgctctgttaccaggttggaatgcagtggtgctatctcggctcactgcaatctctgcctcccgggttcaagcgattctcctgcctcagcctcccgacttcaggcgtgcgacaccacgcccagctaagttttgtatttttagtagagacggggtttcaccatgttggccaggatggtcttcttctcttgacctcgtcatccgcccgcctcggcctcccaaagtgctgagattacaggcgtgagccacgcgcccggcctcacagtcaccattataatttatgtaaggctaagatcatacctttttccagccatccccaaatttcactcctgacttcctccaaataatttagaggaacaggaaaatgagtagagagggttcattgttcgctgggtctaaaaacagatctaaaaatagcctgcccctttcaaggctcgggttaaaggggctgactcagttccaccggacatttgttcctcacaaaccttccaaagtccctgcctctggccctgggagatcgaggctctcggagtcaggctctatgggactccctagggagaagagggaagagggatggtagaaaaacaggggacgactccgaggcccaagtctctttcagatgccctccaagctcgggatcacgaggggacgaaccccaatttcgtcccgtgccccggcagaagccaccctgcactgcttctttccccaggctgggaaacctccaaggactctcccctctgggtccttactcacgcgcacgtgttcggagctccgcagggcgcagcagcaccggcagaggccggaggggaaagggcagccgggagccgaggggaaccccgccccggggcggctactgggcgtggcttcggtgggcggggcccttgaccccgcctaggaaaggccgggctttaaaaaaaaaaaaaaatgcgagtgcggtggcagaggtgaacctgcttcttagaggagagaagggctggggtctgagcaatggctgggtttgttggactcccatcccatctcttaagggtagaaggggcgcatagttcgcagctgctcaggagagaatctgtgtgtcctagtggagccaggcttcctgcctgcccacactgagcgcccccggaacgctggttccgctcacgagcgtggcgcctttccgttgctgcaggcccagcccacgcttttgcgcttcccacgcatatcctttttctggctttctgcggcagcgctgtcattcggctaatggatcgctcacccacgcaggtcaccttggtccacggtcttcgggatctttccaggaggttttcgaatagattaagccagtcactcctactgctgacctctgcaggaccggcctccctagtgccctgcagtgggattcttcgccgagctgcagtaactgaagaacactggctttctctgctagacttgccctgcaccatggcacagtcaggcagagtccttggtcaggacagactgcctgcaaggctaccaggatttctttggaacactaaaacttccctctcccagtggctagagtccatatgattctgctggggtccagagtggaaggcctacaagcagtgattcccaactccattctctaattcccccaaattcctttccgacacccgccccccaacaacaacaaccaatcctgtaagttttgctgatctcttgcacctggcaccattgccaggtgaacccctgggaaccaagccactgcccttggcatctgccaacatgtttcattgtctatttcctcagctctttcataatgaaaaaggtatgcttcttgtgcaccccaactcttgcagacctctcctaagaaagcccagagccccagtttgattccagcaagagaccctaggctgtagggccaaagagccactggaggggaagtggcaagctcaaatcctccccagttttgatgcagttggacataggctctggttgggaaaaggcttacataaatacagtaatttaaaaagtcacatgaccagtgctgggctggtaggcaggagctctgctttgcagttaaataggaatgtggctgaagactgctgccataatcaatgcccacatccggctgtcacagcgtgttcataaaggaaggttatgagagctataaaaccaggcagattgggtgggtaattgtcctaccgagctctgctaaaggagaaattgcattggcatctcatatatttcgctttctttccttccaaacacacaaagtggagagggcagagctaccctgaagattcatgaaaaggaaagatagggtgtgtgtgtgtgtgtgtgtgtgtgtgtgtatgtgtgtgtgtgaatgtgcatgtgtgctttcagagaagagacaagaagtaactgaggacagggagctatgcagacctttggggagagagggaccaataatctggtgatgactggattcagattagtccaggtagaaggcaggatttatgtggaaggccagccattataaataaggctgtgaggtaagccatattttcatgtcctgttgaacaagtggtcaactttttgggctataggtctttcaatgacctttggagaaaaacctagatgaagattttgtttccaacttaaaaatccttcatagtcaacctttttgacttccatccttttaaattctgaattaattttgatgggttgatttatgttttttttacctgtaatatcaactatttttctacttttttgtttcttcttgcaaagacaaaattattgagaataataacaaaaaataaaagggaacatttctagaaaaaaagatgcagctagatggaaagcaaaggactaggggaagtccattagctctgagtttgacctcataacttaaagctgacctcaagtgacaccaggtccccaagcttcttccctgcctttctctttatcctccatctctcctctcattcctgcttccctccttgatgctttctgcctctaagactgctctttttctttctccctgaacagggagaaaaaccaccagtagagaaatatctagtcatttgttcagttagtcagtcactcagtcaatcaacatttacgaaacatctatcatgtgccagactctgttcagatgctgcagataaagtcagaacaatagagattcctgcctgcctaaagcttacagtctagaggagaa

SEQ ID NO: 318180 - DNA, 4001 bp, Homo sapiens
aaccttctcttctataaaattagggatttgaactacgtgatgctcctaaaatacgacaccaccgttgcactcctcagtaaaaaccattaactgacttgtaatattagcgtttacaaactctaaaagcattagtaaaaaaattagtatgtttaaagactaaaacaaatgcacagatcaagggtagttaaatccttccaagttagttcaaaatgtgatataaaagctgtacacggctgaaaaatatataaagatgataaagcgaaacttctctgggtaaagtacaaagtaatgttctaagtatatactgttaagtgcaaaggaagaaatacaaatttaaagcacttcaacacacatctggctaaatgatcttttccaaatcttacataaccaagaaacttcatgcagtattttaatgttgtttaatttcgagtttgcaaaaacattctatttaagtggaaaaggcatcatccagagcgtttttgcaacgaaaatgtcaagcctttcttgatttttaaaacaatactgtgaaaaacgtcgatagactgcgtagatgactgagccattagtaaagaaatgtttttaaagggaaattttaaacatttattaaaatagcctgaaacatcatttttgtccgcatagtcaactgtttagatttccctgggagaaaaatgtattttaccgactattcagaaatcttaagccaaggtttaaaacacagaacgcagtaccaatacaaaatctcgtgacccctacctacgaaatcaacgattcttcacattattccagcgcgcccgaaagactagccatttcagaaccaccataaccgttctagaaatatctggctaaaaaactgtaactgatccaataggaatattccacagaacagggccacagagcaggataaacacctaggggatattcatccacggtaaatgccgaacacagaacatggcacagagctcgaaatgcaaagaacgatgcggcgactacaccacggtactccaaaaccctttgtctggaaaccggaaggtcccacaccacacgatcctctctggaggaacctggactaatactattttgataaagagaaaaaggatgtgaggtgacttgactaaacaagtgcaaatcacccgcctcgcactgtactgcaggcggcttgttccacgacgcagtacgaaaaacaagcgttaacgtttcatttttcggccatttttacgcgatggggggcggggaggaattgtttctgatgtccagctaacgccgcgcgcgcgcgcgcgtgtgggccgggagtcttagggggcgctctgaggcgatgggcaaggagcggcgtgaaggccgagacaccgggaaaagaaagaaacgctgctcaaacaagcaggctcttcagagtctgcgaaatcctccattttgggggaacattttcagagaaaaaaaggcgaacgggttatttggcactggcgctacccaaggacttagatatcttaaccatcctcctcaaacggcaagcccccagtgtacagtctgtccctcaggcctcgagcgagctcctccctccccctcagcgccgcggcccgcgtgtaacgggctagtcgtcccgcccccgcccacaacgagcccaggacgcgcaggaagctcggccggtcagcgcacctcttcacccaaaatctcccgccgcaccctgggcccttggccggccgcgtgtttccctcccggaccgctcacctccgccgccctagaaggctggttgcgccgccactgcgctcctaacatggcggccgccgatcaggcggctcacatacgcaacgcggagggaggcagagcgggagcgagcaagaaaggcgcgccgccggctccccgcagcccctgtcgccgtcgttgtcccctcccggcggacacggagaacccccagccacccgaccccgactcttacccgcttcacgcctaccttagggaaagggagagggaaaaggagaggtacctctctcccagcgagcgggacgcggagactcccacaatcccccgcagcaacggcgctggcgagaagcggcggcagcggctgcagcccaagaacaaacccactctcgcgagagagctcgcccccaccccctcgatctggttcggcgcgcgccaggcccctccccctactcagcgcgcgcacctcgctcgtgcactcgcctgcggtcgttgttctttaatcccggagatccctctccgtcatccagctgaggcgggaaatggaggaacagacgtggcttacgagttcgagtcccattcccgaaaaggctgtttgtcaacctcctgaatagcataatacaaagtttaaatagggtatgccttagaagggattcgcgagagtccctggcttagactcgacttttatgctctctggttgttctgtttgccaaggaatggtggaaagcgccagatattggggccacaaagggaaaacgataccattttggctggtttttatttaggtatgtttatttatttatcataaataaactgtgttgctcaggttggagtgcgctggcgttatcatggctcattgcagcctcgaactcctatcctcaagggatcctcccacctcagcctccccagtagctgggactacaggctcgcaccaccatggccagctaacttttttatttttattttttccgtagagatggtgtctcgttattttgcctaggctggtctggaactccttggctcaagcagtgctcccgcctccgcctctcagcattggattaagggcgtgagcctacacgcccagccagctgttttttttgttttgttttttgttttgagacggagtctcactctgtcacccaggctggagtgcagtggcgcgatctcggctcactgcaaactccgcctcccgggttcacgccattctcctgcctcagcctccggagtagctgggactacaggcgcccgccacgacgcctggctaatttctttttgcatttttaatagaggcgggggtttcaccgtgttagccaggatgctctcgatctcctgaccttgtgatccgcccgcctcggcctcccaaagtggccagctggtttttaaaatcaggaattctgtgcaggagggtcgttgaggcggaggaccgcgagccttttccttcctaaagaccaccgccgccttttggtgaatttgactgaatgcaatacactcttgggactgaggtactggttaggtacccgggttggagggatttgagctccggccttcagaggcttaagtaaattgtttggagacctaatctggctgcaactctctccccaaccatccttgcagaactccgcatctggagagttgggaattttccagcacagttaatgattataatatggagtgctttctataaggtgggcaatgcaataagcagtttacacataaccctacaataaccttgagaggcggctactgtgggataccatttggtagatcacaaaactgagacattaaaaggttatgtgatttgaggcacggtagatctcgcctgtaatcccaccacttttggaggccttggcgggtggatcacttgagttcaagagttccagaccagcctgggcatcgtggcgaaacaccgtctctactaaaataataataataacacaaagttagctgggcgtggtggtgtacgcctgtggtcccagctactcacctggtacggaggacggggctgaggatcgtttgagccggaggcggaggttgccgtgagcctagtgcaccactgcacactccagcctgggctacagagtcagacattgtctcaaaaaaaaaaaaaaaaaaaaaaaaaaggttatgtaattcaataaagtgaaaaagctggtcagtggagtcttgatgcctcaacgaagcactacctgaaatggcatagccataaaaatgaagttacttggccaggcgcggtgactcatgcctgtaatcccagcactttggaaacccgaggcaggtggatcacttgaggtcgggagttcgagactagc

SEQ ID NO: 318181 - DNA, 4001 bp, Homo sapiens
gcgtttacaaactctaaaagcattagtaaaaaaattagtatgtttaaagactaaaacaaatgcacagatcaagggtagttaaatccttccaagttagttcaaaatgtgatataaaagctgtacacggctgaaaaatatataaagatgataaagcgaaacttctctgggtaaagtacaaagtaatgttctaagtatatactgttaagtgcaaaggaagaaatacaaatttaaagcacttcaacacacatctggctaaatgatcttttccaaatcttacataaccaagaaacttcatgcagtattttaatgttgtttaatttcgagtttgcaaaaacattctatttaagtggaaaaggcatcatccagagcgtttttgcaacgaaaatgtcaagcctttcttgatttttaaaacaatactgtgaaaaacgtcgatagactgcgtagatgactgagccattagtaaagaaatgtttttaaagggaaattttaaacatttattaaaatagcctgaaacatcatttttgtccgcatagtcaactgtttagatttccctgggagaaaaatgtattttaccgactattcagaaatcttaagccaaggtttaaaacacagaacgcagtaccaatacaaaatctcgtgacccctacctacgaaatcaacgattcttcacattattccagcgcgcccgaaagactagccatttcagaaccaccataaccgttctagaaatatctggctaaaaaactgtaactgatccaataggaatattccacagaacagggccacagagcaggataaacacctaggggatattcatccacggtaaatgccgaacacagaacatggcacagagctcgaaatgcaaagaacgatgcggcgactacaccacggtactccaaaaccctttgtctggaaaccggaaggtcccacaccacacgatcctctctggaggaacctggactaatactattttgataaagagaaaaaggatgtgaggtgacttgactaaacaagtgcaaatcacccgcctcgcactgtactgcaggcggcttgttccacgacgcagtacgaaaaacaagcgttaacgtttcatttttcggccatttttacgcgatggggggcggggaggaattgtttctgatgtccagctaacgccgcgcgcgcgcgcgcgtgtgggccgggagtcttagggggcgctctgaggcgatgggcaaggagcggcgtgaaggccgagacaccgggaaaagaaagaaacgctgctcaaacaagcaggctcttcagagtctgcgaaatcctccattttgggggaacattttcagagaaaaaaaggcgaacgggttatttggcactggcgctacccaaggacttagatatcttaaccatcctcctcaaacggcaagcccccagtgtacagtctgtccctcaggcctcgagcgagctcctccctccccctcagcgccgcggcccgcgtgtaacgggctagtcgtcccgcccccgcccacaacgagcccaggacgcgcaggaagctcggccggtcagcgcacctcttcacccaaaatctcccgccgcaccctgggcccttggccggccgcgtgtttccctcccggaccgctcacctccgccgccctagaaggctggttgcgccgccactgcgctcctaacatggcggccgccgatcaggcggctcacatacgcaacgcggagggaggcagagcgggagcgagcaagaaaggcgcgccgccggctccccgcagcccctgtcgccgtcgttgtcccctcccggcggacacggagaacccccagccacccgaccccgactcttacccgcttcacgcctaccttagggaaagggagagggaaaaggagaggtacctctctcccagcgagcgggacgcggagactcccacaatcccccgcagcaacggcgctggcgagaagcggcggcagcggctgcagcccaagaacaaacccactctcgcgagagagctcgcccccaccccctcgatctggttcggcgcgcgccaggcccctccccctactcagcgcgcgcacctcgctcgtgcactcgcctgcggtcgttgttctttaatcccggagatccctctccgtcatccagctgaggcgggaaatggaggaacagacgtggcttacgagttcgagtcccattcccgaaaaggctgtttgtcaacctcctgaatagcataatacaaagtttaaatagggtatgccttagaagggattcgcgagagtccctggcttagactcgacttttatgctctctggttgttctgtttgccaaggaatggtggaaagcgccagatattggggccacaaagggaaaacgataccattttggctggtttttatttaggtatgtttatttatttatcataaataaactgtgttgctcaggttggagtgcgctggcgttatcatggctcattgcagcctcgaactcctatcctcaagggatcctcccacctcagcctccccagtagctgggactacaggctcgcaccaccatggccagctaacttttttatttttattttttccgtagagatggtgtctcgttattttgcctaggctggtctggaactccttggctcaagcagtgctcccgcctccgcctctcagcattggattaagggcgtgagcctacacgcccagccagctgttttttttgttttgttttttgttttgagacggagtctcactctgtcacccaggctggagtgcagtggcgcgatctcggctcactgcaaactccgcctcccgggttcacgccattctcctgcctcagcctccggagtagctgggactacaggcgcccgccacgacgcctggctaatttctttttgcatttttaatagaggcgggggtttcaccgtgttagccaggatgctctcgatctcctgaccttgtgatccgcccgcctcggcctcccaaagtggccagctggtttttaaaatcaggaattctgtgcaggagggtcgttgaggcggaggaccgcgagccttttccttcctaaagaccaccgccgccttttggtgaatttgactgaatgcaatacactcttgggactgaggtactggttaggtacccgggttggagggatttgagctccggccttcagaggcttaagtaaattgtttggagacctaatctggctgcaactctctccccaaccatccttgcagaactccgcatctggagagttgggaattttccagcacagttaatgattataatatggagtgctttctataaggtgggcaatgcaataagcagtttacacataaccctacaataaccttgagaggcggctactgtgggataccatttggtagatcacaaaactgagacattaaaaggttatgtgatttgaggcacggtagatctcgcctgtaatcccaccacttttggaggccttggcgggtggatcacttgagttcaagagttccagaccagcctgggcatcgtggcgaaacaccgtctctactaaaataataataataacacaaagttagctgggcgtggtggtgtacgcctgtggtcccagctactcacctggtacggaggacggggctgaggatcgtttgagccggaggcggaggttgccgtgagcctagtgcaccactgcacactccagcctgggctacagagtcagacattgtctcaaaaaaaaaaaaaaaaaaaaaaaaaaggttatgtaattcaataaagtgaaaaagctggtcagtggagtcttgatgcctcaacgaagcactacctgaaatggcatagccataaaaatgaagttacttggccaggcgcggtgactcatgcctgtaatcccagcactttggaaacccgaggcaggtggatcacttgaggtcgggagttcgagactagcctgaccaacatggagaaaccccgtctctactcgaaatacaaaaattaaccgggcatggtggtgcataccagtaatcccagctactcgagaggctgaggcaggagaa

SEQ ID NO: 318182 - DNA, 4001 bp, Homo sapiens
tatatttatgaggcaggatttatgtatgttctgcatgccttgatctattgtgcctagattcatatcctagcttttatcatgatctggctcaggcaagccatttaactggggggtcagtggcctcactttaaatgtgttgtgaagataaaatgaaatcaaaagtattttaaaaagaaaatagaaaactaatataccaaatattgctgatgtggcgaattagctcaattatttaagtccctacgtagggagaatgggctgaggccctatttattttcattccatgaatttctctctgaattccatacttgtctttcacagagccaaagaggaccatggctacctatgcattagtccacataatttacctctaccgaaaattacttccttattgatctttctcaggctttgctttcaaccggaccaaatatctgtcataaagtaagactcagacatattctacgtttatgattactattaagcttttgcaatcgtgaggcaacatcaagaacagaaacctatctgaaaggtttccaatcgcattagcggattggaatcactggtctgatgactctctaaggctacaggtgggaactgcccatacccggtggggaccaagctgatgaagtctgcaattctcaaaagcacagatcatgacatgcactctccgtgaggggtcattccttaaaagtctgctcactacgaaagctcctggaaatgtcgggcaggtgcttagggaaagaatgagaaatccctagtcagtcacaagtctttgtagtgttactgctacagccgatgcaggaaagtggctagggagggggtggtgccggctttcaaaggagtactcagaatctctacacgatgccagagctggtctctggcagggaaggctgtgatggccttgactctggtcaagtgggtttttactcagggaagggtgaaacagaagtggctctgcgaggtgccaaaataatcccctttatggccacgcaagtctgcaacatgcggcactcggacagtctcttcccaataccctcccttaacgagagcgcgcgcccgcgggggcccattaccatcctgcaggatgagggtgggctgcaccgcctgtacccggaactgtctggccctccagccggggctgggcgtccgcaccacctcgctatcggaaagccaggtcacggtctcaaagttgtccccgcgagccagcgcctcggcctcggcgtggtgcactgccacgcggtcgaactggtagaggccgccggagtggtcgaagtgcacgtgggtggccacggcaagcagtggccggcgcgccgcgtcctctttggcctctcggtcctgcaagaggccggaggagtacaggtactccgggaggctgcgcagccccaggcctgtatcgatcaccacgtcctgctcggagccgcgcaccagccagatgttggcacggttgcccgactcgtagaaacgttcttgaatccagaagataccatcgcctagagacttgtgggcgtaccactcgagcgccgacatgctgggcaggggtgcagccaggcggggtgagtgtgggcgtgcgagtctcccacaggctgtccacacacagggcactgcggctgtgtgaagcggtctgcctgcagccagggaggaggcgtagagcgaggcgggggcgtgggatgcgggggtcggaataggaggaggaaggacgcagaccgacgctgcccgtagcgtgcgctcccgcacccttccgccaggtcggcagcaagcagaggctgcgccaccagcacgggggcgcaggagctaccgcagcctcggcagccgcaccacgagagagctttaacgcaggggccactgcagcagaatggagactcaggtggcgaccgtttcgccaccccgggcgtgtgacagcagaggcccgcagtgagggtgggaagagctagaaccgcccacccactggctctgcagggcgcgcactcccagctggcgcagaaagtgtggggcctcgcgggttgtacggcgactacggcgcctgccaagggcaaaaaaacctctttgccgagggggtggggccttcctagggagtgggcggggctagttggtagggctcactccgcggtcctggtgccgcgtgcaggtcggtgcgcgcttctcccgaggtggaacgggcggcagtcaagcgccggcgttctctgccgtcaccctttccttgccggccggcacttcggctgcagagttttgcccacgcttcgagacttagggagcaggtaaccgaggaagcaatcgaagacttgggaggggtggtgagggtagaggggaattaaaggggcacgtggaaaaggtgaggggaagtcaggggtagagattcattaaagcgcctctggtttgaggggcgtttggagatagcttggtacctcccctccttgtcctgctcccttcagaattttttaagtccaatttccagatcttacctagtctctactcctaggactgtttgcagtgagttagaagggtatttatgctcttactgatagtaggttattttcaaaatccatggctttatgattttttaggcactagtcattgccgcagattgcagctgaggaccgactattcagtatctgttttcgtaactgttggcactttatatcgtagggaagggagttgttaatatggtttgtcttttcttataaaaaataaaattctatatccaccctttttttaattttattattatttatttatttatttatttattttggtttgtctgcccttggaagagagtaaagcgagttggtagaaaggctcaaataaagaaaaggagcacctggtgaggacgggaaaagtgaataatgactgggtgtggccccgccagccacataaatcatccgctctgttaacatcaggtcactgtctccactccccgcttcccagctattgaaatatctatttagggtttttgtttgtttgtttgttttttgagacagagtctctgttgcccagtctggagtgcggtggcgcgatctcgtctcactgcatcctccgcctcctgggttctagcgattctcctgcttcagcctcccgaggagctgaggttacaggcgcctgccactgcacccggctaattttgtatttttaatagaaacggggtttcaccatgttggccaggctggtcttgaactcctgacctcaaatgatccgcctgcctcggcctcccaaagtgctgggattacaggcgtgagccactacacccggccagaagcatctatttaggcttcagaaattcccttgagaacttaactaacctcttaagttagtcaggaaaaatgataaagagactcatgagacagcattacaaaagaattatgataacctttactgtgacaactactaataagccttcatggaaggagaggtgtacgctcctttcctaccctcctaaagtctttggtgggcatgcagcttttctaaatactttgctaatcttcacagagattattcggttactcagctgggggctttccttatgcacaagtcgctgagctgggtaattcatgaacagagttgtgtaaaaaggtcataatctggattctcaggagtttgagggaagataatgtctgtacacaattacttgcaaaataaagcattacggggtatgtaccacagaggaagtaaaagctagattcagtaagaatacaggtggaagggattcgtgaggagtggcttttgagctggccttaaaagactacttttagggcattctcagcagagtaatatagggccctcagtagtctgggtactttttctctaggcagaagcaagccactagtggtgaaatggagtgatatctctaccaggccatgagctcagcaataatttatccaataatcattggccttttgctaggctttcgttagtaatggggacataaaaaggagaataagtttccaaggagaccttcacacttccaggtccccctgcctgcatcccacatctcactggatatccttttttaa

SEQ ID NO: 318183 - DNA, 4001 bp, Homo sapiens
gattctgtctaaaaaaaaaaaaaattgtatccaaagttggagtttgcctttattattgcaaatgagataataacctttcaagtaggaaaacaacaaaaaggaaaactatataatgaaatttcttttactcccagaaccaaaataacgagacttccagatagaaatttgcatggagtcaatcagaattacatattattttcatttccgaacagaattactccatcaagttttctgatatcttcctaatgtttctcagtaaaactttagcaaagtaataaaaattcacctaagaatgatcaaaattgcgttgagtcccaaataaataattttttttattttaagggaaaaattccgcactttgctttcttttttttttttttaggtaggcagggacaatcaggaagcagccccggattttcagaaacgatctttagcatcaccaagacatagactaaagaaacatgtaatgcacaacttaggctgctccttcatccaaggcaattcaaatttccacggataccaagtcttcaatggccggtgtcaaccattcaatagaagcataccagaaaatgttgcgattgccttcttcaccacaagagtctaagtgacacaaatttgggcagaagtaattatttggccaagccgggaggcaggaagcttaaataccgcctctgtaggaagtgcgggggatccgaagcaaacaccccaaagtttgtttgtgagtggaggcgcggaggcgcccggagccacgccgaagctcacctggtcagcgcacagagccgggtaggagtcgggtctagccctagtttgctcctgagcgcttcgttcctctcaggctactgcgtttaaatcaatactgggtggcaaacgatacccattctttgggctctgaagtttggaattcatgggttctgcggcacaagaaagtttcttcacaggttatttccctgtccgaggctgtcgcttagctcatctcctcccggtgcggccctggggtgtccaccaagccgccgggcagatcgctgccccgtgctgcggcatcttgatgcccaggaccccgaggctgtggggcagcccctcctacctgggacaagcggccagaactccttttcccacagggaagaacactccaagcccccggaagagtgcgcatcctaaggagatgtctcccaacgcctagacaaagacagcgctgggaaaagttggaccaactggcacccccgcaaggcgaacagagcagtcccctcggccttcgtggccgagccggctacgcgctctcggagtcgcggccaacttttcccgcgagcttctgagcaacttgccgcaagttggggcgagggggcagagcaggggtcaagggcgcgcggagggactgatctcgctcctgtcggtttcctcgtacctccccgcgtacctgctgatgtatccgtccccgtcgccgtcgcacgtctggaagaggcgccgcatcctctcctcctcgccggtgctggacgtgtcgctgctgctgctgctgctgccgctgccgccgccgccgccgccgctgctggagctccccgcagccgctgccgccgcggccgccatcatgcgcccgctccctacttgggaggaggagtacgcgcgaccgcagctggaatccgcgcggcgcgcaagctgcctgcagccccgaacttgcctgacaacggagcatgcccagtggccgccggggcgctccgggcgagggattccacctctccgggttttgcccggactgggaagatgggcgctctggaatcgcccgaggaggcacctcagggaagagggaggaggggaaggtggctggaagagtcagggagctaagggtggcaacgggaacacaagaggaggcagaatacactggaagcccccgggaagggtgtcagcattgtgcatccggcaacgacgcgggcccgggacacttggggacgcttcaggcagagggcaggtgtactcccggcagaccttctccgaccgcccggagtcatggcttccttttccagagaagctatataaacactctccttctgcaaactcaaaacggtgcttgtaatcccactctccaggattgttccgggttctgtacccatagccaccaatgagaaccggaatgactggcctttttatgaaattttgacacctgtcaagaaacctggccctcgcagccctcatcttggctcccactctgtactgggaagagtctgcacgctgtgtggcattgtgtacgttgggtcaatttctggaaacggctcactctactggccaggcatcactagaatttcccccaacagctttaataatgccaagagcgaacataatagatggtctcatttgatccacactacagacctggaagatgcctcttttattatcaatcctacgacttaggaagtattaatagataagtacctcatagagttatcttacatataaaaggagagcagacataatgcagttaggacaatgtctgacacctagtaagtgctcaacaactgttagctctcattgttcccaatttacaggtaagaaaactgaggtaccaagacctgctcaaggttccaggtttagtaagtgttagggcagaggcaagcccgggcagcctaactccagagcaggagcctttaaacactgcactattcccccatagccaaagggaaaccacagtgaagcaatttgtggtttcgtgaatgactcattattctgtcctggattttctgccagagaggcgtgtgaagttctctggtggttttaaaatatgtccacagattctttggtgcacccctcatcaagaggtggagtctgttgcttcccctaaacctggattggacttgtgactgccttgacttctgagactaggttagaaaaggcaatgcagattgcacttggctctctcccttgggacacttacctttgaagccttgagctgcctgaaaagaagtttggctaccctgaagctggagaaaccatgcagaaagaccatgtaaagaaaaaaggagatgaccaaagagctacagctgttctagccctggatcttagaatcttcccagactaggtgccagacatgagtgagagatgatgctagctctagatgctgcaactgcattggagaccctgagcaaaactggctaaccaacccccagagctgtgaagataataattaaaaattgttgttttaagccattaagttttgaggtgatttgttatgcagcaatatataactggaacaagtccatatgtcttgggaatgtctgctaggtcagaaggaaggaatctctgctctctttctcctcctctccaccccatctacctattcctactttacttctttattattctctaagttcccagtatttcagggcactaaaatcatagattcatgagttaatgagttaatgggttatcatgggagtgggactagtgactttataagaagagaaggagagacctgagttagcaggctcagcccccttgccatgtgatgccctgcactgttttgggactctgcacagagtccccaccagcagggtggcccattgaccttggacttttcattctccagaactgtaagaaataaattcatttctttataaatcaccctagtttcaggtagtctgttctaagcaacagaaaattgacaagaccagaaattagtaccgggagtggggtgttaacgaaaacgaatacctgaaaatggagaagcagctttgaaactggataatgagcagaggctacaagaatgaagcagcagtctagaaaaagcctaggttctagtgagggctgagaagacaggaagaacagggaaagtttggaactccttagaaattggttaaatggtcataatcagaatgctgatggaactatggacagtaaaggccattctgacaaggtctcagatggaactgaggaacaaggtacaagaaaatggagtaaagaccatccttgttataaattggcaaagaacttagctgaactgttctatgcctgagggc

SEQ ID NO: 318184 - DNA, 4001 bp, Homo sapiens
ccgttaattataaaattggcaaaagtcacttaaatcctcatgcctcctccctcacctcccatttttaagttctcactctcagcatttcttgagtcttctacatcacaggggcaacagccgttaaggattagcaaatgctctacttcattcagccagcacctcaaaatgctatttcaaaccggagcaggaacagcacagcagcagcatgacacttaagagcaccaggcagggcccaatagcattcaccagcccgacggcagacctcctaggtttcccccaaccccatttaatcccccctctttcccatcaccaggtgttccctcacacacacacacccccgcaggggctccatccctgcatttttcccttcaccattggtagtctgacatcaccattatctgccttccggctgcttttacactgttttccttttcttcctctttcctctcttcagccatactcaagaaacacggactacttatgctacttttgcccccataaatggctcagtgatggaaccaagagggaaacccacagacaccaagcctctagctgtagacactaagcacacagacttcctcttcttttcagcacccagttctacgggcttctcatcacttttcaggtattcaaagctttgagggatgtgcccgaagcatccctaaaatcatgaaaaaagatggctttgggcatcttaccgctcacacatttgcatagtgtttgatgtagctttaatttcaaagctggtctcaaacactcaagtggataggttacagtgggagcccaggaattgcaaatgcgcttgcctcaaagactcaggagtccagatccgggcaggaaataaagttctaaagcggctttgaagtgctttctccccagacccctccccagcgcgggtcattcatctcagcctagggaagagaccaccttgcctgaacgtagccaaacgcatcgcacgtgggagccaagtgggagatgaaataatccaatgcgtccccctcaccaccaccacccccaccaaattagttaccgtcggcttaaactcatcgggaatgtccgtgtattttaccgatcagggaaataaaagggtgtatataaattagtggaagcgggtgggaaggaacaagggatgcagactgtcgtgagtaaaacgcctcgcggcttggtgagaggttgtttcttttttaagccactcatttcagactgaaatatcaagccagttcaggtcatttcctgagtagcactacaagttaaaacaagatccagaaaatctactaatcttcaattgcgctgcctccagactgggagcacagggggatagggtgtagggctgtggggaggtcgaggggagggggatttgtggaaaagcaaacgcccgagaaaccctagctcccgacctcagctgtttcttacctcactcagctcggccgaggagtcgtttccatatttcatggcaactccggaattcatgatgcacttttcagagctgggctctcagtcccccaggtctcggagcttaagagttggacttcacaggctcaatatccactgcttggtcccttctgccacattttagtctagacagccattttcacccaggacagttgcgaagcgcaaacggaggatgcaggcactcttaaaaagagcagccgtggctcgcgtttcacggacgagccattgctgcaggaggctcggtggcgcggcgcgctcgcagctgcggcagcggcggagcccgcgcggggaccctcccgcgcgcacccagcgccccgttccggggcagtgccaccctgggcgccgcctcgccactcctacggtgcctcgccgccccccattaccaggatggagggcacttcccagcacgagccgacaccctagagggcaccggcgagctcccgaaaaaactagggcggtggggcgaggaagatccgcgcctcggattccagagaaggaaagaaagctagagggagccggagcggagctgcacttcacgccgaagtttccccttcgaatcgtctggagttgtaagtggtttctgattgaacacagctgtctagctgctggccacggggtgcgcggaggaggcggggctagagggagaaaagggtgggggcgagtagcctggaggccgagcagaggagaccgtgctgggagagcagagcaggcatccttccagttctctgcaatagtaattaaggacccgagtccaggagggggagtagaaacaggaaaagccacctgaataatcgtgcaggaaattaaaaaaaaaaaaagaaaagaaaaagaaaaaaaacttccctcataggagccgctttccatgatttaataaggtcaagacaaacctaaacactgtacatcagacagcacggtgcacttctcacggaacattaagattttacaagggtgcagggcagtcattttccctaatcagtctaaagtcaacgctacgggtgtaaattcaatgtcaaactccctctgtctgtcactggggcagagtacattttctgcatgtccataatgaagatagaggccccatcccttgaaagatgtcgataggctccccaacccccatcccttgaaagatgtcagataggctcctcaacccccatcccttgaaagatgtcagataggctccccaacccccagaccttccttaattgagcggaggtagagttgtatttatggagtgtggagtatgattcagaaaagattcaaggggctgttatacccagtacacccctgggatctgagctccccttcaactttgagttcccgaggtaaaacatcctgtgtctattgggagagagatgagatgggggaagaggggaactaggatttttctctccacaaacttaaagttccaatgaatttgagatgcacagaaaaatgttctgatgcttcaaaacagtaggtctgcgagattgcttaagagacctcatcagtctctttctacacaatggggacaaaatgtctccatccccaataacagaacttggcatatcctgaagccttctgtgaaaaagccattgtattgtcaacttccatggtctttttaaaaaatcatgtttattttgctctttaagaaggggcagagtgcaactatttgcatataacgttttacccatcccccttcttgttgagttcattcattgcctgatggaggtgctgctgggattaggaagagtttgctgctctttctagagcactgggtcccaagtccttgggcactgccaaactagagcacattctgcatggggaggagatgggaagctacattatttaatttatcttttcattgaaatctgttgaaaactgcatgtttgaagctggaaatggtggtatatacataactatgaagaagattcaagcactgcccctgccctgaaggtgtttatagacttgtaaaacatgaacagaaatgacaattctagatagaaaatgatacttgccataaacacagtacaaatgaggagcgactgcagttcagaggagggaaatacgattttggctggacagggtctggagagaagattctgtgaaggaatcttagaagaggcagcatgtgagttgacctgtgaagaatggctgagcccagcagagatgggaagtaaggggaaagcgttccaggccactgtgagagaaagtatggatggagactggaatgtgcagagcgggcatggggatcacaggcattccattctggagcataagctgggtgagaaaggggggttggtgtcagacagtgaacagttttaagtgccatgttaaaaaaatgggccttctcaataggcaatggagagccactaaaggttttttagcatagaaataatggagatcagagctgtgcttttagatattccagtagatttaaatcacactcatgagtaactaatatgaactcaaataggctagtgttgaatgtgattctggtgtttaaagatacatatttttcatacgactctacccctaaaaccaagcagatgacttcatctggtgttcaacca

SEQ ID NO: 318185 - DNA, 4001 bp, Homo sapiens
acaaagcgcaacctagcaaaaggtgattcatacaaaacccatcaccaaagccttctttgtattaatggcagttccacctaactaaatattctgcccagttggaaactccaaagtcatccattttccccttccactcagttattaactctataatctttgctcctcaggtatttatgcccccctcctacatacaactctaactttgactccttcatctcaagactcaactctccactgtcacctaggtctagtcttttccctatatcaatccatcctccacattgccaccacactgatgattctaccatatccataggatcatgccacttatctacttaaatattttaatggacaacctgccaaatggaatctaaatgtggcttttgcatggaagatcctcctctatctggccccataatcaatcaatcccatcaccagacactattcaatgaattccatgtcctagacatggaattcaagtcctcacaccagatatacactttcataactcagtacctatgttcttgtaactctcttggtttatacagtcttaccttccatcctgcaccctgaacttggccagctcttacccaagattcatctcacccattacttcctatcggtagctttctgtaaccaccttctcaagctttagacaacccttcttacactgtaccacagttacctgctttcttgtccatcttccctacaaaattattagttccattcctacgcatccatgccaaatatctaaaatagtgcctagaccacaataaccacttaataattctgaattaaacattctggactgacaaacaattgtgtgttgtttgcactatttagatgttatctgtataggcttagaaatcgtgggaacacagtgaaattttccagctctgatatttcgcaagttttgagttttttggccttatgatgcctcctaattccaagaaaagccactcaaagatactgtgggatattttctattaacataaccaacttttttttttttttttttttgagacagagttcgctcttgttgccaaggctggagtgcaatggcacgatctcagctcactgcaacctccgcctcccaagttcaagcgattcccctgcctcagcctcccaggtagctgggattacaggcgcgcgccaccatgcccggctaatttttgtattcttagtagagatggggtttcaccacgttggccaggctgttctcgaactcctgatctcaggtaatccacccgccagggcctcccaaagcgctgggattacaggcgtgagccactgggctcggccatcataatcaacttttaaactcaaatttcctaagcacagcgcccctcgttgggctgctctaggccagtggttcccaaagctggctgccaaaagtcccctaatgagttcactaacaatataaacacagcgactccacctgagacccacaaggtccagagtagggctcaggcagctattcagctagctccccaggtggcaattctaaaccaggctttaagaaccactgatttcaaagacacaaagtacagtgccagctctaaaagtgaactaaactttcttgtatctgttaggcttttcttcttcaaacttcacgtgcgtcacagaatcaactggggctccggacaagagagcagcagttgttgaagcgtgcccctcctccacttgcttcctagcctggcaccggcggccaggccaccggggcgctcagcctacctggtagagggcagagcccaagtccggctgggtgcccagcgaggccaccgagtccccgtgataggcgcgcggcccggcgggagaggcgcgggcacacggccgcagggctaacctcaggacggcccacatggcggcgggcaccgagcgagagagcggcccacgctggcctggagccggtgctttcccctgccgcttccctggctggggcggaagctgagctcaggtccttgcagccccagagaaggtttctctgattctcaggcctgtccacacacgtgcctaagcgcgccgcccgcgattggtcaagccgcgccacgccccctgacccagccaataagggacagagcctcagccccgcgaggtcgcgtctagtcccgagcgcaggagagcaggtctccccggcggatcgaccctcacgaagcggtgcggcagtgagagagctgcggttgggcttggattggtgttgtgttgacacagcgatagataatatcacgatagtgactgtacctaaggcaggagaataagtctggaagcagggaacctaaggctgtctcacgctgacttcctagagctaaactgaaaggaaaaccctaactttccatgcctaagtaacaaaaggaccaaaggctactccctttgcaaacccccccaccttttccgcagggcagataggaaattggctgtccccgacaaatcagacttactgctggtggaggcttgctttgccaagtttgaaccttaactccagcctctgaatggttgctgtccacaaccaatcagactgattgggggtccagtcttcgtttgcatagaagtataactttgtaatttcaccctagcctctgactgcttgcttcttgcaaccaatcgggtttgaggtgagcataaaatggccaataggaaacttctagtgggtatttggacccaagaagattctatatccgggcccttgagctctgctcggtccgctcccacattgtggagtgcactttcgttttcggtaaatccctgctttcgttctttcgttgccttgttctttctttgctttgctgggcgttttgtccaattctttgttcacaatgccaagaacctggacaacttgcagtcacaacccccagtgacacaccaacaacatgagtgaatcgcatctaacacgtgcttgcgaacagcacaacaagcctgttgtcctttcactggagaccttaaacattcttctgattattttcgctatgtagttatttttattttttactttatttcattttttgagacagggcctcactctgtcgcccaggctgcaatgcagtggcacgatcacagctcgctgaatccttgacctcccacctcagcctttccagtagctgagactacaggtttgtgccaccaagcccggctaattttttatttttgtaggggtttcaccatgttggctatgctggtcttgaactcctggactcaagcgatctgcccgccacagcctcccaaagtgctgggattacagacatgagccaccacaccaggcactatgtagtgacagattgtggacatcagcactgtggtcttaaataaaggactccaaatatacccataaaaattaaaacattctatacaaaatgccttgaacttaaggtttttcattcacatatttattgagcacttactacttctactccattggttgcttagtggggcagagtaaagggggaggatggggtagagaaagggtgcgtctacacctggaggtaaacttaggttcagacttcaaggtacttataagaaaataatacaaatggccacatgatttcttactgaactgtgtaggacagacattaaaggaacagaatgcaattgggaaagggttgcagctgagccttgcagaagcgttgagagtggactgagcaatgaacatggccaggctttgtgcaaatggaggagagcatgagctaaactgcaaaggtatgatttacactgtgcttgcctcccatggtcaacagaaaaaaaggccagtaaaaactgacttttcatatgtatcagggtatcagaagagagggtttgatattttaattgccacactttatttttctctaaatagttcttcaatgatgcaaagtacttaaaatcaccacccgaagacagaaaagacacaataggatatgattccttgctttctttaaaagtcatacctgttttggccgggtgcagtggctcatgcctatcatcctagcactttggaaggccaaggcaggtggattatctgaggtcagaag

SEQ ID NO: 318186 - DNA, 4001 bp, Homo sapiens
gagcatgatgccaaatgtagaatctgtatacttagacaaacatccaatgagagctgcttgggttttgttacttgcacaataaacatgctggggtaagggagtgacctaggcctctgggtcagttggaagatactcaggcattatctttccttatttgatcatccagatctaaaaagaacaattaaatgtcctctgcagtgcagtgcccactcccaactcttgccttaacaatctctgctctcagcagccacctaaactgagtgtctctgggctctagcccaaggttctaggaggcccttggaggagggctgagttttgctccaccagcactcccagttctgggaggtggtcaattctttgtagagttccatactgggcctgtctgcaaaccccagacctattgccagcaagctgaaactggcacttttcctgggggttgcatctgtttaagacctcctgtccctctgggcacttcatgtcctacccatgagccaggcttctggcctcccagacaccagtgctgggagactcccttctctgcctgggaagcgtcagcaccagcaagtggcggaagtgggatgggagcaagaagacaggttttggggaaaagaaaaaagtcaagtgcctttttgccccatcacggcaagtgactagagcttttcgaagggctgaacaggactttgaaaaagcgcccaattgctgaaggactgtctctgcagagaagaacattttctgcaagattacttccagagtcctttgtccttcctgcttcttccaactgcaaattctcttgctcttttccagtcctgatagagaagttatccatcaacctccactcttcttatatacccacggaatgaaaatggccaggaagggggtgttgggagaactgataggaatgcaacaggttcccagtgcgcaactttgctcccacccacccgcctggtctctcagtgcgcaatcttgtcacagctccaaagagtagatagggtgggaaataggaggggaggcctccagatgagcccgactgtatcaagttggtcaaatcagctccagtggatatgtggtcttcataacatactaggatgcaagtagaagttctgatctgggaggctcaggtgcctgcacaatgcttcccctcaccagctgagtgtgcctgcgctcccgacccgagaggagcttttggggaattaaaaccaccaccccggaggagggtttgggttgcgtgaaaccacgaggctccacgagaaggggaggtacctgcgaggcggccaggtcaccaccaggcggcgcgtcggacccgagtagcgaagagcagtcagcgaggtcctgcaggtctatggtggtgagggctgcgcggggagaccgggagacacgcgccgggcgggccctgagcctctccgccaggctcgcagctaggacgtcagagcccgggggagagaagctcctccgagctgtgcgcgccgcaccctcccggcgcggggaacccgaggggtagcgtgggtgccacggggctcacctggcagcgctgtgggctcggcgtccgggggatcctcgtacaccgacaccgggctcccgcctgtgcatccggggaagaacttccgcggaggagcgaactggccgggcacacaaacgttgaacgcgggtcagccctcggggcaccgagcgcgcagaccccgcccggcccgaatcaaccgccccaccttcctctccggcttccccggcttgcagagcagcgcccggcccggcagtgccagcattctgttggggcagatgctgtcgaaggcccgacggccggccgcgccgcccccgcacgcctgcattgtgcctcctgcctccgggtgccgactgctcggaggcggcggcccgggctggggcagcgatccacaccctgcactcccttcagtgcctgcaggctccgaagccagccagaggttggggcaggcgcgtgaccgagaaggagccgaggggctgccgaggaggtgctgagagatggcgggggagggggaggaccgccgcgcgggaggggtggcttgcgcctgagcgccagaggtggcgccttcagcccgggacaatctgcgcgcgggcggaggcgttaaacccaacctggcaaccgggcttcccccgggagccgccagcgcggggccccggcccgccagcgccgtttcggcgagctttggcgccgccgcctcccggacgcgccaggcgaagagagggagaaggaggggcgggcaaacgccggtctccctcgccctgggtaccgtcttcccgcttacagacagggggaatggcaaagttaacgattatttccttttcttcccactccagccacaaggcgcacgaaataaacgtggagtgacacccgccagcgctagactccggcctttgcgctcctgcaggatttagtaaggatgtagaataccggcagggatgccctggaacagcccccttattacagaagccccttccctcaaacctgaaccttatcctgggtcctgacttatggatttccacgtggtctcttttggcctgacgccaagagcccgccccgctccccaagccccgcactcttctcggcagtggcgcgtgagcacagcctttaaaagaccgtccgttaagaaaaagtgacactacgaaccctcctccactttctgaaaacgccacagtggaaagtaccgaatccccgaaaaccctgttcctgtctttcctagtggcctcagcggcccatcgccacgtttggctggtctcttcgcagtcgtagttgccattcccaagccaacacctctccaaggaatgggcattttcctgagtccgaggcatctcctagggaggggcatccttaggcgagggacctttctcagtaccactcatattcatccaatttgaacagtcgtctgaaattggaatctttgtgtacccacccccctatgttgggcaccttgttttccccttatacctagtagtcgtagtgaaagagcctctagtaagaaacaagataccctaacagcggtggaaggtaatccaatggtagagctggaatagagtgagagactctctgacccaggagtagatgcagaaactgaattgatgtgaggtcagccagctagagttggtgtggtatggctcatggtgaggagctctggctttagggtcagagtgcctgaggaccaggtccatgagccctaggtctttaggaaaaaaagttacactggcctcaatagagttgctgtgaagatgagtgagattatttatgtaaagtgactggtgcttagtatgggtaaattagtgattttttaaaagccttttcagctgtatttccagcttcccacaacttgttcctagccctgtctcctgtttcctctggtttctgagtagcacgaccactagccagtccatctccatctccatccccatcctcacccactttccagcctttaaaatgagtagggaagctcttagctgagttttggggcgatctccacacatgcagatcgtcacaaaatttccaggataggcccattttccaaatattcgtcaatgagttctaagttggagtagacaaaaatatgggcattgcacattatctgttgtaacaggaactggaatagcatgattatatgactcctagtgtggatgattctggaaccagtaactcatagcagtcttggctgattaatggagcagatattggtgaagacaactccgcgcaaagtcactcttttgcctggggaccagaccccaaccccttacaaccaagcagagggccctaataatttgttatttgaaacaggtgatatgatcttcctcctcccttttcaccatcacagagcagcttttacacaaatagcttggggatcaccacgtccttcttccacagccaaggaggagaaagttcctagaaagtttagcatagcaatatgtcagaagaggcattcaaggggcccagagtaaggcactcctggctccgagaacacctggaagacacactttgagagaagtgc

SEQ ID NO: 318187 - DNA, 4001 bp, Homo sapiens
agttttgttttcaaatctatcatgttcactggtatagtaggacataagtcattaactcctctaattgtgaaaagtcatcttttttctcttctcatagcctaaaaaagagtacagttatataaatataaaatagcagatcaattctaacagaaagggttggaagttcattggttgtttacatttttcttttctctttttcaaagataagctttggaggaatctctttttgctaaccactttcaacaaatacagtgtatcaaaacaatctaccacaccacctccaattttgaaagatacaaaatctacccctgtcctttaggcatgtgtacttttatggctcacttcccagagtaaggatttggacatttgtgctgtggcaatggctaagaaattgcaaaagtcagatgttacattttgataatcattccacaaatccatgctccatcaaactagaccaaaaaacctgcaaaggaagcagtattctccaatttggaatacagtattctccaatttaaaatactgccttcaaatatgtttggaagttgaaataatgaaacaatctccaagcatgatagtaagtcaattaagaagtacgaaagtattcataatgccaaccgttagcagacacatttttgaaaacctcaagtcgttaatatcttactaattcagttatagctctcgaaatcaaattaaccttttctagctgaaaggaatttaaaggccttaaatatgagtatgcaaagttctgtggatacccaataccactttaaacactgatttgatgttattgcttcaaccaatatgaagccaagacaacattcctgtgtcacccaacctttgaattagctttaagcaagcttaaagaatttgaaaaataaacctctcattcattctctatccacaggtttctctagccatgcaatttgtatgactgcctccaacagcaagtgagaaagtaggcagtgataaacaaactcatacaattttaaaacaaacagaataatcagaagtttctaagtatgctagtctttcacttaaatagaaagccaaatatgaaaggtccagaggctttcactaattttccactttaaattttctaataattactaagactactttttatttcaattgaaaaatataatgattgagctataattattcaaagataatcatataaatctgatatatgtttcacctttaactgagatcagagggtagcaaaagaaatataagaaactaagaacctggtaactactaaatccttcaagaaaacaaaacaaaacaaaaaaaacaaaccaatataaagctaccacaatgtttccatttctcaggcactatatttttcataaaaaatgatcataaaaggaatatcaatgtattacactatgtatctcacaagtaggttatactgtaaattaaaaattatctgtattagaatctcaaatgcaaccttcaataccccgtgagaaggcatttttctaaggaacaatcatatacctaaactgccacattaatttaaggctaccacaatccagtgagtaaaccaaaatgttacttaccttattacaaataaatggcaaattgcaggcacttttcagcttgcagctgtctagcatagttgattagaaatgaacaaaacatctttcactccagtgagagaactgcatatttagacttgctttcttcactgaataccggcaaaagaggctgttcacctccaagtgatagcaacagccctgcacggagcacttgctgctctgcacagcagcgacttggaatgaaagtaagaagaacccgtgatgtttaaataacgtagctttagattcacaggatatgactcaactctcaaaccagtaagggaagagtttcccattgcaaaactgttagtacagattacataacaaacatcatatctggggttctaaaatactcacattaaatactaaaaacttcacctgctaaatcaaacatgcagtgttagtagtcaacctcttcctcatggcaaaagccacaacaggaaatgagaataacaacactgcacaaagaaaactattctgcttgttctctgcagtgaattaatttaatgttattaaggatgtgagaacttgccaacatctcccagaaagacatctaaaaaaaaaaggaacactaaagtcactaacattcccatcggtataaaaacaatgtgtagaaaaaaattccattttaacatgcaagaagtggcatgctttacaacacaatagaatctccttcactaagtagagaatggaaatagatcttcgtgctttgctgttgctgtttcccacagaaatcctttcctacgctgtcattaccttgtgcttctagctctgcctacctcaccaactcagggtccccttttatctgttctgtgagcccttctaaaggaacatgactaatgatacaactcctctagtaaatgtggcaattttacatgctttctccaccacatgttatcccttaacactgagctgtattaagcttgatcaaatattgaattattatatttagatacctcagtcaataaatatagacatagatgcttggagaaaagtctactacataaattcacttgccatcagcctcatcaaggaaaaaaagctgaaaaagcccatgttaataacagtaagtaggctgaaactaactagaacagggctgttaaatagacatataaggtgaagcatatatgtaatttaaaatattttagtagtcacattaaaaaagtaaagaaacattaattttagtaatggttaccctagtatgtctaaaacatcatcatttcaatatgtaatcataataaaattattaaatattttatcattttggtactagtgttggagatctagtgtatgttttgcacttgtgtgacatttccacttgagctagctatatgcaagtgttcaatagccacacatggctagtggctaccatattgaatagcataggcctagggttcaaggctcattttcagtcttcaggtggtggttcaaatattctcttttcagaacatttaggaaggtcttccctgactacctcccctgaagtaaccttctccaattactttctatcggatgatcttttttatttcctttatagtacatcacagtttgaaatgttcttctttattcatttgtttacctatttatagtctgtggtctctaacaagaatgtaagaaacccgagggcaggaattttctttcaggaggctattgacatggtcatcaatacatagcagaatttaatcaaaaaattatttaataaatgaataaaatatggatttttttgttatggtttggcaaataatataaaattaagaaatgtgtttctcatatcactgaatttccagcaaatacactgggcaacactttcttgaattgagaaattgtccactttttagaatattaatgatcttccatgtataacatgtttcattctcatatgcaatgctatgaaacaacatacttatttcattactctagcaaatacttagaacactttaatcccagtgatgtaaatttggacactattaggatgtctatttatctcctatttacaaaaacataaaatcaatgcatactatgcacagagctacaacgcaggggtcaaggatgggcatgtgacccacgctggtctagtaagcatgccaacctctccacttttgctaacattgagaaagaggttaagtttgtagaatgttaagagtagaactgttggttgttgtatctgctaccacattgtctaaaagtggtggtctaaaacttgtctaaaagaggttgcctaaaaatgaggctgatgaagagaaaaacaaagccaaatacgtgaaaggcagattcctgataatactactgtaattaccagatactgttatgcattaagtcacatttgccctctactgcaatgatgaatatactggaatgttcactggagaattacagtagtcaaaacaggaaaccatgtaaggaaccataaacggtggaagcgtt

SEQ ID NO: 318188 - DNA, 4001 bp, Homo sapiens
acaggggctctatccagttcactttcaagatgacaggaaaggtaaatgtatttggtctttttgtcactattatctctacttactcttctgagaataaaatatttttctggatcatcaggtgtttgcttacagcaagcaattttgtttattaaggaacaaaacatattcatattctgctttactttctggagctacactaagaaatcagtccatgaactataaaaacttccaactgaaagcctatctattcccgtatcttacccttcaaacacagcctgtttctttgtagctgagcttttaatctactaataactaaagttttaatgcaagtgtcattcatctaacataattaatcagagtcaaaacaatgagaaagtgtaagtaaactaagatatattgggagaaaaatgttctttaggtctctggcagagtgaaacttccaaaatattttctagaattaaaatgatttgataaacatttacaaaaagagcagtgcctcttcgaaattgagggagtaaaaacggctattcagtgggacacattgtgggtcccacacataaaatttctagtaaaagcacttttacaaaccttgactcttgtctgagcaatcaacatgatgtataaagcagcatactttaaaaagcaagtgcttcaggtgactattaaaacttcacaaggctcataggaacatatgcatttgactaactgggaggagacgctcccgctgtccacttgaagggcggtgatccaattgcagcaggaaggtttaagaaaggggtgccggatgcaggcctgagatgatgctttccctggcacaggacctcacatgtgccataatttacctctccacgtttctatttcttcccgccagccatttgcttccaatggtacctctccacaccaccacacgtgatcgtaattgtttttaagttattgggttagttttttcttttgccaagatgagatttggctggacatctcctttcaggagaactctaaaaagtacccactttaggtctaacttttcattgactactcagaaagcttctggtgacaggtatcatttctaccaaaagtaaagtccgggtgcaagtcagaactctttcatctttgctaaaccagagcgagatgttttctttcgactgtttcatctacttagaattaatagcatttctcctcccgcctcccggcccccgccccccgctccccgggtggtgaacgcctgaagagggaggcgtggtcccgcgcaccttgtctccggccgcgccaccggcactcacctggctgctgccgtgctcctcgcccgtctccggggcccgagactccgcgggactccgcgccggctctgcgggaggaggcggcggctccagcagctgctccaggcaggcggtgcccggcagagaggagctcttctggtggcacaagtgcgccccggggccctgacgccgtgcaccctcatctcgggcgcggtcccccctcgggggaggctggggcgaggaggacagggaggatgaggcggaggaagaggaaggagctgagtcgggggagcgtccgccaggaggcgtccctcccgctgctcccgaggccgccgcgggcccctttacggcggggagcaaatgctcgcggatccggcggcgtagcgtggacccctgctcggctctgccggcgccgccgggctccaggggctccggcgacgagcagcacaggttgggctgcgaggaggagaagactcggtccagcacttgcttccgcttcttgaagccgctccacctgctgcctgcaccactccccctggccggtgcattccctgtgcccaccgggggtggcggggagggcgacggggtgtccgcagtgcggcgctctggacccccagcgcgcccgcccccgccgcccttgctcctgcccacccccagctgcaggttcttccagagccgggcctggaaggaggaggacgccgccggcggctctggctcgcccgccgcggcagcccggggctccatcctccaccccctgctcctcctctcccctcctcctcctcctcctcctcctgcttctcctccctcttcggctgcacctcctcccgggtccccgcggcgctggcggtggcggcggcggcggcggcgggcgcagcagcagaaaccgggagtgcccagcgacttcaggccagctcgggggaaagaagcggccgccgccgccgaggctctctggcctcgggactccggcgctgcctcttcctcccgcacctgctggggtgggctggagccgtaaccgaatcccggccgcggcgcctgcaaagtttttccctcgaagctccgcggctccagtccactggcgtcccccaggccgcgccctggctccctcttctctctgaccgagctcgggaagctgcacgcaccggggcgtgcgcgtccagctgcgccagggaccgcacccggcgccctctgggcagcacctgtcagcggcgggggcggctgcctccaaattgggcgcgcacgcggctcacacaacaaggcgcgtctggctggagactccggggaccagcagtccccctggggcgccccgggaccatcctccagctcctaggtgggagggccggtaggagccgggtggagctaggtagggcccgaagccagcttgctccctaggatccggccacagttgcccaggcagctcgctgtgcgctggccgctggccgcgctggcgatcgtctgggtcggatgaagcgagctggagtggaaactatgtgccctcgatgggtctcgtgggggcgccgatcgtccacactgagcgatgaacccgacggagttctaaagctgaagacgtctgcccccgccccgttgcgctccctgggtccaagacgagagtttaatttcttctgtcttgacttcatccccatccacccctcccttttctttatttgcctctgcactggtctcttatgatcaggttctagcatttccggagtctgacgataaagccagcccttaagttgcagggagtttacggtggacgaagatgggtgatgcgcactgcctttgatccgattcggcacgcacagaatcttgttcttttcattcaagcgcattttttctttggttacttcatttgcttgttgcaaggcaaacggaaaaggctttttagctcattcagactttgcttctcccaaagctgctcagccagggtcttctgattctgctaggagagacttctgaaaggccagcaacacaatgcctctttcgtcctcctaaatggggaaaacgggagagttccctaagctgcggtagcacactgatcagtcttgtctagctagcagtatgctttggaggtgttaccaacctaagttttttgttttgttttgtttttgttacctttataacaaatatttattaagcacctactatataccaggcactgtgataggctctggggatgcagctgtgaacagggcatcagggtcccacccacatggagcttattgtgagggtgagggttgggaggtgatgcgagacaataaacagaatttctaatatgcaaaagtcccatggaaacagttaagcagggtaccacataacagagtggctacagaggaagagcttccagacaaaatgcaggacacccaattaaactgactttcagagaaacaatgaataatattagtatatgtatgtcccaaatattgcatgggacatacttatactaaaatactattatttatctgaaatttaaatttaactgggtgtcatgtttttgtttgctaaatctggcagccccatatggagaggtttttggttttttacattatgtgtacagggagagtctctctgagaagataaaattttgagttaagacttaatgaggacagagaaccagctattgacggatctgactgtagaatttcaggtagaaggaacagcagatacagaggtcctgaggcaggaagcagcttgactgggcatattcaaggacagaacgataccactccaaatagagtagagcaaggt

SEQ ID NO: 318189 - DNA, 4001 bp, Homo sapiens
agaaaacctggattttaaaaatctaaaagctcattcctgtatgtgttctcaggactattactaacataggtgcacacaactctcgcacagaaaacagtgagcagcctccccaaacatacttggaataagaaccctttctttcctccttcgacagagcagatattttcacctctcagaactagcactccacgggcagtttgggaacatcagaccagcttgcttttcaggtgcttctggctgccattttttaaaaatttacaatatagccctcataggacttttcacctcttaaggaaaaaagaaagttttgtggctgttctttagcctaagcagggctttgaggacctatgatgtatttcatatatttaataagcttttatttacatgtaactttttttccacaatagaatattaaggatattcttttttttcgttttgtaatgccattagaacggaagttccataagggcaggtatttttgtatttttgtctatttttttttccactggcacatccccagcacccaggctgtgcctaccacacagcaggcactcgaatgccagtgatgaagaagtcacgataccacaccataactgaacaagatttatacccaagactaatatcaagaatgttacttactcaaaaacttctaacggtacagtaatatcatgaagctgctgtctgcacttgtcaatatcctgtaagccagtaacaataaaattcctgggggaaaggcaaacacacaggcatctggttaatttcgcttgacagcataagcaccacccacagagctacccagccaaccggggctccacgcaagttcgttctcctcacagctatgcgggttacacacggttctgacctctttggttagctacaggattcctaggacaccgttagagttacaaaatacccttaaatatttgttactttccttctcaactagaaattgccagtaagggggatggagagggaacctgatgaaaaatatgaaccttctctcaaaaacaattacctgactgtgcatatgactgtgtgtgcggtttcagcgaacacatgaggcagcggactatactcaaagtctgagggaaagaaagccatactgtctggtttagcttcctctcctctctggagccttcctacagcatcaggctggtctggctattcccacagcactaggtatggaacctcgagtgcaacattttctatgtccgtgccacatataaagcccttctcgaaagtgctgtacttgcatttgccttttctccaacccagggcctagcaacatgggcagcacaaggctgttgccaagaaataataataataaacgttctgcaacctttctcagcaccacctccccgctatttcctccactgtcaggcctatgcggcaggtggcttcggagcctcaccttctgaggcctagtttagggcgtgcactcactgtggagcctgcctcccctctggagacagggactgaattcccagaagggctccaggaggaaaaggctgggagggggttacacatgagaggggagacgctagaagagaaagcatgattcccttgatagggaaacgtaaagtatatcatctggccatgacgacgtctccaaaggggcctcaaagaggttggctcttggcaacaggctggagcgcgggccccgccctctgaacacagccaggaaaggcgccccgggctccgggaccagaccagagggctggcggggcacgagtagcggtcaggctcggctcgggctccctagatccccgctcccctagcacacgcttcccggccaggccctggggagaccccggcagcctcgggccgccactcacagcttttggttgagcccggcctggctgctgggctggaagtcactgacgatgatgccgagctgccgaatgttctccacgaacttctccaggtgctcctctaggtggtcaaacttctccgccatcgcctcggcccgtccccgacccacacagcctcaaccagcagcgccgcaggcgtggccctacgctcccgcttcctgcttccgtccggacagatacgacttccgtttcctctgggggagcgcgggcgagctcttgggggcggagcctcgttatcgggacgggcgtgttggggcggggcctaagtgcggggcagggcgggctttcggggatgcggtctggattctggaggaggcctcggcgcgcagctgggcgagtactaactgtttgcactctcatcagacctgcctcggtcatgggagaagttgaagactttctgcaatgcagcatcttcaagcaatacacacatggatgaaaatcctaaagtttgcatgaaggaccaataacggtagtttccctgcccctctaccagaacccctgggatcagcgcctgcctgcctcctttcttctatgtaatcggcggccacctcccctagctcttgctgctaaccatgcttcccggacacctgctgccttcgtaggtcagggtctcacctcctcgggccaattctgaccaaacagcaccctgtggggttgccctgtcttagtaaactgctgtttatctcattgaaattcagtttaggtcatttcactcttatgtttaagaaacttttctgcccgatctcctatgatagcggatatctcctctagcctgtttgaatttctcaagtgatttattttactgaatatatttgtggcctgtacttttcagtgcctagaaacaggcaaagtgagggagctcctttgctagatgatcttcagagcctctcccagctgtgaccagaaatggaaagccagagaaggtaagtgacttgccaaacttatggaatcagggcactccagttggtgggctgggctgataaacagaaatgttacataaaatacttctctcctgatttaacaacaattaactttagggaattataaaacaagatggaggctgggcgtggtggctcaggcctgtaatcccagaactttggaaggccaaggcaggtggattacctgaggtgaggagttcgagaccgacctgaccaatatggagaaaccctgtctctactaaaaatacaaaaattagtcagacatggtggtgtgcgcctgtagtcccagctacttgggaggctgagacaggagaattgcttgaacccaggaggcagaggttgcagtaagccgagatcatgccactgcactccagcctgggcaacagagcaagactcaaaaaaaaaaaaaaaaggtggaaataaaatattagacaaataaaaaattttaagttattaggtagaggtagcgacatggagtgaacggcctttctcaatttcataagtaagaaagatagataattgatggaacttaggctttggtaagtatttattttaaaaatttaagggtatctctttgctagtatatataattcccaaactagtagacagggggaagggaataaagaaaacacaatcaactcaatagaaggcaagaaaagaagagaataaagaagcaaagaacaagcatggaaaataaaactcacaacgtaaagtgcaaaaattaaaggcacacgactcaacagcaaaaaagcaaaagaagaaatttataaatgggcaaaggacctgaacagatacttctcaaaagaagacataaaaatgaccagcaaaaatgctcagcatcacatatcatcagggaaatacaaattaaaagcataatgagatgtcaccttacactgttagaagggctataatcaaaaagaccaaagacaatgggtgtgggtgaaaatgtggaggaaagggaacccttgtacactgttgatgggaatgtaaattagtgcagcctttatggaaaatagaatggaagtttcccaaaactctaaaaacagaattaccatatgatccagcagtcctacttctgagtatatactgtgaaccctgaatatctgagacagttctcagttaatttagaaagtttattttgccaaggttgaagacacacactcatgacacggcctcaggaggtcctgatgac

SEQ ID NO: 318190 - DNA, 4001 bp, Homo sapiens
aagcaatcctcctgccttggcctcccaaagtgctgggattacaggcgtgagccaccacacccagacattttaaaacttttaacataaattcagattacagaaaaagtgcatgaatacacaaaaaacacttcatattcttcactcagattctccaaatgttaacattttccttcatttgctttattggtttttcattcctttacccctgaatacttcagtgtgttttctcgtgacaagaatgttttcttctacccaaagcacaattaccaaaatcaaagaattaacagtgatctggtacttcaaaatacattttttttttccctgagacagtgtctcgctctgtcacccaggttggagtgcagtggcacgatctcggctcactgcaagctcggactcccgggttcacgccattctcctgcctcagccgcctgagtagctaggactacaggcgcccgccacgacgcccggctaatgttttctattttcagtagagacgagatttcatcgtgttagccaggatggtctcgatctcctgacctcgtgttccacctgcctcgacctcccaaagttctgggattacaggcgtgagccaccgtgcccggcagaaaatacaatttttgacagctcacgtttcatcccactcaaacctttttaggtgaggagtgctgctctgtactttcctacacgatgtgcattcctgtattgcggctgccattttcctaaggccaactacatgacaggtaccattttttatggcctctgtaacataatcttcattaacaattctatgaattaaggtttttggggtttttgttgttagttttgttttttgagacaagggctcaatctgtctcccaggctggagtgcagtggtaccatcagggctcactgcaacctctgcctcccgggttcaagggattctcctgcctgagcctcctgagtagctggggactacaggtgcgcaccaccacgcccagctaatttttgtatttctcggtaaagacaggttttcaccatgttggccaggctggtctggaactcctgacctcaagtgatccgcccacctcggcctcccaaagtgctgggattacaggcgtgagccaccacacggtcccacgaattaagttctattatcaatttcattttagaagtgaggatccgaagtctcaatgaggggaagtgttgccccagatcaaaaggttaataaatggcacaacaggaattcttatcccaggtccctttagctccaaagggcaagctctcttatatccctaagccgagaagcatctaactgtacaataaggactggcatatcacaaaaattatatttctttctctactgtctctctagatggaacttttcaaaggtgatggaggtcttatttttaataaaagcagagccaagcatcagagctggttcttaactcaagatccaacatctagtgtttgttctactgggggagaaggagcttcaccagaagacgacagacattccagggtcccagccccagagatttgattcattctgtctactgtgaatgggccctagaatgtcgcttttaaaacctctccagatggacctgacgattaggcttgggatctaccgccctcgcctgcccccatacctcagctgtttcataactgctcccagaagaaggaagggcagggagggctactctcatgttacaaagagccggagagggcaaatgactcgcccaaggccacacagcttagaaaaacagcggcgcggggactagacgccaggtctcccaacctccactccggctcggcgtcccaacacggaggaagccccgagactgccacgcttagagccccctcctccaggctgtccaccccgaggcctccgcgctctcggagagaccgcactctcggagagactcgggagagaaagacgaaagaccgcctttggaggccgaactcagccatgcctccccagttcccagcccagcacagaggaagctgcggggtccggaagaaaaaaacgcacacaggcggcggccccaaaccgttgccgcccacttacctcagctctggctttacactggtagccgccttcccctctgcagccgaaaccaacttccggtctcctccgggaagaagccaccgactctgtccttgattggctgtaagagctgtcctttaacgaaattctagctccgcctcagaccgatccctcgctgttgcgcctacgtatgtttgactcctcccatccacccgttactgacttttaaaagtcgtagctgagggttccgtttcttcgtttctttttgaattaaggcataaaattgaacaagacaccttattgctttattttttatagaccccttattgaccagaaacaatcttatgttttaatgtttaacatgctcttgtaagacttaacgtgaatttagaaatttatgacacgaaaataacctccaaaagaaacgcttgctattgcgcctgcgtatattccacccccttccccattaccactcttttactgacttagtcgctgctggtagttccattccttttgtccttttttaatttaacgcatacaattaagacgtcttacatacaaattcgaaaatatagacatgcagggtttttttgttgtttttttctttgagacggagtctttctctttcgcccaggctggactgcagtggcgcgatttcggctcgctgcaacttcagtctccgggattcaagcgattctcgtgcctcagcctcccgaatagttggggtttcacctatttttttttcttttttttgtatttttggtagagacagggtttcaccgtgttggcgaggctcatctcgagctcttgatatgaagtgatccgcccgcctcggccacccaaagtgctgggattgtaggcgtgaaccaccacttccggactcccccattttaaatccctcgcacgtatcaatttatttcctgaagaaatccatctacgttgagcataacccaatccagcttttctcctcaccgctgaccccaatgtatcctgcaccagtgacttccaatggtcgttcccagtcctcattttactccatctgtcagcagcatttggcacatttgattaatggattgccccaggactcagttctccaaccacttctcagtcagatatcagctggatgattacatgcaggccctggaacaccgtttcctctgcacttcagaccctcatatccagtggtgacagacatctttccccagttgcactttactcaattgcaaatgttcaatcgaaggaatcacctttttctcctttctcacataccccaccgaaactaccataccagccttttgcattagatctatttaaaaataagtaaataaagttccaaatatgactgaccaccgttcccactgctatggtcctatgccatgccaccattatctctcacctggacttctttgattttttgtcctcccttagtctatttaccacaccttcttaaaatataagaccggtcttatcactcctctattcaaaatcctccaaggctttctatgacttttagaataaaatctgacatccttcccctggcctatatcacaggccctacaaaattgccaagtacatcccggccttggggccaatgcatttgcctggaactctttgcacagatattgacacgtctcatttccttctttccttttttttttttttttttttttttttttttttgagacgaagtcttgctctgtcacccaggctggagtgcagtggcccaatctcggctcactgcaagctccacctcccaggttcacgccattctcctgcctcagcctccccagcagctgggactagaggcacacgccatcacgcccagctaatttttttgtatttttagtagagacggggtttcaccgtgttagccaggatggtctgaatctcctgacctcgtgatccgcccgcctcggcctcccaaagtgctgggattataggcgtgagccaccgcgcccggcttcatttcctcaattca

SEQ ID NO: 318191 - DNA, 4001 bp, Homo sapiens
tcttcactcagattctccaaatgttaacattttccttcatttgctttattggtttttcattcctttacccctgaatacttcagtgtgttttctcgtgacaagaatgttttcttctacccaaagcacaattaccaaaatcaaagaattaacagtgatctggtacttcaaaatacattttttttttccctgagacagtgtctcgctctgtcacccaggttggagtgcagtggcacgatctcggctcactgcaagctcggactcccgggttcacgccattctcctgcctcagccgcctgagtagctaggactacaggcgcccgccacgacgcccggctaatgttttctattttcagtagagacgagatttcatcgtgttagccaggatggtctcgatctcctgacctcgtgttccacctgcctcgacctcccaaagttctgggattacaggcgtgagccaccgtgcccggcagaaaatacaatttttgacagctcacgtttcatcccactcaaacctttttaggtgaggagtgctgctctgtactttcctacacgatgtgcattcctgtattgcggctgccattttcctaaggccaactacatgacaggtaccattttttatggcctctgtaacataatcttcattaacaattctatgaattaaggtttttggggtttttgttgttagttttgttttttgagacaagggctcaatctgtctcccaggctggagtgcagtggtaccatcagggctcactgcaacctctgcctcccgggttcaagggattctcctgcctgagcctcctgagtagctggggactacaggtgcgcaccaccacgcccagctaatttttgtatttctcggtaaagacaggttttcaccatgttggccaggctggtctggaactcctgacctcaagtgatccgcccacctcggcctcccaaagtgctgggattacaggcgtgagccaccacacggtcccacgaattaagttctattatcaatttcattttagaagtgaggatccgaagtctcaatgaggggaagtgttgccccagatcaaaaggttaataaatggcacaacaggaattcttatcccaggtccctttagctccaaagggcaagctctcttatatccctaagccgagaagcatctaactgtacaataaggactggcatatcacaaaaattatatttctttctctactgtctctctagatggaacttttcaaaggtgatggaggtcttatttttaataaaagcagagccaagcatcagagctggttcttaactcaagatccaacatctagtgtttgttctactgggggagaaggagcttcaccagaagacgacagacattccagggtcccagccccagagatttgattcattctgtctactgtgaatgggccctagaatgtcgcttttaaaacctctccagatggacctgacgattaggcttgggatctaccgccctcgcctgcccccatacctcagctgtttcataactgctcccagaagaaggaagggcagggagggctactctcatgttacaaagagccggagagggcaaatgactcgcccaaggccacacagcttagaaaaacagcggcgcggggactagacgccaggtctcccaacctccactccggctcggcgtcccaacacggaggaagccccgagactgccacgcttagagccccctcctccaggctgtccaccccgaggcctccgcgctctcggagagaccgcactctcggagagactcgggagagaaagacgaaagaccgcctttggaggccgaactcagccatgcctccccagttcccagcccagcacagaggaagctgcggggtccggaagaaaaaaacgcacacaggcggcggccccaaaccgttgccgcccacttacctcagctctggctttacactggtagccgccttcccctctgcagccgaaaccaacttccggtctcctccgggaagaagccaccgactctgtccttgattggctgtaagagctgtcctttaacgaaattctagctccgcctcagaccgatccctcgctgttgcgcctacgtatgtttgactcctcccatccacccgttactgacttttaaaagtcgtagctgagggttccgtttcttcgtttctttttgaattaaggcataaaattgaacaagacaccttattgctttattttttatagaccccttattgaccagaaacaatcttatgttttaatgtttaacatgctcttgtaagacttaacgtgaatttagaaatttatgacacgaaaataacctccaaaagaaacgcttgctattgcgcctgcgtatattccacccccttccccattaccactcttttactgacttagtcgctgctggtagttccattccttttgtccttttttaatttaacgcatacaattaagacgtcttacatacaaattcgaaaatatagacatgcagggtttttttgttgtttttttctttgagacggagtctttctctttcgcccaggctggactgcagtggcgcgatttcggctcgctgcaacttcagtctccgggattcaagcgattctcgtgcctcagcctcccgaatagttggggtttcacctatttttttttcttttttttgtatttttggtagagacagggtttcaccgtgttggcgaggctcatctcgagctcttgatatgaagtgatccgcccgcctcggccacccaaagtgctgggattgtaggcgtgaaccaccacttccggactcccccattttaaatccctcgcacgtatcaatttatttcctgaagaaatccatctacgttgagcataacccaatccagcttttctcctcaccgctgaccccaatgtatcctgcaccagtgacttccaatggtcgttcccagtcctcattttactccatctgtcagcagcatttggcacatttgattaatggattgccccaggactcagttctccaaccacttctcagtcagatatcagctggatgattacatgcaggccctggaacaccgtttcctctgcacttcagaccctcatatccagtggtgacagacatctttccccagttgcactttactcaattgcaaatgttcaatcgaaggaatcacctttttctcctttctcacataccccaccgaaactaccataccagccttttgcattagatctatttaaaaataagtaaataaagttccaaatatgactgaccaccgttcccactgctatggtcctatgccatgccaccattatctctcacctggacttctttgattttttgtcctcccttagtctatttaccacaccttcttaaaatataagaccggtcttatcactcctctattcaaaatcctccaaggctttctatgacttttagaataaaatctgacatccttcccctggcctatatcacaggccctacaaaattgccaagtacatcccggccttggggccaatgcatttgcctggaactctttgcacagatattgacacgtctcatttccttctttccttttttttttttttttttttttttttttttttgagacgaagtcttgctctgtcacccaggctggagtgcagtggcccaatctcggctcactgcaagctccacctcccaggttcacgccattctcctgcctcagcctccccagcagctgggactagaggcacacgccatcacgcccagctaatttttttgtatttttagtagagacggggtttcaccgtgttagccaggatggtctgaatctcctgacctcgtgatccgcccgcctcggcctcccaaagtgctgggattataggcgtgagccaccgcgcccggcttcatttcctcaattcattcaggtttctggtcaaatgtgacttcaaagagttcttctggggttacactactctatgcaaaatagcgcatccctaatctttctcttgggagatgcccctgaaacccttactatgtattatctttttttcatag

SEQ ID NO: 318192 - DNA, 4001 bp, Homo sapiens
aaagtaaatattgtgattgtttaggaatatagtatttaacagactagaaaaataaaagtaaaattttcaagtgcatgaaatacatactaattctttaagagactaatgaagttattctaaaaatttagcgactatagttactcaggtgtctgaatcaatataatgaaacataatgaagcatgacaaaatatatatgaaagtagcagcttgaaatcgcaataaatacacatatatttttaaatgttttaatcatttgaaatatatatgtaacaatttataataaaaagtatatttgggttttaatgttttaaaataggggttcattaaaatgtttgtgggtaacgttatgtttttaaaatattagctattttgtttgggtggagtatttctgataattttttaaaccacaaatgtttcataattttcaacagcaattacaacagtttaaaagagtatgttagttatacatttgtggcatatccatgtcgtcactgatttaaaaatcatttcaggtacagtggtcattaaaaaagtcagaccttattttttttccactatacaatcatgtgttaaggatgtagatttaaagttatttatgggatcatcagaataaaacaattgcctcatagtattagtaatttatattggtaggagtcttttctttcttaagcaccaattctaccccccacagcccagaaaattgattttatccataataatttatagcattcttcatcaatgtatactgttgtttcttttaaattcattagcccatgttgcttgtgaatatggaatttggttattaaaatggtttcatatgtttactacgtataggctctagctttgagctgcttacttgcttaaataaatgttttcaatttactataatacaacaatttgtagagaaatgctgtgaagcatagttaaaagaatgaatccctgaaatagagtcactttttaaaaatatgtcctaacatgtggtctcattttttcatgttttgcattaattaaagtcctattctgaaaaaaatatttttgcctaaacttttgaattaacaaaataaaaataaaaaatatataaatatacgaattttggaaatcagtgatgtaaaaacatgctttaataccgtcttggttgttaatttcaaagatttttctcaaaagacgctctttgtaaagtaatgagaaaatattgccacttttaattattaaataatatttactacaatacaatttacttttatttaattattaaacatgcaatatattttaaattatttaattatacatgcaatgtatgctttaaaaatgtattaaaataaagttaattgcatgttctctctaatcatgttcttgtagcatgcacacattttaaaaaacccagtacatgtaatttttgaaaatagtatgtaccattacacctttttatttgggagatttattagaaaataactttttattcagaaaagattatgacagaattagataaaaaggagactaaaatgtgtgttaaatcgtgtaatattataaatgtaattaactcttcatcttccaaatattgaaaacagtaatgaaagagaccaatatttaaaaatagaatcttgttttaaacctaaaaaaaaaacctaaaaaattgttatatggtaacagctttactttcacacaaggcaaacccactgttgagtgagttggctctgattccaatggtctcatcaactttgtgaacacaggtacctcagtggtgcctctttcaagacaacaaaattaacttttagagattaaaaaatatattttggcaattgaaactcaccagtgcctttctgcttctccaggaagttgtacccgtcagcacctgctgagggctttgttgtccaaaccctgacaggtaaaaaaattcctgcagaataaagccagaccagctggctttgaagagaaaccccccagtttgggctgcgtttgcctcctctccttttctatgaagaccgaggctttgcccccttgatcgtcaagccgtgagatgcgtgatctctctgcacaagtgtctggcaggccgaggtgcacctgtttctgtcactctggagtaaatttagctgtaaaggtatcactgacaaccagacctttgtcagtgctggcaaaagaacacagaattgcttccctcccctcccccctcccgaccccctatgctgctagttccaatggaaaatatccaatcggaagtctatccaaaaatcattcctaaaaaatgaaattgctttcatatggtataaaaaagtaagtttcctcatttcaagcagattttaaaattacatttccaagaataatcttggaacaagacaagttttcgttcaattaattgtggctggaaactttttaatggaaacatagcacatacttacttcatttcaggttattaaattgtgttaagcataaaagttatttgccattctttgttgcagctcatttgttcttttcgattctaagaaatattagaaggttaaataacttatcacataggagagattattcatactaccaaaattagaatgtgtgtagttctgagggactgaatgtcaaaattgtatgctcatagcactaaaactattgggaatctaggatgccactggaacatgtaaaatggcagctaaggtctatggaaacccttcatgtttagaaactggctaaagcttgagttctcttatcttttggttaaggtaaggacgtttatcatttatgtgaatgttttagactaatttctttattagtggtttgagcaatattccttttgaggaaaatagagaggcaggcaatattcattaatatgtctgacataaataaaatagtcaagatatataaagcagcccaaggagtaacatccttagccaaagcattctgagcttctgccttaataattatgatttcttaagtgttgttaaaaagagttgtacagagtacctgttctaccatattattgctgtttacaggagttgggtgtgatgagaaaaggaaagctgggtcaaaataaaaaatgctttgtaaaataaacaaagttcctatttacttactatgtataaacagccactcaccaagcctcgtttctccacagggcaccactttcagataaaaacatagacctgaatggcatcatccagtatccaaggaaaccatgtaagtacctctctcactgtgtacttctgttattcagatcttaaaacctagctgagtactgaataagtgagtgtttttatttaataattataagggaggtactttttaggagcctgctaaaaagaaacaggttctttattgttatgtgcgtcataacaaaactctcatgttttcaccatatttcataaaattatgtgcttagtaccactctctccatcaattctcattcttaggtacaaaacagctactcaaaatcctaatgaattggaagtttcaaacttttccaagacccaaacaatgtttcagagtccttgtgccgggagtactttcttaattgtagttaaacttgttaaattttaaaaattaagaaaaaattccttggaaaataatggtttattggtaaacatgtatggcaatttatttggctgtaggcttgcttgaagagtgagcaggtgagcaaagagacaagattacatgtttaaaccaagaaaagaatcttgaaagtaagtgtaatgaccaagatgcaaaaatctgtttggggaaattgttgggaggttggcacatcattttctttatcccctccccacaaactaatgtacatttctgcagctaatatcaaagttttaattcatgttcaggagctatgaaatctactgtggaaatttagtttctaaacaacatgctactctggagaaagacattcctaaaatatttgaaatttctactatttccgtacttcgactttttttttgttatttgtactatctccttttaaaattaaattattttcaatgtgaaatgattattcattattgtttatatacgttttcacgaaa

SEQ ID NO: 318193 - DNA, 4001 bp, Homo sapiens
aatacaaagaaatgataaatgcttgaggtaggtatacctcaattaccctgattttgatcactgcacattgtatacctgtatcaaaacatcacatgtattccatattatatacaactattatgtacccataattaaaaatagaaattaaaaaatcttgtatccctgttttttctaataaagcataataaaagctcatgaattcaacctgcaaaaattttcttctaactttgcaagcaaaagaagatataatgaatatcataaacctaaaaattatctggtattggtaataaagtgcaaatgctaattcatatgtttttgactatactcaaaataggttctggtccaaataacaaggtccaaacagtgttacatgacattcaatatttcagtcttaatttcaatttcaagctataggccaattaaaaaatagcggttttctattgacacaatgattgctctttggcttgatccacagcaagaaacgatgtgcatgaaaacactaaaggaatccaccataaatcttagtattattcaccctctagctaaacatgcagccaaaaatagttcaagttgtgtgtacctgaaaatatataataatttagaggagtataaacttgaaaacctaaaagtttctctactttttaatggcgtactgactttgatgcaagaaataattaattcctattcattatagtttacacatgaaacaacattacatttaaaaaaatgaatcaatcagttctagtcctatttgtatgtccaagaagacaaaacaggacaatagaggacatgagtgtctacatttgtggggaaattacagtctggtggttgtccccagggctactgtgtagccttcttcagtgtaaccgaaaagtaggcaaaacactcttctcttccacagtccagaaacgtcttctctgcaggttccatgatccatatgagatggttgggacccagcagtactataatttctcccaggaccattatttgatatttaacgttatacaaactacccagctgtccttacatagcctaactaaatccactctcccctagtgtgaagaaaaatagagtcaaattgcaggcattcatgatatacaagtctttaatgccaaactgagcatttgaatgtgtaaagtcttcacaacagattaattgtatcacacagacattatcattggcattctagaaaaaaattataacaccatctgcctctatgtttatcaaattcagatttaaaatggtatgaattaaccgatagtccttgcctatatgttttaagttattaatatcttgtgtgggtgttttctttgttgttgttgtcagcacaatgttaaaatgtttggatgtgtttcaaaatctcatttactatgaataaaatgaaagccattttcatacaggatatttatcctatattataaacctttaagtgaatgaccacaaaaggtctagttcccatgaatataagaatatctttgtttgatgatgcgtgcaatgtagcaatgttatgctgattaactcttaattatcaagctattcatgtcacacaactacacttcccatttcaaatttgtgttgaagtaaaaagtgaataatgacaaatgtgtaaactatgtttctgacagataaagtgatttttttctcctttatatataagagactatcagcactttaactggtcacatttaattaacccaaacttctcttaatagatatttacagattcaagatattttctgtacccttaacatatgtggagaaaatataattaataaataatgatacaaaaaaagtttactccactcacctgtctgttacgttcatccataatcctcgtaatctgaatcttttttctccccatagtccccgtttttcttctctctctcgtccctgaaattatgtattttttccttccttttctttctctttcctgtttcctccaaacaaatctccttcttcagcacttgcacagctcagttcccaaattcctgcattcgttcctgctgaacaaaaaagaaaaattaaataccactctaacagcaagtcagtttcataagaactatcatattctaattttatcaaggaaataaactatatggagctaaagcaataaaatgaataaaaataacttttttgttaaaaatatatggtatatcacagacaggagcagatcaagtagttttattttttaacaattaaaatgatctcataagtaatttaacaagtcatttaaatgatgcaaactatgcttttttaaagactaacacttgaaatgtatttttttttgtaaaaagtttcctaatctttttaatgaaattaggtgacaatttcacccgttatgaaaaattacctaaatcagagagttaatgaacctttatgtacctgtgtatgctaagtagggcagctaattcatttctgaagggaaaacaatctcctgttttgacagcagaggtgataacgtccctcgttatgcaaataggatggacgattatgaaagtgctatttgatatatgtaaatgtcaactaatttaaatctaaatcctttaatcttactttaaaaaaattattgctgtgagaacaccttaaaaataatatggaatatttaatcttagattacaagcatctatcagcagtgagatcttttctttttgaaagcccttaaactacatcttagataacaagaatcaaaaaagataagcattgacacaaaataaatggtgcaaaattaagattattcttcaatttataaccatattttttataacaagccatccttcctttaaatttaaatatttagaaacagacatatcatgtctttgtggagtaagatacaaaattgcagaagcttcacattacatactggagatctctgggtcaggaattaaaattagagaaatgatcatcaataacatgagataagcccaagaaacccagaatattaaaagtacatactttacttggttttaaattacatctgaaaatatttgaacacaacggaagttaattgctctgaaatgtgaaagttaacaagaaagcattccacaatgggtttttcaagcaacagctccaattattctacttcgttttaggtcaatgaatgcaacaactttacacactgctcagaatttccctgtttattttagctggtgtctgacaacggacctgataaattcccacatgtattatgtaatgctaagccaatgtcctggctatttaatagattgtttggctccaattcaaagttcttggaacaggaaggctgttacacattcggtctgaccattagctgtcttctgatttctttaatttaatttccaaattctttatcaccttgggtattttttttttttttagtttttggtgattatttaattgcagaagctattatgatataattacttctggtggattaagtgctgcttaaatactaagactatccattctcttttgcctcacgcctctctactaaactgcagctcagttctgcctctcataatatgtatgttgagtaacattatgaccacacagtgctcatcaaaaactattgctccagctgtaattttaaatgttggaggtggttcaaaattctaaagagttatagaaataacacacatttgacaaatacatataaaaatagttataacatattgaaatcacattaaaatatgaaaaacccacaaagcataattgcatcatatatttgatgttgctagacactgtccatctatttttagaaaacgtcttaaatgtcactcaatggggcaactttcctgtgtttcctatagtcttaccttagaagcaagcagtgtgttagaatggtatttcccatgcacgtttaagaccccaaagatacaaacaagctttctctatcacagaaagccaatccatgaatccacagcaaatgcatataggacaatttcctttcctttcatttagctgaggccggtggcactatcggcttacaggactatgcctgcctaagcgcttattcacttcaaggt

SEQ ID NO: 318194 - DNA, 4001 bp, Homo sapiens
acatgctgaatgtttttaaagactagccaaaactgacattttttaaaattaaataagatgttttagtttcaaattagagattgttgatctatttaaagctaaaattggtatgcaatacgaggttaaacggggttcacaggtggtcacatttccatgtcctaccaagtctctagggattggagttattatactccacataaacatctttactctgcaaccacaattccattgcaaggtgccagtgaaagtaggctagtcgctttttttttttttggactggtataatgaggtggctggagtttcctttatagcacttagaaattatatgcagtccccaagcatttcataagacagttactattagagttagtttcagattcacaatagtaaaacgcactttgtgtcaaagcaattctccactgaggaccggttaaggaactggcagagagcccaattctacttagtctactgtcagcatttacatataaagtattttatacaaaagacacgcattcctaaaatgtgacaaaaaaaggctctccccaaagaatgataactactggacttagaatagtcagaagtgattcagatataaaatttcctttaaaaagcaatagccatgttcagggaaggaaggtaacattagcattaaatttaaatacttccacaatatttaataataaaataaacaatgtgccacatctatatatacttcctttgtgacaaactttatcatcgagtttggtaactttcattccaagtccaaagagaaggcaatttaagtgacttaaccttgcttgcttttaaacagctatgtatttgacttgacctgaacagcaatccatatgctgaaatcgaacgtgaattgtgaaatgtgtagactactatggcagggatattactttttgtccacaccaattaagaagccctctgtcaagccggcactttggtgagggaaggaaatgcacaaaggtatactctgacagacagccatgctttaggtcaaactaatcccaagaattagtggctcagaagcataacccagggcaaatcagtgtctttggggggactcatgggagcatctttccacagtgaactaactgctaaatcttaaggcgtctacttcaaggtcacagaacatgctgtgaaatattaaaatccaccaggctccacacgctccaccatatcaaacatgctaatgacgtgaactaacttcatgaaactttaaatacactggtgtgacaggaacgagtcaggagtgatttcaatagctgatggcaaacggatacgactatctaaaaagttacttttagcaacaaacaaggaaatcatggaatctaacgaaaaagaatgcacaacgagcctcaacttcagccttcaaaaaaggcacagggatagatagacacagtgccgtggaatatattgatgcagattttagagacaatacccgggttttctatttcctcgagaaatatcaggggtacttacatgaaggaagacccgatcagattagtccttgggatattttcctttcttaagagagagagagagagaaaaaaaaaataacaacaataatctttacttcgtccagcgttgaagtgcttctccacctgattcaaacatgcagccacggcgacccacacagaaccttcaaagtcaatccaatagcagcccgaagatgtctgggtgtacgcgtgtgctcaagtgtctgtgactgcgagcagagcgagcagagagctggagacgatgtgtgcgtgtgtgcgcgcgcgcgaggggagcgcgcgcgagggggggggcgcggggccgcgcattcgcgcgcgccgaggccgctcggaagaggaggaggaggaggaagaaggaggaggaagagaaggaggaggaggaggaggaggagaaagtggctctcagcggccggtcggattaaaagtaaccagactcgtccagaaaactgcgtccaggaaggaagtgacagaagacgaatgggaaaaggagaacagctcacagcgtttgaaacatcgcgtaaaaaagactgggggtggtgggggcgggggggattgaaggatactgggaggggaggcgggggtggtagggaagacggagcacgaatggttggggttctaagcagcacgtccgatgaaatgtcttttgcctccttttttccccctttatttaattttgtccttgcctttgcttcgcgctgcctttttctctccgtctctctctcccccacaatcccaaaccgttgactctttcctcgcgagctggagaaatcatcagtttcactcttgcaaaaggggggcgggactagacctcggagcattttaataaaacaaacatacagcagctccctcctcacccctccagtctcaactagattgataaattactccactacactactttaattatgtatatggtatgcagaataaatcactgaacatcagtacctcaatcaagcacttttaaatgataattgcatcttggtgaatcaatctttccattcctgacattttgctaattttagttttacggtggggtaatagcacatgccatacgcaaacctaatgacaattctttattgcacgaaatgaagacaacacggcgagctgcggctccctgctcctctcgcggcgcctctgcggaggacgctcggagagaacctagtctcccgctgcggcgcgctcgcttgctctccggggacgctgcgagccagccagcaggaaagtccttctaaagtcgggatctttcctctgaccaataggagcgcgaccctaatagttgctcttgtgacttttcccccttttggacacgcgttagccacttctctcttccaccggtcggtgcgctcctccgttactcacgcgtaaaaaccacggtccaggatgtctgcagcactcgattccagcgtgcttttcctgcacgcccagaagtcgcggttttcaccctgagaggttggagcgctagaaagcgagccgaaaggtttctctaatgttagtaatgtacgaaataataaaataattaccagtatttgagatctcgacttcatcgcggggccatgaactttctaatcagtttggaaatatttaccgaggaagcagcttcctcggagttccccccctccccccactctatcttttccacaccttactggacttcatccaggtcattaacatgtaaaccaaaccaacttcccaaatgcattaggctaccctagccgatagctgatgacttcacttatcctgaagagtttcagctgcacaggaagcagaaatagagactgataagggaggatacttatgttaaggttaaagcatgataaacacttttccttacaaaaaaaaaaaaaaaaggctttaatatttaggctactagagattgggcacctcccgccctaaccaactgttaatatataccatgcccaataaagccaaagataaaatacatcaactagtatagaatcatgaaaagacaagattgcatgccagtagaattatagattacataaaatgtttaaaccaaactattttttaaaaaatattgtgaaagcaagaagggaaaattaatagaacatggaatatatgagattagacaatagtatattgaaatatctagctaactaaagatttcctcactttagaaaattccttttagcactacgtttaacccaatgactagttgtatttcctgttaagttcagcaatatgcctccagatgactattttaatatatgaggacagtatggttcaaaaagcctcctgcttcaatgtaggaggtatttgatgtgagtagcttctctcagaagagtggcctcaacatttaggcaactgtcccaaggcttcacttgaaaggggaaggtttattttataggcaagtacaactagatctgaacaatcttcaagttccagctcatcattgtgactatcagcaaaactaagaccattccctcccttttattataggaatgcatcacaaactgtcacaaagcaaaaaccatctgaaat

SEQ ID NO: 318195 - DNA, 4001 bp, Homo sapiens
taatgtaaaggatttccaaggaggtatacaggctgtgaactgagtgtagatttcccacctcctcacctgttccaagtagtctttggtgcccatccatgacccaccaccctataaattccagctctgccatatacacctttatttttccaactgaaagtgccacaacaaaaaagcaatacaaagatcatgtctgagctaagtttgacaataggtggtagtgaagcttacagatgagcacagtcttcaaagtccatccaaataggaataatagctaacacttactgacagctaatagaagctatactagagggatacaacaatagttaatgctagctatacaataataataaagctaatttgtgcctactatgtgtcaggcttgttagtccttcacatgcattaacttacttaatccctttaacaattgtctgatgtaagtgctattattatcattttgattttacatatgtggataaacagattaagtaacttaccccaaaatcacagaactgaaaagtggcagagttgtgagctgaacccaggctggcgggtgcccagagtttaccaactgaactctttgaactctcagtggtaaaattaaaagttccctgcaagctgacctcttggagcactcgtgtcaggaagatgacatttctggataatataaattggccccagtatttctgtccataaggaatgaagcatttttatttgggaaccctatacacaaagtgagacccaggatataaaggagtaaggcaagaagaacaagaagaaatgtcattctcttctgccttggcacagcatggttatcacagcctaagaacaataataatggctaattttggctaataagatctccaactttgactttctcctaaataatgtgggtccttgcgtgaggatattttctaaagaagcagcaaagatattgccatcattcatttgctcagtggtgtcactaagaaaaatacttccagaaagaaaattaaggccaaaacacttccttaaaccaggcgtaaaagtcctctaacaaggaatttaaaagaaaaagatcaacaccggatttatctttcttaagtaactatcacttgaaaaaccgtccctcccagcactccttaaggagccaagcatactgacaaggcccctttggtctaagactgcgacctcacacccctactgatcgctgagaactcaggaaaggggagcatcccgccagcctagagcgttatctgcacaatctgaataccaaggacgggagaaagagaagtttagaaaacagtgaagatcccagaaaggaagttcaactgacctagaagaaagggcccagctgaaactgcctttcaagctcagtccgattccccacaaatctccctacatccagctatatcgcccggcaaaatgaaacaaacacaaggtaaggcaatacaagggcaggaattatgcaaaataaaatgcgtaatgaggatgtctctccatcaaaaatactccaggattttcctacacaatcccatgtaacaaaaccaaatgcaaacaacaataaacccttaagaagcgcatgaacaacgcagactgagcccatctcgccccacctcacgccgcaccccggtaccctggctaaggaaaatgtgacccccgcccatgagaagccttccggcgtccggccaaggtccaggagccgccggagttgagtttgcccaactcttacccaggtccagagatcttgagaatcgcagcgcaaccttttctccccggtcttcacccaaagccagccaagacacaaaatctgttccaatcaacgcggttagcgtccaagcagcgtcccagaagaaagcaatctttgggagtcttctttcaggcgtaaaggtggagaagcgggaaagaggaacgtctcaacgcgttcccagtcgcccagttttgcgcaccgggaaagtacttgctgcaaacttgaacaaggttttctctgtctggcccgagatgctggagggggtgggggcgggtaacccgagccggggccgggattcgagcagttgccgctgctgcagctgctgctgccggggcagtggccgctggggggttgtcgcttggcgccgcgcgcagtccctagcgcaacatgcaggatcttcccggcctgactgctgcacctcgatcgtgagtcgcccctgcctgagcggcttccaccgcctggtgggtgaccccgccaaaggcctggtcgcgaagttagcaaatgttggggtcaccgcagggggtgaccgaaggggtgtcagagtgggtgcccgcctgattcccaacccacgttgggtgcaagtccctcggcagagtccctgggaggtgttctagaccctctgtaaggatttgtgggacggtggccggcgcccgagcggccaactggagtggacggcgggtcctcagtggtgtcaggggagaaagcgcaaaggtgggacccagaaaggatggtgattaagccgtgccagagaatgtgatgtggcagcaaagtacatggaaaggtggggcggggaggtgaaggcagagggtggagggtgggatagtctgctttaccatggaggggcggagagagaactccccggacgcgcaggaaaatccccccaggtcctcggaggcctcgcgcggcaatttattggggaatggctccctctgccgactcgccgaggaggccccgggaggcccagtgatggaatgttaaaaccatgaacgggcttttccatttgtgggttagacaggacatgaattctggaatctgcttctctgactgtccatcttcctcttccagactaaagagttttccagcttttacaggaccccaaaagatacaaatttgactgctgcaaagttctttcttgtgtcgttgaattctatccccctctccccacaaaaaaacaaaaacaggtttaagccccataaccactccaggtaaccatctcctaccaggcttctcttcctcccattaataagaactctttctttttagagagacttcaagagcgttcgagtccctactcaataacgctcctggaaaatagtacagactccatattatgtttgagtgaataaatgaatggaatgaatgaacatagatatgtttgaagcccctcaccatcctctttactctccctggaaatacacaggggaagactgttttggtgtttgtttatttgtttgtttagcagtcatcattgccccttctctggtaacagtacctccatttttctttgagataccatccctgccacaaggacagcagtctgggtggaaggtcagtcaggatggtccagcttttccctgtccagaagagagcaactgacctcagctaagcccctcaggccctctctgccaggagttggaactttgatctgggcagcacaggcacaaataattctagaggtgattaatccatatggctgttttctaaggaaattggctgttagttcatgccacttattacccaaagatattttgctttatgaaacttggttgccccactttccttttaattttttaatcaactttattgggggataagttacattccatatattacactcatattaattatacagcttcatgagttttgaataatgtacacacccatgtaaccactgcttcaatcaagataatgaacaattccatcacctcagagggttgtcttgcacccctttaaagtcaacttctatcccacctcatatttggcccgcttagctgttttctgtaactacagattagatttgtcttttctaacatttcatatgaatggaatcacttacatattcctttgtgtctgacttccttcactccacacaatgtttttgaaactcattaatgttgtgcctgtatctgaagtttgttcctttttattgctgagtagtattccattgtatggatataccacaatttgtttgccagtttaccaaatgatggacattggggatgttttcaatatggggttattatgaataaagctgctaggaacaatctttaacaag

SEQ ID NO: 318196 - DNA, 4001 bp, Homo sapiens
tcagacactcatcgacttggtagtgtgaaaggtgtctgctacaaacttattaactttccagagcttcaggctctggaaactattgatggagagaggtgaagataagaaagacacctatcttgagttttagtaggcagaacactctagagaatcatttgactggttttctcactctgtaattttcagaccatttatatcaaattaatttgtggtgcttgttaaagatgcagatttcttgaccccacagacttattgaattgggatctctaggggatgcctgggcatctgcatttttaatgtgcatataggtttattgatttacaaatcaaactcatatttcttttactggcatgacaatcaccgtaattcagtgtaattctcaaaagtgtggtgcaggaactcctgggtgtccctgacactgtttcaaaacaatttacataatattaggacatatccctttttcactcacattctcacacaatatggcacaattttctaaaagttacatgatgattgatattgtaagagaatgaaggtagaagttacgaaaatctagctgtcttttattcagccagacattaaagagatttgtaacaatgtaaaacaatgccattctcaataatttttcattttggaaaatatcctttacagaaatgctatctatgttaacatataatgagtttattttaaaatgaataacctttgttgaaagttgttttctaaaatagtaaatattgatagctattataaacaaaaaccctttgaagttctcaatacattttaaaagtataaagaaattctaagatcaaaaagtttgagaactgctgctataattatcagcagcatttaaaaaataagtggcttcccaagattccatactttagccccaaattctatgcattttccattacaacagaaaatcagaggaaatgatccattttatatttaagcaggggtttttttgttgttgttttttggaattttaacaagcttccaggtgatattgatgaacctaaatttagagaaccactgtcaaaagcaaaggaaaatatctgaagagttttagaagtgacaattactcttatctgggaattaagatgataattccgagggcattaaatggagttggaaaacatgagttcttaaaggctaagtcccttcacctctctgggattcagtttttcttatctgtacaataagattgattttaatattttactagctctgtcagtctggatttcatgcattttcactgctcgagggcaacagaagagttgcatctttctgatgaggtcccaggagtaatcttagagtcataaatcagatcatgtcattcatctgcttagaaaccttcaatggttttccactggattccaaacaaaaatcaaactctttatccttgctcataagccttacaagatttgggctcaagtccctggcctcatctctctccattctcaccttgctccttttgctctagccagtggcctttgtcttttccttgactttgctaagtttgttcccactatatggcctttgcacgcgctattctctctgcctggaatgctctattccagattttcatacggcttattactctcccacttcgttccatcacattatccagtctaaatttctttacagcacttactaccaccttagataatcccgtttgttgacttgtttataatctgcttttcgcactgcttgagagcagggcccttccgttcgttgactgatgtgtccctggagcccagggcagtgcctggcaggtatctggctctcagtaagtgttcgatgaccgaactcccacacccaggccagactttcaaaagaatggcaaacattttcgcctcctgcactcccgaccccaagccacaggctacgactcacgcctcggcgctcctagtagtcccctcgcagcgaccccaaccaagccgtcacctacccgaccgccgtctagctccttccggcctcagcggcggcttaactcggaagttttctcggacacaccggcacgcctctgcgctgaaggagcacttccggggcagtaggaacgccgagtcggctgccgtggctgtgctgagggtggcggccggataggtgcggagcttcctgaacgaggcaggaggggtgcgaggttcaggggcagggcccgggcagccgaagtcgttagggaggcggtgacctgacggtgggcggcggacatctcgcggcagggtcgagggctgtgaaagcggtttagtgattgaagcgctacgtttgtgtgaggaattcttgtcgttgtcagcgcctgagaacttagttgggagcggacgtttacgtcgaatctctcgtttgggaccccattcttgaatgtgggaagaagtgagagcgcatgtttgctcatctagagacagccgtattaataacgataggatacaaaccatcaccccaccaagtgatagcagctgttaacctgtgggcggttacgtgccggtcactgttccaagcccctcacatatcgcgtcactgaatctttatagggacccagaactccatttgacagatgaggaaacggagaggcagacaggtgacctgacttccccacaatcgctgcaggacaggaagaaagtaaactccagagcccgtgctcttagctactaagctgtactgctcttcattttggtaaatggggcgggtggagtgtatatatacgtaatatatatgtgtgtgtgtaagcgtatgcgtttttatttcttaaaaatatggctcagccgtatttatttacagttattggaatctttctcctccaactgagaaaataactggaggagaaactacaattatttctacacgcttactacacaatgcctggaagacttacaaaaacactaaatagtgcagttccacgtacttggtgtttattccttttttttttttaacctttctcctagattatgaatgagttgaggaaagagatggtacagtcattctaataacgatagtaatgataatataaacaaccatcaccataaaaaattctcttctggcttagctcaaatatctggcacaaatgaaagaatagagataaccagtgtttaatattttagtaaagggactgttttggcagggcatggtggctcacgcctgtaattttagcactttgggaggctgaggcaggggaagattgcttgaggccaggcctagggttcaagaccaacctggccaacatagcgagaccctgtctttaaaaatatattttggagtatgtccttccagtctttcatggaattatatgaatttatgtaatatgtatattatatattctacatatagtatactgtatatatttatgatgatgataatgatgcgttgcaacctggagagagcataaggaaaagataggaaacatttattcatatacacaaaacattaattgaactttgtgcaaaaactgtctcgtctttcctattagataggcccttggagtgaatggcttacattagttctctatctccacaggtactgtggtactacttggtacgtagtaggtactcaaaaaatgtttgcgagtgaatgaatggctacttctaagttggtttgtatgtcagtgagtagttgtatctggattttttctctatgtgttttggaaatgtgtaatgtgtttatattatatgcccatatattctgaactccatagtgttgtcttaatctacctttctagcttcatgccttcccattgttcttctctctgccatggtaactactccctactgtaactgtccatgttccatactgtcagacctcaggcctttggctgtaccctcatgttatttccatatccttgaatcctgtcattggcatcatcatctgtcaaaatcataagcttcttttaaggcaggtgttgccaactcagatgcctacagaggttaatcaggtagcataatttgagtgaagtggatttgcgtgggggattgtagggagctggagagcaactgccctagctaaaagggcccagc

SEQ ID NO: 318197 - DNA, 4001 bp, Homo sapiens
ctcttttcccgagctttcatgggctaagctccccttatagaagtaggaagggagacaacttaggaggttatctagaccattcccgccttctccccccaccagcagtccttttcagttagctccccaaaacagagcagctgcctctgcctaggtaatccattccagtcttaacccagactgacttggaatcctattatctcagtgttggaagggcctttaaaggtaatctaatccaacctcccttcagaagtcttcaattattatcatgttctccttggcctaacctcacaactgccattgctcacaatcccttacaaggcactcatccagcttgggtaaggggaagttgggaacaagtctatacctggacagagtaatggagaggtgtagcttccagtgtactcatctggataagatttcctgaatagtagcctccgcgaactcgccagctcaacaccttctgcacaggcacagcaagacattaagtgggaaatgagacaggagccttacctttcttctcttgtctcagttgctctccaggagatcatcaaatccccattcagcactccattttcaaaactgagaatcccaaatcagatccaccaaagtgcagcttctctcttcttatccaggtccaaagtccatggctgagctgaccctgacggggaggagtctgggggggaaggggtgtgtccaggcccctccccccccactgcagacttcagtgcccctctcaggggtccgttacctcccttcattcagctgccttattaagctcagagtctggtgatggacagatcccagatactatcccatctcttgctcaggcaggggaagttatccactgtgagaactggcccatctgtcttgtgctggggctcatgagaagaaacaggccttagaagcggcatggcccaggaggcagatttctgtgttaacctgcagaacatttaaacattataacgctctctaatctagatacccaaatagagtcctaaaaccttctagtttccactccccacctaagagtccatactaggctctatcatcaaaacaccttcgttaaacactccgcaaggttatacaaagcacctacttaactcacgtatcacacgccagaacacagtcacctcatcaatagtgtttacatatataaacacatataatataaacatattatatgtatgtacaaacatacatgattcaggataaaagatggatcgtacccgttctcaccacagaaaagtaaccggagactcttctaagaaatcgagaaaagaacgccctttctcctgccctcctgtctaaagcgcaacataataatcgaatctcccaagcttcttagggtgctgagtgttttaatccaccagccctcttcaactagttaataaatcctttccagaccgagatgctggcatcttccacttgcattctttgctcctttaactaagctccccctctgcttgcaaaactgtgccagagatgtaattcccaacctctgttaaagtccttcccggggctactcccgagaacactctcctggaatgtttaaggcccaagtcctgcttgcagcagccccacagtgttcccatttctcagcccgaaaacccacccctgttgccccctcccctccaagtttattcgtaaacacacacacatccattctctctctcaacacacatccatccacacacactctctctctcctttccttcctgtaggggcgtggcgtccacatgacctccaccccctccaagaatttaactcctcccacccttctccccggaaccccgtgccccgtgttcacaagagaagagggtgacactgcgacccttcctggactctgacccccacccgtccgccctgcggacgaccctcgctctaactgcgccgggtcgttacctggttcccgcccgccccgtctcggctaggagccgcggcccgccgcgggtcgcaatccaggccccaggcccgatccccagcgctggcccaggccccaccccctcgacccccagcggcccggccctcccctcgcactccttcccccctcccaccatccaccgcagccacttccgcccgtcctccggaagtgggccccggcaacgcagcgttccacatcccgcccatttttctacccaacgtccccagcccgtcaccaccgccaccacgggagcgagggaggtgggtctgcagggcctgagactgttctacagccactgttcacagggctgaagaacaggtgtgggcagaaccaggttgtgagaaggaagccgggcgcagagtagcggccgtacaggagggggaggggcagaagagactggccagcagcggaagcgcgcggcaggtggagccgcgcgggaagaagcacgcatgcgtcgcgggggggttggcccttggggtgctgggcggagcttgggaggggcgaggacgctgaagtaggggcggaacctgtgcggtgcagccctgccctctccctccgcccaaaggtcgcccagcgacggcctgcttgacctggtttctcaaaaagggtgaccccccccctccgccccacgctggtcgcgggtcctggcgagaagcctttcggaaagcaccggggcctgtgtgttcccgcttcctcggacgcgagctctgtgtagccgtggtggaggaaggttttgtttcgttcatcgctgctgtttctcgctgcctctcttgacgaggcagggcccttgcagggtgcgcccgcgctgccctctgacaggtgctgttggtacctgcggccgggcccgccgtcgccggcgcgtgaacggcctgcccgaggctgccgggaggagggctgcctggccggcgcggcccttcccgtcgtgccccgggctcctcggaagcagcctcccgctccttcagacgtcggactcctgagtttcgaacctgccccgcggtttccccctcacgctgaatccaggggagccgctactcgtttttgaagttcctatgcagccctctcccgacatgttcgagaatcttgccggactggggatggatttgcagcctccgtgtttgcccccacggttcgaaaaccggaatctaggcccggtctcctggcctgtgttctgtcgtgggatttctccagagcacggactgacttaacatttccattactgggaatgtaatggttgctgcgtcaggactctggagatgatttttttatttggaacgatataatttttggaatttccttaaagggaaaaatacatattgcttaattatattgcttgggatatattattgcaaggaagaagaaaataagaccctttcttcccccaccttcaaaccttctccgcccacctgtctttcccatgggcattaatggcggctccatttactcaggccagaaccagaagagccagcttcactctctcaccccctctacacaatctgactagaaatcctgttgaccctaccttcaatctgtgtctaggatgcaacacctcaacatgtccacaccccccttcatccctcacctgaacacctaggtctccctgccctccctaccctcccagtcgctgggtttccgtacagcagccacagggatcctgtcgtttctgtgctccaaactgcacagcggctcctcagtttacttgaaataaaacgccaaagtccttacaatggctgcagagccggacaacccactggcctgcctagctgtctgacctgctctccccttcctctgttagctgcattggcctctgcaccggctgttgtctatttgtaaaacaccccttccaggcatttccaggactgaacccttcagctctttcaaatctttcctcccatgtcacctcagtgaggcctttcctgaccaacctgtttaaacctgcccctgacccagagcactgctagtctcccttggcctgctccacttttcccaggacgctcaccacttcctgaaatactcgccgggtttaccatgtattgtctgtctcccactactagaatttaagttccctgagtggaggcacatt

SEQ ID NO: 318198 - DNA, 4001 bp, Homo sapiens
ggacatcttcttaggctgttgccagcacactatttcaagaagaaaacagaactcctgactcagagttgtttctgtgcttttaaggcacgtagagcaacatcgatgttattgtttcctgtgtacacggccctggatacttttcaaaatccttgtttcatttgctcctcgtaacaacttgtaagggacctggaaagtcagttttcccccattttgtaggtgaagagaacatggcctgtgtagggttgtacactgactcaaaaagtcaaagctagaacacaagtactccttcctgacccccaaacctgtgttctgttcctctgctcttttcccgagctttcatgggctaagctccccttatagaagtaggaagggagacaacttaggaggttatctagaccattcccgccttctccccccaccagcagtccttttcagttagctccccaaaacagagcagctgcctctgcctaggtaatccattccagtcttaacccagactgacttggaatcctattatctcagtgttggaagggcctttaaaggtaatctaatccaacctcccttcagaagtcttcaattattatcatgttctccttggcctaacctcacaactgccattgctcacaatcccttacaaggcactcatccagcttgggtaaggggaagttgggaacaagtctatacctggacagagtaatggagaggtgtagcttccagtgtactcatctggataagatttcctgaatagtagcctccgcgaactcgccagctcaacaccttctgcacaggcacagcaagacattaagtgggaaatgagacaggagccttacctttcttctcttgtctcagttgctctccaggagatcatcaaatccccattcagcactccattttcaaaactgagaatcccaaatcagatccaccaaagtgcagcttctctcttcttatccaggtccaaagtccatggctgagctgaccctgacggggaggagtctgggggggaaggggtgtgtccaggcccctccccccccactgcagacttcagtgcccctctcaggggtccgttacctcccttcattcagctgccttattaagctcagagtctggtgatggacagatcccagatactatcccatctcttgctcaggcaggggaagttatccactgtgagaactggcccatctgtcttgtgctggggctcatgagaagaaacaggccttagaagcggcatggcccaggaggcagatttctgtgttaacctgcagaacatttaaacattataacgctctctaatctagatacccaaatagagtcctaaaaccttctagtttccactccccacctaagagtccatactaggctctatcatcaaaacaccttcgttaaacactccgcaaggttatacaaagcacctacttaactcacgtatcacacgccagaacacagtcacctcatcaatagtgtttacatatataaacacatataatataaacatattatatgtatgtacaaacatacatgattcaggataaaagatggatcgtacccgttctcaccacagaaaagtaaccggagactcttctaagaaatcgagaaaagaacgccctttctcctgccctcctgtctaaagcgcaacataataatcgaatctcccaagcttcttagggtgctgagtgttttaatccaccagccctcttcaactagttaataaatcctttccagaccgagatgctggcatcttccacttgcattctttgctcctttaactaagctccccctctgcttgcaaaactgtgccagagatgtaattcccaacctctgttaaagtccttcccggggctactcccgagaacactctcctggaatgtttaaggcccaagtcctgcttgcagcagccccacagtgttcccatttctcagcccgaaaacccacccctgttgccccctcccctccaagtttattcgtaaacacacacacatccattctctctctcaacacacatccatccacacacactctctctctcctttccttcctgtaggggcgtggcgtccacatgacctccaccccctccaagaatttaactcctcccacccttctccccggaaccccgtgccccgtgttcacaagagaagagggtgacactgcgacccttcctggactctgacccccacccgtccgccctgcggacgaccctcgctctaactgcgccgggtcgttacctggttcccgcccgccccgtctcggctaggagccgcggcccgccgcgggtcgcaatccaggccccaggcccgatccccagcgctggcccaggccccaccccctcgacccccagcggcccggccctcccctcgcactccttcccccctcccaccatccaccgcagccacttccgcccgtcctccggaagtgggccccggcaacgcagcgttccacatcccgcccatttttctacccaacgtccccagcccgtcaccaccgccaccacgggagcgagggaggtgggtctgcagggcctgagactgttctacagccactgttcacagggctgaagaacaggtgtgggcagaaccaggttgtgagaaggaagccgggcgcagagtagcggccgtacaggagggggaggggcagaagagactggccagcagcggaagcgcgcggcaggtggagccgcgcgggaagaagcacgcatgcgtcgcgggggggttggcccttggggtgctgggcggagcttgggaggggcgaggacgctgaagtaggggcggaacctgtgcggtgcagccctgccctctccctccgcccaaaggtcgcccagcgacggcctgcttgacctggtttctcaaaaagggtgaccccccccctccgccccacgctggtcgcgggtcctggcgagaagcctttcggaaagcaccggggcctgtgtgttcccgcttcctcggacgcgagctctgtgtagccgtggtggaggaaggttttgtttcgttcatcgctgctgtttctcgctgcctctcttgacgaggcagggcccttgcagggtgcgcccgcgctgccctctgacaggtgctgttggtacctgcggccgggcccgccgtcgccggcgcgtgaacggcctgcccgaggctgccgggaggagggctgcctggccggcgcggcccttcccgtcgtgccccgggctcctcggaagcagcctcccgctccttcagacgtcggactcctgagtttcgaacctgccccgcggtttccccctcacgctgaatccaggggagccgctactcgtttttgaagttcctatgcagccctctcccgacatgttcgagaatcttgccggactggggatggatttgcagcctccgtgtttgcccccacggttcgaaaaccggaatctaggcccggtctcctggcctgtgttctgtcgtgggatttctccagagcacggactgacttaacatttccattactgggaatgtaatggttgctgcgtcaggactctggagatgatttttttatttggaacgatataatttttggaatttccttaaagggaaaaatacatattgcttaattatattgcttgggatatattattgcaaggaagaagaaaataagaccctttcttcccccaccttcaaaccttctccgcccacctgtctttcccatgggcattaatggcggctccatttactcaggccagaaccagaagagccagcttcactctctcaccccctctacacaatctgactagaaatcctgttgaccctaccttcaatctgtgtctaggatgcaacacctcaacatgtccacaccccccttcatccctcacctgaacacctaggtctccctgccctccctaccctcccagtcgctgggtttccgtacagcagccacagggatcctgtcgtttctgtgctccaaactgcacagcggctcctcagtttacttgaaataaaacgccaaagtccttacaatggctgcagagccggacaacccactggcctgcctag

SEQ ID NO: 318199 - DNA, 4001 bp, Homo sapiens
gtccccagaattgggaaggaccaggacgcagtgattgctgatggaaggcagatcctggatgatgtgagcacgtaagagcaaaggctacacggcctgaaaaaataccgtaaatgactgaaaataaagctgggcaacatctcagccagtgatgttctaaaacaaaacggcagacccactacagcagcaagggttaaccaaagtgaagcttcagccttcagggagccggccagccacagtccctctacttcagagtttatcagacgcgggcactgcacgtcccggggctctctactccacacacgttagcaaacaggaagaaaagttttcttgccaacttattatatatatatttcaacactgaatcaacatttcctttctgctgaggagaatcagcctctattaacttggggaaaggatgctggagtgaggttaggggggaaaggccactccccaatcccaccccctccctgccccgcacgcacggacgcccggggccgagtttcacaacatcctccccagtccgcggagcccgcccttcctctaacagctggaggcccgggattccgaaagcagaaggcggagttccaacctctcggctcgggaagggactaacgcgcagctggcaccgggtcggaccgggccgctccccagccaagccccctctcgctagcactcatgggcaccggggctttggggcgacccgacgtcccttgggctccctctcggcgcccgcgaggcctcccccggtctgacctccgtccccggacacctactcaccaggtcctcccgacgtcctggccccgaacttggcctgctccggggcgcagggagcgagcccggtgcccaggcgcgtcccaagcgctgccgcggccgcctcgcctttcgactcgccagccctttctgcggcgcgccggggccggacggccgggcgggcaacgtggcccttccccggcaggcggggcggggcggggcggactgaggggcgtgaccgacagccccgccgcgccccgccccccggccggcgtccgccaggccccctcctcctggcccgcctcctttccccgccgcttctcagtcaacccaggacccaagttttcccaggaccccaacttcgggagtcggctttccggctccctggcgcaaccctgagggtggacgcccgaccccacccctgccctcggccctccagcgcagctgcccagcctggagccgcgcctgaagtgggcccgcagtccaggaaaggcgttcaccaaaccctaggccaagggctgggagccagtccccccaccccaacccaggggaggctgaggagcccgggtgggagccccagggtcgcgtggggcagggacagaacaggaaccagggtgcccgacggggggccggggggaaacacctgtgccaaagcaagccggggccagctgtggcttcttcccttttgtttttccttggtgggtggggaatgagagcttcagttctgagtaaagaaagcgaagagagacctaccagcaggggaggcccaccagccctaggcgggaaggactcggtcacaagctttggcggaagcaccatggaaaagcctagaacgggtctgcgcccggctggtgttttaaaggggaggaaggtgcggacctgaagaggaggtggaggtggacccaggcccaccgaggggagggagggacagctcttccatagcaaatacctgtcgctgagccaggagtaaagtctggccgggaggaggacagacgcagaagaccaggggctccagcgcacagagccagtttcgccagcgatcaggtctgaggcctggattccacgaggccggtgcaagccaggagccagccccactccctcgcccagctccctccggcctggccctctgcagaagcctgatgcccacccagctgtctcaccatgggaccccaggcggtgagggtgggtagccgaggactacaggctgctgggtagctgacttccccaagaagggctgctgccatgtgatcaggacccacgcccctgacatcaacccctcccccgtgttccagagcacggagcagcccggaactctgcggcctgtggttactgactgactgctcactaacttgtttctacatgaaaccacgaatcgtgcagggttctagagaaacaaagggccgcgcgcacccgcaggcccctgcgtggaggcgaggacctaaatcaaaactgctaaggggtcaccaggcatggtgaggggcctcacgggccaaaccctccctcggcctgtccttcaagcctcagcagctctgcggagtgagcgttatcatccccattctacagataactagtttgaggctcagggtaagtgcaaacgtgctgcaagccaccagacctggtggggagcatagccaggttttagaccgggcactcctgtgcgccccccaacacccccgcacacatcctccagcgccagtgctttgagagggctctgtctcctctcaggcgctgccgtgaagcctccgcttaagtggccagagcccagacctggaggtggagtgggagaagggcaggcccaccgaggccgccgtgtgcagtgtgcgatgtgcgggaagcccgtggcttccactttagctgactgcgcgcactgtggcaggagcctcgaacccaggcggatatgccagtcagaggccagtgtctgtcacctctgccctatgtttgcctaatggaggagtcaggggcctgggggctctgcacactcacactaggtgtcaaggcgtaaaggaaaaaacaattgtgtttcctaaaagtgaaaaggctgggaaacactggtttgtagatccaagacatgaggagccaaaatcaccttccaggagaaaggacagacatcagggggtgctgaaaggtgggggaagatcagattcccaccactgaccctgatacttctccatctaaggcaggtgaaggggaaacaggatggcggctgttcgtgcactgtaacgcacaccccatctctaccacccttggctgaaatcccaaggctcacaggaagatccaaaaggagaaattcccggactgcaagagaccatcccaaaaagaaagggcctggttagggaatcagaatgggcttcatggaggcaaaagcaagcacttggtctgagaggcaagaaaccagggtaaatgagtgccaaactgacctggggaaaagaggctctgagctcttgatagaggttacatggggagcagtgactggagtaagaaggatagaaacaaggggccaggattctgggggtgggcctgggattggattatgtgcaaaaggaaaaaacaggaggataaacagtcacaagattagaccagattatccaggaggataaacagtcacaagattaggcagaggaacaatactctcccctgcccactccaccactgacaaaagagaactgaaaagatgaaaaggaagtgaaaactgttccaggaaactgccctcccataaaccatgcccaagatccctgacactttttacaatttggaaagaattcatgcccttaaattaaaacatatgttggcttgaaaacatcagtaaaagtaaaagcaggctgggcgcagtggctcacgcctgtaatcccagcactttaggagaccaacgcaggcggatcacgaggtcaggagtttgagaccagcctggccaacatagtgaaacatcgtctctactaaaaatacaaaaattagccaagtgtggtggcatgcacctgtagtcccagctactcgggaggctgaggcaggagaattgcttgaacctgggaagcggaggttgcagtgagcagagaccatgccactgcactccagcctgggtgacagagtgagattccatctcaaaaaaaaaaagtaaaagcaaattttttaaatcagtgttttgtttcccttctccctgcctcctaatatctctgcttgcccctctccctcaccccacaatggagacccagaaattcatctcatccaggtcaaagaggaaagattaacataataat

SEQ ID NO: 318200 - DNA, 4001 bp, Homo sapiens
ttcagctaaaaccgaggtggctctgggtaggcgccacctgcccctatggggctcactcagtttctgaagcatttgaaggactgcctaggagctgtgagatcctttctaacactctgataccatggtgttctccagcctatttcctttatctggcaaaaaatgtttcttaaatagcaagtgaacaccagatagtcaacttccaatcatgagcaataagcgagaagttatatttagctgtaaaattaagtacagaagtggaagaaatggtaacagattttcccttctatctctgctttgcttaaagttaaaaagcactacgtaaaaattccagaaaatatagacatgtcacaggtaatggaactctaactgaactgctttcatgttcgttcttagaccttggctggactcctgtatcatgtaccaggcccataatttcaggacggaaaaaaaagaaaggtagtcagagaagatacactaaataattcaagagttgagagaataagacctaggagggaagggatgcaggttattcatcctggaaaagaagagctaaatacaagtgccacaaaaggcatgaggcctgggattcaggcgatccagccagcaagccaggcaactttggacaagtcacttgacccacttgtaccttagttctctcatctataaggtgacagggttgatttggttcatcacaaggtcccactgcctggatactgacgacagtgacaatttccctactgccccgaacagtaatgagtttcccttgttaacacaggccactgaggtcaggcataccgcagtgcttctaacagtgagaatgagacacagaagcagggaaatgggtgagctcaatggtccccagaattgggaaggaccaggacgcagtgattgctgatggaaggcagatcctggatgatgtgagcacgtaagagcaaaggctacacggcctgaaaaaataccgtaaatgactgaaaataaagctgggcaacatctcagccagtgatgttctaaaacaaaacggcagacccactacagcagcaagggttaaccaaagtgaagcttcagccttcagggagccggccagccacagtccctctacttcagagtttatcagacgcgggcactgcacgtcccggggctctctactccacacacgttagcaaacaggaagaaaagttttcttgccaacttattatatatatatttcaacactgaatcaacatttcctttctgctgaggagaatcagcctctattaacttggggaaaggatgctggagtgaggttaggggggaaaggccactccccaatcccaccccctccctgccccgcacgcacggacgcccggggccgagtttcacaacatcctccccagtccgcggagcccgcccttcctctaacagctggaggcccgggattccgaaagcagaaggcggagttccaacctctcggctcgggaagggactaacgcgcagctggcaccgggtcggaccgggccgctccccagccaagccccctctcgctagcactcatgggcaccggggctttggggcgacccgacgtcccttgggctccctctcggcgcccgcgaggcctcccccggtctgacctccgtccccggacacctactcaccaggtcctcccgacgtcctggccccgaacttggcctgctccggggcgcagggagcgagcccggtgcccaggcgcgtcccaagcgctgccgcggccgcctcgcctttcgactcgccagccctttctgcggcgcgccggggccggacggccgggcgggcaacgtggcccttccccggcaggcggggcggggcggggcggactgaggggcgtgaccgacagccccgccgcgccccgccccccggccggcgtccgccaggccccctcctcctggcccgcctcctttccccgccgcttctcagtcaacccaggacccaagttttcccaggaccccaacttcgggagtcggctttccggctccctggcgcaaccctgagggtggacgcccgaccccacccctgccctcggccctccagcgcagctgcccagcctggagccgcgcctgaagtgggcccgcagtccaggaaaggcgttcaccaaaccctaggccaagggctgggagccagtccccccaccccaacccaggggaggctgaggagcccgggtgggagccccagggtcgcgtggggcagggacagaacaggaaccagggtgcccgacggggggccggggggaaacacctgtgccaaagcaagccggggccagctgtggcttcttcccttttgtttttccttggtgggtggggaatgagagcttcagttctgagtaaagaaagcgaagagagacctaccagcaggggaggcccaccagccctaggcgggaaggactcggtcacaagctttggcggaagcaccatggaaaagcctagaacgggtctgcgcccggctggtgttttaaaggggaggaaggtgcggacctgaagaggaggtggaggtggacccaggcccaccgaggggagggagggacagctcttccatagcaaatacctgtcgctgagccaggagtaaagtctggccgggaggaggacagacgcagaagaccaggggctccagcgcacagagccagtttcgccagcgatcaggtctgaggcctggattccacgaggccggtgcaagccaggagccagccccactccctcgcccagctccctccggcctggccctctgcagaagcctgatgcccacccagctgtctcaccatgggaccccaggcggtgagggtgggtagccgaggactacaggctgctgggtagctgacttccccaagaagggctgctgccatgtgatcaggacccacgcccctgacatcaacccctcccccgtgttccagagcacggagcagcccggaactctgcggcctgtggttactgactgactgctcactaacttgtttctacatgaaaccacgaatcgtgcagggttctagagaaacaaagggccgcgcgcacccgcaggcccctgcgtggaggcgaggacctaaatcaaaactgctaaggggtcaccaggcatggtgaggggcctcacgggccaaaccctccctcggcctgtccttcaagcctcagcagctctgcggagtgagcgttatcatccccattctacagataactagtttgaggctcagggtaagtgcaaacgtgctgcaagccaccagacctggtggggagcatagccaggttttagaccgggcactcctgtgcgccccccaacacccccgcacacatcctccagcgccagtgctttgagagggctctgtctcctctcaggcgctgccgtgaagcctccgcttaagtggccagagcccagacctggaggtggagtgggagaagggcaggcccaccgaggccgccgtgtgcagtgtgcgatgtgcgggaagcccgtggcttccactttagctgactgcgcgcactgtggcaggagcctcgaacccaggcggatatgccagtcagaggccagtgtctgtcacctctgccctatgtttgcctaatggaggagtcaggggcctgggggctctgcacactcacactaggtgtcaaggcgtaaaggaaaaaacaattgtgtttcctaaaagtgaaaaggctgggaaacactggtttgtagatccaagacatgaggagccaaaatcaccttccaggagaaaggacagacatcagggggtgctgaaaggtgggggaagatcagattcccaccactgaccctgatacttctccatctaaggcaggtgaaggggaaacaggatggcggctgttcgtgcactgtaacgcacaccccatctctaccacccttggctgaaatcccaaggctcacaggaagatccaaaaggagaaattcccggactgcaagagaccatcccaaaaagaaagggcctggttagggaatcagaatgggcttcatggaggcaaaagcaagcacttggtctgagaggcaagaaaccaggg

SEQ ID NO: 318201 - DNA, 4001 bp, Homo sapiens
ttaggcttctatcccctaggggctgggctcgtgaatctaagtgctccccttctttgctctcctgttccccaggccctcagagagccagcctcctggatgccccccagacacagtgggtgccatggagccagtgcctctccctcactctgctgtcctggagcctggctccctgtggtaagccaggcttgcagaggtggctcctgacatcaatccgcgggcatgtggctgctgcgggaggcacacactggctcaggacaaagggcaagggctcacggctctacccacgactcaaagagcatgccccagcccttcagatatggccccacctaggccttcatgccagtgtgcttttatagtcaccctgccaaggacccagaatgtccttccccaggtgacacaccctacctacagagaattctgccccagccatgcctgcccttgataatataccccgccagcacggcctctgcccagccatccctcccgtgtcaggcaggctccccgcagagtccctgggtgatgcctctctggccctggagccccaaggccagcccaggcctctgctctggcagaacaagtgcggcaggcgggcgtgctggcagagctcggcgtgggtagatggagctcggagggtccggaagggtccaggttccctcgccctcctccgcagcctctctgggatggcgctccgggacagggaaacagggaagcaggtggcggggaggccgaggggcagctggactcagcccgcttaggcctccagcaggcaggcaggcaggaggccactctcccggaacctccaggccgggggaagagcgcctccgagggctcaggccctactcggccccaccatcgccaagaccggccagcggggcggcgcggggggatcggcccgcaccctccgcctgcaagagcgctgggcgcacgcggagggcgggggccagcccgggaagctcggggtgcggaggacgggctggggccgcacgggagcgcagggcagcaggggccgggctgcctcaggacgcctccctccctccctccctccctcccacaggccggatgctgccgacgcgttctgggcgccgaagggagtcccaggaccgggtgtcacgccggggtcgcccaggccggcgcggggcagcaggcagcagggtgggggggtgccctcgcgcctgtgtccctcacgccgccccagctcctgcccaggtggctgtggctggcgttccgggacctctgtgaccttgggtctctgcccctctccgagaaccccacgggtccccagctcagcgtcgggacagctgcgcccgcggagtccggtccggagcacccacgggcgcggcccgggcccgaggagaacgccgcggctccagcagcaaacaagtgggggagggtgggaggggcgtcctcgcgccgcccgggcggggaaggggcgcctgcgtcggcttccggccgccttccgcggccaccgccgggcccgctcccgccgccgacgcccaggtgcgccaggtgcgggccgggcgggggtcgcgctcacctttctggccgctgagtgccgcgtaccaggacagcgagaggaaggcgcacaggcagaagagcagcagcgtcaggaaggtgccattgcggagcctcatctcctcgggtgcgcggcgggcgcccgcggggccgaggctgcatggcccgggggaccggggccggggcgcaggggtcggaaggcggcggcggcggcggcaggggccccggccccgggtcggggaggggcggggggcccggggccgggcggggaccgggccagggagcgcgccggccgcccctcagggcgcaagctttgtgccctgtactcagggaagaggaacaggctcagaagggcagaggcaggtatcaggctcactgcagatatcaggggcgcgggacactggcggcctcgcctccgcggcagggccgggccgggccgggctgggctgggctgggcggcgagagccgcggcccggcctggatctggggcctggatctggggccgccgcggagtcgacggcgcagggcggggcggcccggatttaaaggggccgcagcaccgccgtcgccggcgccgcgagggggtggggtgggggccggcggccgggatcccgatcggctcccgcagccccgcgtgggctcgtgcgagtcggcctcaggtaaggctggagtgggagtgcaggtcgaccgcagccggggcggggggcgggcggcgggggcggcgctccgggaccccggtacccttctcagcaacatctcctccgcgcgcggaccccgaccccattcgcacgttctcggggctctttcccgggcgtgaggggctctgggtggcgcgggggactgggcggttgaagccgggagcgaccgctgccttcgctgccgcccagggcgcttccccgctcaggagcttcctctgggcctctggacggaggcgcgcaggggcccgggaggcgggaacgatgggcctttctaggcggtatcagggccgatgctcgtggatgcagagcagtgaccagcccagaaccgtaccggcttcccggggcaggggcggcccgagagcgccgctaacgggagcaacgggccctgcccccggtggtgtaggggccacctcgccccgcccagcccagcccgatattgatgggggcccacgccttcattgtttttttgttgttgttgttttttgttgttttttgtttgtttgtttttgagacggagtctcgctctgttgcccaggctgcagtgcagtggcgcaatctcggctcactgcaccctccgcctcccgggttcaagcgattcccctgccccagcctcccgagtagctgggactacaggcggccgccaccacacctggctaatttttgtatttttagtagacacgaggtttcaccgtattggccaggctggtctcgaactcctgaccttgtgatccgcccgcctcggcctcacaaagtgctgggattacaggcgtgagccaccacgcacggcccatttgcgttctaatttcaggcgttcctcaatcctctgtggaaccaggaagggcgcaaattataaagggactggcccagcgccgcctctgggcaggctttgggcagcgcctggcccgctgccggcttggacctcccagacctaggggcccggttcctggtggaggctgcagggacctctgccccacccgcccgggggaggcccgaggggctggactcagactgagattgaatgcggctttgtcttcctagttcagccccggcccacacctggggctgagtggaatcgggagcttcgaggggtctggacagagagattgatgccaagaagggggtggccgagccagaggttgaagtgggctggatcctgaggccccctgttaaaggagagggctccccactcagtgctcctggaactttccgaactagagactgggacttataggagccttctagaggaaactgtcgtgttttcacaggtgtcttctatttgtggcaaaggataatggcttttcacttaggttgtgacataaagggccttagaaattgttaatgagttacttaatgttaaaacttagtcacccagaggccgggcgcggtggctcatgcctgtaatcccagcactttgtgaggccgaggcaggcgaatcacgaggtcaggagatcgagaccatcctggctaacacggtgaaaccccgtctctactaaaaaatacaaaaaattagccgggtgtggtggctcatgcctgtaatcccagcactctgagaggctaaggcaggaggatcatttgagctcatcagttcaagaccagcctgggcaacatagtgacacctcatctcattaaaaattttaaaacaaatttttttggatttttttgtaattttatttatttatttatttatttttagtttatcttatttttttttttgagacggagtcttgctctgtcgcccaggctggagtgcagtggcactatctgggctcactgcaagctccgcctcccacc

SEQ ID NO: 318202 - DNA, 4001 bp, Homo sapiens
ccaccagctctctggggtcgccagtactcacaaggccttgatgttctctgtcactgccgaagtgtactgtgagtcagtctgtggggagaccaagcaccctcccttagccctgctgctgccccaaaaggcctggaagggcttggagaaggggcacaggcttcagatgccccccacgtggagggagtgagcctgctgtgctgagggcggagtaagggggcccccagagacggccctttccctttgggactcgcatggccaaggactagggggtggcgggggcgatgggtaggggtagagggtgccagaaagccctttcaactttctatctcggagcatttgcgaatgaaactagcaactgaacttccgacagctttctcctcggaatggttcctgctgtcagttctgcaccgcgggggctcctctgaatgtcccccaaccccgcgtcccggctcactcgcctcggcgatcagcaccacgatgaccgagtcctccttctcctgcgggctcagctcggagatgagcgagtgcagagtgtcagtcaggtacgagtgcacctcgcgccgcacgctcgggatgcccatcaccaccgacactatgggggacggaggcccgacgctggaaagggtgcgggggccacccgtccccccaccccgtgctcctccctgtctgcgcccatacctccggtgcggccctggcccacgcgcaccgcgggctgcagactgctctccttggccagcaggtgtggcaggtgatggaagacggtgggcaggtgcagcacgtgccggtgtgagccgttccacggcttcaatcgggggtcctctgggtgggtcgggaaggatcgggactgagaccagggaacctacaaccagcccgcccccgccttttccccctcccgccccagacctcacctgttaggcggccccaggtgcgattgccgtctccgtctcgcagcgcctgcctttctgacacggccctcttgatctcgtccagcaccaggttgagctccttggagcgcttgaggctctcctgctcagctgcgtgcaaccgatcgcgcagcgccaggaactcccgctggtaaacgtccacaacgtcgcctgcaggtggtaggcaagccgtcacgagggggcggtctagagccaccctacgggcccctccagtgtgccagcgcacacatctgggtgtccacctctgcaatagctcattgacatctgttcttgtgcctgccacacgtgacatagctggggtcactctaaaattacactgacactaatgctcatggggagaaaaccaggggaattagccctcttccagtactctcccccaccgggggttattttatcctctgagaaggcatctgaagtggaaatacgatttccagacctaggtaggtggatcctaagcaagggctggaacagcctcagactgaatccgctccatccgttggcctccaaagcccactcttgctttttgcagcacacgctccctccagcgggtgggctacccaaggtcctggtgctagctcttcactgtccttgtagcggtcgctggttgctcaccctgcactggattcttagcctcacgatggccccggggggtggctgctgcagttccaggagcccacctcacttcattgctcaggtgagcaaatgaggttgagaaaccggccctggggctgctcaaggacagtcaacagcagcgaggggactagctctgaacgccctggtgcctgtgtctctggagacctgtgctgcgcctggggcaccctgaagggtccgcatgccaccccagggggcccctgtcagaacctccagctgggcccaggcatgagggctgtaggtggatggggcagcacagaggtggggctgcccgacagtagagaggcaccaccagtctggcagggaccagtgagcaagaatgagatcaacaacctcctggtggctcggtgcccacagtccacgcagcaggacgctccaggcctctgccaggcgagtctctgaaaacctatgtggcctacaaggccttctgtttccaagtctccaagtttaagaagcctgaccgaactccctctacactcaggcagctcttccattccttgatccttggtggcttcacagaccccagagttgcgtgggatggcctcaccccaccagcagccctgtgcatgatcaaggtcatgatcaggcaaagttcagtcacctcagggcacacccctttccgaaacgggcaggaggtcgaagtgccaagtgaccagggaagaggaaggggtggacctgggcaggagggaaaggtttaaggagcagggagccaggtagatcttccctgaggcatctcttacccaagaagccagcccccaccctccacaccctgcctctctggggctaaaggctgaggcaaagcggagcctctggacagcccctggcgggagggaaaggggagtcagattactggctctgccaggctccacgctgggctcaggggctcggttaccctggaaacctaaccccttgaatgcagagctggctatccccagggctcacccattgctgggtgacaccaggtgtaggcagcactcgcccacagggatgggactggaggtgcagaggcctagagagccatcaggaatgggttcagagccacctgcacctgcaggtgcgcctccctcctgcctagatgccagtccccgcttgcctacttacagccactgcccacccccacccccgagccccaccctggctttctctgtcccacacgactgcctcagatggacaggctgggtgggcagtggtgggtgatgctgcctgaatcaccctggcaacagcctgcgccttaccctcgcttccttcctaggggcctcccctctcccccgggtcctgtttaccaggagataaagggccccacgggctcccgcccacaccaacccttctgtcatttccctacacactgcaggccctggccctgggcagcctcccccgcctgccagctcctccacccgccttgccctcagcttctctgactgtgggtccaactctgtgactgcctccccatgggccaggccctatgccagggctctgccaagccatgctggcaccctataaccctcgggagctggggaggcagctcaggtgaggagagggaccagcctgggagcccctgccacactttcttgcctcaggaccacgttgttaagagcagcagcaatgaggcctggaggctgtgtcaccctcccctggaggcgagtcattaggacatcctggggcccacaaaccacagttccccctgcttccctcttggttggggaaagattaaagagccaagctggggcacaacctttgtgccttgtactcagggaaaagggacaggctcagaggggcataggcagatatcaggcccgttaacggtctgctgtcaccatgcatgtgtgtggcaggtgtctgcctcctctccagaccctgcaacctcctaggagtaagggtgtccatcattgctgaagtccaggcctggggaggcggacagcctgaaggctgggagcgctgcatggctgagaccccgggctgcccccaagggtctgcctccctgggcagatcctcagcaggtgcttgaccgagggccacagtttgagcgctggcagagctgctgcacgggctagataggaaattgggccccaaacccttctccagggtccattttgcgttggtctaagaggccgtcctgggcttgaccttgcgtttccaggatgatgcccacacctgctgcccttcctctctggttccctgcccacctccttccttccctgcagattccacttcctgggtccttccctcaagttcctggacccccgctggctgcaaagtggaggccaggttccaatctggcctccgactggctacgtctggtttcaccaggggtttaagacagattttctacatgtgacaacgagatgggttcacataagagcccagattcccagcttctcttgaggcctccaaagacctggtactact

SEQ ID NO: 318203 - DNA, 4001 bp, Homo sapiens
tttttattaaggtagctttacctctcaacttccaattttaacacaactcatagacatttaattatgaaaaagaaacaacgtaagaggagatgaggggttacagttagtgaagtagtcccagagttctgacaaattactcaatctctagaagaaaccgaagttaaaatctaaattgctaaagttggtgtcaagttaatttgggattaactgtttcaggctcggaggaaaaataagatatgtaataattaaagccatattccttaaaagaacgcttgtcttagcaactttgtaacagttactttttcaacatgcaagagaaaacaaagaacagtataactgtttcttccccaaactttactaaatgcacactgaaactcttaaaaatcaatgaagaaaaacctgcaggatacatttctattgggaatcctttagcaacagacctttgagcccacattacccactgggaaccaccgaagacgtaagaaaataggacaaacctgggctcgaacttccaaaagaagcctaggagagagagaagaaaacgtgaggttagatcgcacagccagggaaagaggcagcgccggcaacagggcgcagaggaggcggagtcgagcgctcctccgcagctgccaaaagtgcaagacgtagcttcactcgaatcgctcccggcccctttcgggccccctcttggctgcctcgccttcctccccgagtcccaagtgtacaaactcacagacccgggacgaagcccggagtctgagaggcaactccaagtcgcttcttggagctcagcaagtttccaagcagagaagcaaaacccagagcagtcggctggcaccatcagtcccccatccctggcatctccggagtcctccaaatcccacccggctctccgaagccccaaacaactcgaaacgtaacacccttttctggaacgaactcgcgttctgagcacctagttcgcccctggggcccgggagccccaactccgaagccgatctcttcccctgcagcgtaggccagctcgaatcggacactcgcccccaaaccaaagcgcgagccccccatcctctctctcgagtccagagatgcagctcctctcagttccagggatgctggctccttccagagtgttcagtccctccctggaccgtcagcgcgccccccgccccagcgagctccagcccaggggctcctgccacaccgccccctccccccagctcaccagtcccgggggacatggccggggcagcttcgctcgcccagccttccttcctccagcccagagaaaactggagctatcaagccgctctcctggagagggcgtcgagggtctcggtctgccctttaaccccaggggctcccgcacctcccgggctgcggggtggggagtcccgctcttctgagaagcccggtggccccgcatcccgctcttctccgcgcccccagcaaagtgaagcgtgcggctccttcgcgccgcagcccgggcccggtgggccgggggcacagcgcacgactcccgcagggcagtggcgcagcccgctcccctctttgcgatccggccgcggagggggggctccgccggtttccacccacccgggcccggggaagaggcgcggaggcgccggcggcccgcgtcagcgaccggggacacggcactgcctcgtccctggggcagggctcactgcagccggccgccacctccgtccggctcggtcgcccggcccgaccggggccggagccgccgcggcctagtcccggagggagaccgctcccgcgcccgctcccgccccccggccagccccgccacggccagtcgccgccccgcgacccccgcgtcgccacgccgcccctcatggggcagcggaaagagccccggatcccccaggctggctcgggggtcgcggggagccgccgggcgcccgctccagcccggctgctcctgcccggtttccctgctcacctccgccatattggtacctttagggcgaacgagcagcgccgagcccagtccccggatggggcgcctgagccaatcgcagccgccgccgccaccgccgcggtccgcccggcacccgcccggcggcggaggcggcacggccccttatagggcagggcggcccgcgacgcccccggcccgctcgcaagccgacgccgcccggcgcccctcgccgcccccgcgccggccccagccggccagacccgcacccgcgcgcaccgtccttctcctcctggctggtgtaaagttcctgccgaattggaggcaagtgggggacggacggacgcgcgggcgcgggacagacccacgtccagccagtggaggcccaagagccggcgggcgcgtctgggaaccgacccacagacaccgcggcgcgggagggcgtgcgggaggcgggcaggagacttggactggcaggcgatgtgcaggggaactcgacagactcaacttccctaagaggaggaggcgatctatgaaatagacagatgtgggaggaagccctgggaaatgggagaagaggctggtggatggcagagtcagtccagaatgagaggactacagtcaggcactttgccgtttccacgaagggacctgcaggaatgggagatggagaccggtgtacactgctcacggagtggacaatggaagtagacatttgccaaacaggttattgacagcacagaagaaaagacaaaagatcgacagggcagagaaatgatgctgaatatacttgtacagttcaagaagatgcccaaaaaatataaactgtgctgttatccaaaaaaaaaaaaaaaaaaattagaccagttctaggaattgttcatcaccaacgtgtcttaggggatgacccagagatacttgatacatctgttgaaggacaggaacagcatatcaaaggccctgaactgagtctcaaaaattctacccctcacttccctcacttctccaaaaaggccaaacgtttgggtaggatcataaaaggaaactagtcccctgtgcaagtggatgggtgaaagacggagcataaggcttaacaggaatacctgctcgtacatgttccttatgaccatttgctcttcattggaggagattactctccggaaggtccacatccacactgaaagactttgagccaagtacacaaaaatatacactaacgactgattggagagttaggtcctgcaagaagttaaagtaaggtatggagttgccctagcaaatttggaggacacattgtcctaaagtgggaggccaattctatctgtggaaaagaaagtcggctgtaaggtacatgaataagtgagatgcaaataccatcaggaattatagcaggaccctacaggaatttggagagagtgatctcagacaccagagctcttctcccagcttttttctaaaacatacgtaatattaaatgataaagacaagtttttagaagctaaaactttccatacgtcatacttttaatccaaacatgaaaggtcttgattttaacctggggtccctccaattcccttattgctggagtgcatactgaggatgaggctggagactggaggtagggagagggttattttcaaattttttgccaaggcatctcaaaatcaagcttatgccacgggtaaaagttatttacttatggaaattttagggaaaaatcactccaactatttctaaacatcataaagacatggaaaattacactttccctgctgtgaaagatatctttcgaccttttgtccagtcaaataactcaaaaacagctaaactttgaaaccagaccttggcacacattgtatgtactgtcctcaatgaggcgttcagagttttcaaagtaaaaaaaaatggcttgaaattaagtacaagtgaataactttagaaatgacgcagtgagcacgcgctgtggacagaaccatgaaacagtgccctgagcagctggaccgcagtctgagccacgtgaagaaagtgtctccaacaacctgcctcatacattacactggga

SEQ ID NO: 318204 - DNA, 4001 bp, Homo sapiens
ctgctgtctccctccaggtaaagcagaatgggagaccccactgtgttttattgattatcaggccactgtaagagcaacttaaaagatacgaaatcatgaagtggtttgcttttaaacacttattatggagtatcttttacacagaactaggacttccaggttaaacacctatacaagctaagtaacaccattaatattcctgaatcaccctcaaataagtcacttttatattttgttccaaaaagaacttgaagtgggaatgacataagtaaaattataggtttttcaagaaccagaaaaaaaattaaatattacaaaaactcaaattcagcagcatctaggatttgttgtaactcatttttctttcaatcttagaaatttctatgttgagctctctaaagagaggggcagaacaaaatgtttaaagcacacatttttaacagaatttgtaacaatttcatttaatgttataaaattgcagaagtgacatgtgcagtgttttgtaaattatcaaagagaatataatcatgtccctctgcggttcactgtgttttggggtaaaatatctttaacctttcttaaaatacggtgcacatttagagtttttcaggtgttccaaaaaaaatacaactaacgattctttttgacattaagcacggaaatcgaaattaacctttttacttttatcatttatgtattttgaaaatatctaagtgttactcatatgcattctacaaatttttaactacccaggatgtcgagtttctatctccttccacagctgcaacgcttttatttcttgaggcacagaaatggtctctgaacgaactcctgttatttcagcactttttgcaaaatacaatacttcaacctgaaagtaaagaaaatgcttttaataacaactcatactcgttttctgactgtcaatgttgagcagttttctcattttccaaatgtattgctttaatcaaagacaaattttataaagaaaattaaataacccgtaaaaaatttcagtatacctacaagttcaaattctgaaaacttgttgttttaaatacaattcagactaatttctggatgccttttagttttacaaacttaagtgtgccatcattaaaatcctaagtatttatcttctaggaaaacatgttaagcctgccttaattgacataaaagtatagcaccttttataaatatgtaagcaaagaacaaatgtttgagtcaagagatgagttacacaaataaaataaatgaataaataagcgaaaaacctgtttctcacggttgtcaaatgaccttagattccggtctgtataacatcgtccccagacgctaaggattaagttatgcaacatagtaaatctgacatttacagaagcaagtaggtttgaaacacacgacagactggaatttgctagaacaaacttgtgccagcagcctggtatgtaagggatccgacgaagtaaaataggcacctgtcactccgtgcaaacaactctttacgaaataattacaggtttgcaaatgatcaagggtgtagaaatccacagatgaagcacagttcttcacaagaattctccatgaggtgcatttctttttagattaaaattttagcttcatcaaaacgaataatctgggaaagaggtggtcataaaaggtggaggcgccttcagaacgagtccgtccttgctgccgtgagctgacaagagttctcggagaggacccgacttctgctggggcagtcgcagtaaagcccggagacaggaagggcccgggggcgggggcgggggcgcccccgaacccaagacgccggccaggttgggggctagtggggaggtccgactgaccaaggctgggtatgtggagggaaagggcgggagagacacgtcgaggagggctccgcacccaggcccgcacgcacacccgccacccttacctggcacagcggcaccatcccgcctaggacagcgggaccgaatcacggccgcaaaggcgcaggcgcgggctcacccggagcgcaggcgtaacccgacggcgctcagcccccgcctgcgcctgcacggagcatgcgcacaaccagctccgccccgcgccgggctctagctgtttccctcaggcggcctgttccacgccaggattagttttgcttcgcagatgggccgtggtggtgagaggaagcaatcagtatggaaatggagaaatggcttaccatgcatgtccttctccccaggagggaggtcgtggtgcaggcgagcagacgccagactcctggacacttgccgcctgcgttatggaggcttagctaataaccttgcaggggtcttcaggcttttccactggctcacctttaggcttctgacacttttacctacggtatgtgaacctcgaaaatttgagacaggtctcagttaacttagaaagtttattttgccaacgttgaggacatgcccgtgacacagcctcaggaagtcctgaggacatgtgcccaaggtggtcagggcacagcttggttttatacattttggggagacaggagacatcaatcaatatgtaaaaagtacattagttccttccagaaaggcggagaccgttaaaagcaagccccgccccccccaactgggggcttccaggtaggtaatagacagtagcattcttttgagtttctgataagtctttctaaaggaggcaatcagaatatgcatctattctttgtcagcaaaagaggtgacttggatagaataggaggcagatttgccctgagtaattcccagtttgaaggggcccaagatttttttctttcccaggtatatgattagtgtttcttaaagacagaatatccgcctggtcagaacattcgaactgtatgacttttcctgtttattggctgctcggtaattgtatactgtccgtccaactttcccaattcttgccaacaagaactcttggctttaaattgcttgcgtcgttaagtggatgtaagttacacgtccctttccttggagctcacagtcctgggtaggagagttttaaatatgaatgataattccctgtaatactaaggatctgtgttacatttcaagggtggaaggggaaagtggttgtgtcacctggggagtgagaagatgctgagaaggtaaatctgctagaatggtggcagtaaatgacaagagtgggagtagagcacgaagaaatttcacttgcctctgacaagccacagggatatgaagaagcataataagttcacagaagggcaagtagttggcaaggcaggtgtgcctccagcaaaggaggtgatgagaagtgaggctggagagtccttggtaggaaaaattgacaaggagcaatgaataccaatgtgtatcctggtaaagttgctaaacataaaggataaagactatattcacacccaggcataaaaacaagggaatgacaatagtggccttagactcctcagtggcatctgatggcaatgtgcagtgtgtaaaaaaggctgagaacaaaagcatgatcccataatattacagccaaactggtggggcaggattctcctaaatcagcaaaaactcaaaaaacacaatacccaagaacccttcttaaaaatctttcttgggcaaaaagtccactcaatcaagagtaatcaaagtaaataactcagcaataaaggtattaatatgggaaaaatgaaaaactaaaaaaactggcattgagattttaacccattcaaacgtaaaactaagatatcaattatgggatatgattataaaataaaatgtaaatgacatcagaatattaaaaaaaaatggaaactgtccaaagtgggaacatatagttacaaaatatcaattcaggtttcttaatatttttcataatcttctttattttagaaaatattttaggagcaactatcttttacaaataaacaataatctgatgatttataatcctatcagtttcaccagttattttgttgataaattcaagtaaatataggtcaataa

SEQ ID NO: 318205 - DNA, 4001 bp, Homo sapiens
gggaagagcttttgggatttttgtaacaaccctcaaattataaaagaaacagtctcatccacatgtttgtaagtctgacatacacctttcaacatctgcctgtataaagttataaaaaggaactttttttttgctattttctagacatagatgctgtgattcttgaaatgccaaatatcattgcttaaacattacaatgactttcattacaactgcatttactgaaaaatctaatgccatgtaacaagccagagaaaaatgagaaagttgagacaaagaaaaatatatacgaaatgttgcaacaagaagactgaaaaagggaaaaagatttttctctgttttccctaccttgttaacaatatcttccttgttcagcatgccaagagtgaggttaatatccccaaacatctctaaaacgtacagaaaaatatgaattgaaatatatgctgaaatgccctcctgttaattattttgtaatcaacacagaaagttcattcattcatttatcctctctctctctctctcccttgactgctagctctttgatggcaggaactgttttattcatatccatgacataaatgaaactagcagatgctaagttattattatttttgaaacctgaatcaaatgtgaaagggaagataaaagatgccggattcctatgtatccctccaggcaagtgggcattgccttgtaaattctctcttgcaggatttagctctcagagtcaatgaggtgaatttctcactcctgacttaagcattagaaggcaggggtgcaacatagctgtttatttttcactggtcctcccctcaatacctctcccatcttctttttccatacccttttcaactccacctattctcctgtgcctgccaactccctcttttggtcacatgctaatgaaggcttcctgttttctgacaatgacctaaatgtgtttgacttgcattttctaggaatatatgtttttgaataaagcactctagaaaactggaaaaaaaattgagtcaaaggaattgagcaatttcaagctacatggcaagttggtaggagaaatacttttggagatgaagatttcttattaacctccacaccaaacaacatactcatttagggcaatctttttggcaaagtagaaaggcagccatacctggaaattgggagaaatacttccaaaggactcttctagtatttaaaattaaataacaaactgcctttctttgatatgtagccactttctcctcaggtagactctaaattttaaagcacaaccatctcttaggcttccagtctattattggtccttcacaatcagcatgattttattatgtatttagcataccatttcataaatcctttgaggtgtacagtcctcccacaatgacgcgccactcccagccctcatatatacttataattccacagaaacaaaacacagggaagagccttggcttctcaggatctgatgatgcttacctatggattcctctgtactaagtgtcatgtcttggctgtttcagggtctctaaaagatagcacctaagtattagaaatagtaaggctaaaaaatcaaagaggcaggttggcaagtttctcatataaggttcacataagcctctctaaatgaaagtgcctcctccacttgattggcacaatggtctgggagcttccagagatgggcttgctgttgaagttgatactgtattctaccactatgacattgtcttgcgtctgaactcctgctaaccaacaaaatggctgcatctcaccaaatattgtccctttggtgaccagagtatttgggaaagaagtaattagagactgggattcaaaccattgttgcagaccaaaggtgctcctctccctaaacttgagtccattgatcacaaattcaggaatggttttcagtagttgctttactgtcctgatgttgggaaaggctttatggtgaactcgttgattgttacacttagtgaaaatcagtcatatgaactgagcatgctcagtggactggaatgcacttcaggggcagttggatggaatgtccaactgacagcagcaaagtgaagacctctctacctccctctccattaattcctccctggcatgttcaggatcttggcctcactccaggctcaggctttttctctgtcttcagctttctttttgttttcaaattattttttatctagatcaattttccataatgttttcaacttatctagcatgaattgaaatctggtccccaactataaatctatgtgatgacaatcttcaatatatgtccagactctatgtgaatatggaggatgatagagaaagggaaggcagtactgctagtctatagggctaaatgtagaatgggctgaggaggggagctcatgacaattttcatctgctgctgcttttttggccatcttaacttcatcggtgaagcttattccagattcaaaggtcaactgcttccaactaaacctttgaattcatcattcttctcatagacattttgcactgtattaaagagatcctcaacattttccgcttcccaagtcagcatcactttcagagttttgtctccaggtgactttatcatgggatttacttggtatccttatttaaaatgtgaattcccaggccccacttcagacccagtaaattagaatgagggggcagcaatctatatatttaatgtgcgcccctggtgattcttaggttcactgaactttgaaaagcactgaccaaggtccttgcccaaacattcattagtggatcagtaaatagcagttaactgaagaatgtttgttgtggttgggcaaggagctcttccccagcatcatgactcactgaagaataggccaagtttggttagtcagggaggtactggggtgattagaggcatcccgaaactcttaacatctataagatgttaagtctacttgtagtaaataaaacaacagattccctataagggaaaaaatgatgttagaaattatgtgctcttagagtcttaaaaaacaatgtacagcagaatcaataataagaaagctagccatttaggtaattgttacaaccattttcttaatatttttgtgaatggtgacaaatgatttttctgtatgtctgtatataaagacttccttgatttcatagagattagagaagttaggagataattgatttattttgacttttaatttattcatcgctgcaatcaaaacacaactttttgctaaaatcctttcagacaaagtaaattcactcattgaaaccaatactgcagatagttttaaaatccccaaatcctcaaaatagctgatttgctgtcattttatttcatttttcagtcgcctgcttgttacatcttcccattatttcttcctcttctcattgcatgaggctaacacaatatggatttgatttctctaagactctaagaggatcctaaacacgaattctcaaagtgaataggatggcatgtgctaactaattaagtactgtttctagatatttgtgagggagcctaaatctagcctgctaaggaattagagtgtctcactggatatgtggtagccatcccctttcaatgtaacttgtcaaatgaagctacccaatcccaggcctactatgttcccacatgatgttatcagacaaaaatattaataaggcagtaaaggtaaaatataaagctaaagaagaatagatacatagaaataatacagaaacgttataaaaatttaaattttatggttttaatagtttaattgtagatgattttaatgtatactacaattaatctaaactttgatatttatccttttattcttcagatgacgtgttagatttttataaaatatattaaaagtgaaattaggctgtgttttgtttgatttgtcagtttcatgagataagcctaatttcttttttaaaaattttattattattatactttaagttctagggtacatgtgcacaacgtgcagttttgttacatatgt

SEQ ID NO: 318206 - DNA, 4001 bp, Homo sapiens
tacctttctacttagttttcttatggtcattttccccactagaaaatccaaaataaggattcacaaaattatgtaataacttcagaattgcaaatagccttagagattatctagcaaaatcaaacactcttgtatcatgacatagaggaaaagactaaaggcaaactgcttaagtttcttgctcagagcttcttaatacaagttggtgcaagacaattcaaatcaacatcaaaatacttgcctgtgtaagaccttatgctggaggtacaacaataaataaatgtccctacttctccaagatacacaagctagtaaagggcacatacacatatacatgaagtcatcatagaaggcacacatgctaaaaggaaggaaaaactaatttctttccgttttagagaaaccagtgaaaacttcctgaagggaaaacatctgaacagaggtttgaataatgggtaggactgctgttatagacaagatgtgagggcatagtaggaaaagccaagaagcaagtaagtgcaaagtatattcagaaaaagtaagtaaatcagcatggttgggggaagagtgatagaagattatctaagaagagtacagacaaatcctaagagctactacttcctattttcttctttagcccacctctttatccccctcggacccaaaaacttagaaaagggttaaatataattgggaactcagtaataatttataataataaaaacattaatggcaactagaattcagagtgggattatcacatgccataaacatactaaatacttcatatgcattatcttgtttgaatttcctttttaaaatctactagagctacatagatggcatgtgcctgtaatcccagtacttcaggaggctgaggcaagagaattgtttcagcccttaagtttgagaccagcatgggcaacatagcaacacttcatctaaaaaaataaataaataaaaattaaaaaattttttaaatcctaagagataggtactaacataacgctcatatcataaaagtgataactgaagcttattaagaataagtaacttttccaagatcacagttaaaaaatggattcatatacaactcatctgtctgcaaagcctatgaactaaaccaaaatcaatgctaacaaatggacagaccagaaaatttacaatcagattatcaattttcaaataccgattttttattttggggagaaatacagcgactacttaccctaacctttaatgaatgcttttgtcctaaggctacagaatgctctggtataaagcttcaaaatttcctacaactgagtggccttaggcaagttattttacgtttggggacttcaatttccttgtctgaaaaacgggtatagcagaacctactcgtagaatgttatgagagtgagttaaagcatataaaccgctaaacacaatgtcaggtacgacgtaaagcagagttgtccacaacacggtccctgcccatgtaagcaagtaatcagagaggtaacttgaaaagttggacgcttccatatggagatggaatagtctaaccttgtccagaaagatcacagtagacgttcggaaatcgcatttacaatcgcccttgggttatgggtaatcctgatccctgtacagtttatgcaataaggtggagaaaaaatagagtgacaaagcagagactcgggctgtctcattcgcctcagtaaccccagagcctaaaacacagttaggcacggaggcgctcagttaccaactggcagaatactaaagatgccttgggcccttccgaaactccgaagcgagagactcaccccaaggccagcttcccccggctcctcaggttatgtatccataacgcacctgcaacatcaacacaagccgtcaactcagattccatctcgactcccttctgtcgcttaaccactaagaaatccttacccaactgtcccagtactgccgccgccatctttcgccctcccgctacggaagccgccgagttcaagcgccttctggacagcacgcatgcgcaatactctggatttcctgtggggctctcccacaagcagtacttacaccccaggtgccgtcacgaagatcgcaagcactgggccggcgctcgaggtgtggtcaggcgaacctggcttgggaatgaattaattaataaaggccgaaagcacgtgggcttccgaaaattcacctggattcagaaaaactaaagtcccaactcacaaactagaaaggagtaggggaacagaatccgtgaacaagccacctaatccggtggtcctcagttttcttatcagaaatgactaaccttagggcacaagcttgttgtaaagatcagttgaaatagtgtgaaagctattttatttcattttattgaaacagggtctctctctcgcttaggctggagtgtggtagcaatgacctagtctcactgcagcctcgaccccgggctcaagccaccctcttacctcagcctcccaagtagctgtgactacaggcgcacatcaccacgcccggctaatttttgtattttttatagataaggagtttccccaaattgcccaggctgatctcgaattcctgggctcaagcaatctgccctcctcggcctcccaaagtgctaggattagaggtatgagccacgaaacctagcctaaaatctcttttaaagagcaaatagttcaaatatgatgtatgctgtcctaatccctactaatctggttgaccttcaagaatgagtttatattcatctggcatttactgccttatgtcaggcaggtatttcactaaatctcatttattcctcacagcaatccaacaaggcatggattatcattttccttcttcaaatgaggaaacatatttaggatatgttaaagtctctcaactaacaactggcaaaccagtgatcaatctacgactaggtgcctccaaatttgtgcccctagacgccttcaaatatatgtatttgacccctctgtattagaataacaggtagttcagattgcggtttgctacctatgcaggaatgtcagatacccaatgcaaacaagcaacacacgagtagtgcagaatctgagcattttagcatttttgagttgaaaggaaactttcttccacaccatttaccacatacagcttccttcacacagctggccctcaatcaagcaaatcaagagtcactccatttgcttctccttcatctttgagtacccagaacccagagccagaatttccacccagttgcagaaactgttctttccctttttaattccagattcgtactttcatatttttgtttgttttgtttttttgagacagggtctcactctattgcccaggcttgagtgcagtggctcgatcacagctcacaccagcctgtctcccggactccatattgtaatgcccaaccttgtttttactaaccctgtttttagactctccctttttcctctgatcacctagccttgtttccacttgaattgactcttgcttagctaagagagccagacagactccatcttggctctttcactggcagccccttcctcaagaacttaacttgtgcaagctgactcccagcacatccaagatgcaattaactgataagatactgtggcgagcaatatccgcaattcccaggaattcgtctgattgatagcacccaaagcccccagtctatcaccttgtaataaatagtcttaaagcccctgcacctggaactgtttactttcctgtaaccatttatccttttaactttttgcctactttatttctgtaaaattgttttaactagactcccctcccctttctaaaccaaagtataaaagaaaatctagcctcttcttccggctgagagaactttgagcgttagccatctcttggccaccggctaaacaaatggactcttaattcgtctcaaagtgtggcgttttctctaactcactcaggtacaacaatatttttgttaagtggcctcttgtgcatatctttttttg

SEQ ID NO: 318207 - DNA, 4001 bp, Homo sapiens
taggtgtggtcatcctctagcaaggggagctccttgcctccccctgaatctgggctcaccctagggactgaaagagtgcggtagaaatgacacgctggaatttctgaggctgggtcataggaagcctcgtagcatctgcttgggtctctcgggacactctcgggaagctcactgtggggcagtgcaagccacgctgtgggccctgcctgaggaggtgctacgtacagcctgaggagcactgagaccccagacaggagagccggtgccatcttggaagtgggtcctgcagttaatgccacacagatcagacaaactgctcagctgagcccatcccaaatgcctcacaaaatcgtgaacaatgtaaaatggctgatttaagccaccaagccttggcttgtacagcgacgggtgaccaaaacaccacttcttccaagaggctctaagcagcctcacggagacatagagaagtcctgcccagcctcacccagcaccatccaatccctacctgcagcctgagttcagagagaatgaatgaactaagctattcggaaggtctattttaataggaaaatgttttttagttggaacgttttggaaataagataacgcaatgtcttctatagttactcatttacactgaaacgtgatgggtaacttttagggcgtttgcttccagtcactttcccctgactccttgatgtgataattccttccataagatacaaccattctcccaagtgatgcgatgacgagtatgtgcgtgactctggagggaaagggtctacatctgtctctgcttgtgcctcggatgggttttacagtagacgtaccaccgaccccgcctcttcaccaggtaacagtccttgcagcgcttcttaaggacagtcttgtttttgaaccccagcgcaggcagcagatggggcaggaggccgggtgagagaagtgagcgcactgctgccccgggttccacagccacgggggctgcacctcgaatggatccaaatagaaatgtggagagggctcgaggcttcaccgtgtgacgactgagatagagcagagggttcaccattttccttataaaaagatttgccatgttgtggtgaatctatgggagagagaaaaaaaggagttatagcttctcctgcacttccacctgctctttaaggcttccttttctctgtttcactgaggcttgggaaggcagggacctcggggactgagggtgttcccataccagctgcagcctcgacctgagcttgaacactgccttaatcagccaagtgtgccaggagaataaggggcagtggacggtggcttccttccctttcccgcctgctgcaagtgtaggtgagtgtgcaaagccctgcgatgttgaggagccgctcacttggctgggagggagcttaaacttaggccgcatccctttccaaacagacaccaggtcaaggacggttcaactgatgagctcctccctccaactcttcccagacccaggggccctccctcgggccagtttcgggacaggcccccgctccggaagagcacggaactctggcaccccggtcgcccgcccctgcttccccacgcgccccggcccttagggttcagcggccccggctgggaagagctgggcctgcagggcccggaggacactgcggcaccggagccggccctgcgcgcgggctgtgaggtcgcgttcgggagccgccagttctcccgccccggggtcgctggacaccccctcctgtcgccaggtcgggcgcccacggtcggacccgcaccccccaaccctggccctctgagaccgccaggccccggcccacgctcctctgaccgcagcccactcggggagacacgcccgagggtcccaaggtggccggccccaccctctcgcagcccccactctcaagacacccgggacccctgacctgagaagacggctcccttacccggccgcacgctctcacccggcgccgacccctgcgtctgcgcactggcacgcggacgctgctgccaggaaggaagatggcggcgggggggggggtcacgtggcgtgcccacgtccagtgcggggcgcagagacgcagcagcgagtgcgcaggcgctggagtgcgacgtatcactccccgactgcgcgcactctgcgggccaccgggatcgtcgtgctgtttggagcgctctcgggaaaaaaaatgcaaaaaccaggaacgaaaatggatatccgcaacgaaaaagaaattacaaccacttaggccttagaaaaaactggcaaataccaatgtcaaaacaaactgagaaagaggacatgtttttaagtggacaggagaaatgtaaacaggctccgggaaacgagtggagacgggcagtagtttcaactggttacggctgttttccccaacattatgaaaaacttcggacatagagaaaaagggaaagaactgtacggtgaacacccatatacttgccacctagattctacccttagctcgcttatccctgccttttcaggtatctacccgtaactccattcgccttcctttttgtgtgtgtccgggtgagttgcagacgtggctgcgtccactccgcgctccctgcaggccccaacgcttcatcgcagcgcccactttttccacctgacccggcgaacaccgggcgggccgctggagtttatcagctccaggacaaatctgcctctgaccaccacgtttgctgggacatctttgggaccggaggttttcatgtgcattcttgtttctcatgcctttcctcctctttatcatcttccccgccactcatccatctctagtgttttgttcttggagtcacgtggtcctcaggctctgaccacagcaaaagaaaagctggatgctggagcttaagctgggatttatacccaagtcaactctaagcaaaacgggcctttttagaggctgtatttgcatgctgtaaaatcagtcggtgtactaggctttgttgcagaaatccccaatatacgtttcctctgcggctccccgtaaccacacacaggaacgcttgccttgaacgaggagaatgcacttccagtctcgtctgctaagcagttgactccttcacccaataattttgatatttaaatgtctcatgattatcggttaccataagaatataaacaatgtattttcagtttacatcctcccctgcctgtccgctaaataagaaccactgggtactcctaatcgctgaaggtttcgcacaccattgcctgcctcatcagggccctagctctagcctgcggctgcaactgcatgaggctgcacctgccggcgcaacggggccgcttaacttttaggccattgatgaaaagtcaaacaagcgcacagtactcggtgtaatcaggggcatttttagcgagatacctgggatgaaaacgggtgaccacctgaatcagagagcagctccggcgcaccctctgccccgacccgcgctccccgcccccagggcgaaataaataccgggtgtttggcgccgccagaagccgtgcgcatgcgttagcgctaagcgggacgttgcgccgggtcaaaggccagcggcgcaaaatggcggcggcgatgaccttctgccggctgctgaaccggtgtggcgaggcggcgcggagcctgcccctgggcgccaggtgtttcggggtgcgggtctcgccgaccggggagaaggtcacgcacactggccaggtaacggccgctgggtacaggatgcaccttcctccagccgcacctcgggcgactggtggcagtgggctcgccgggcatccgcggccctggttctgcgccggcagcgcaggtcgtggtaaggttgtgctgtcgctcacgcgccggggaggacgcccgcgagtcgggacggtggtggcagcctgtagcggtgggtctcgtccttccagggcctgcgggctctggaacgggaagtctccccagcgggcagcacttgctgtggactggctgcccataggcgatttgtggcagccgatt

SEQ ID NO: 318208 - DNA, 4001 bp, Homo sapiens
ttgttttgttttgtagtattttgatccgctgttggttgactctgcagatgcagaatgctcggataaggaagccaactgtactcccgcataccagctacttgcttactctctatttattatctgttattctctatgccttcattctagcatatgcttcattctagcataagtaatcacctttctacattctggagtcaggacaatatctagatcattgctcaagagttctgaactgggagattaaaaagctgggccagctgggcacagtggctcacgcccgtaatcccagcaccttgggaagtagaggcgggtggatcacctgaggtcaggagttagagaccagcctgaccaacatggagaaaccccgtctctactgaaaatacaaaattagccgggagtggtggcgcatgcctgtaatctcagctactcgggaggctgaggcaggagaatcacttgaacccgggaggcagaggctgcagtaagccgagatcgtgccattgcactctaacctgggcaacaagaacgaaacccgaaaaaaaaaaaaaaggctggggaggtgattgtggggaaagacaggtctcccaaaatgccctctgtgtgtagttgttcacggaaaccacataaacagaaaatagctacaacagctaattcttactaaggtgtcaagcgttgtgcataacactgcctaatgtgtgacattaaacgttttcaccaggtcagccacttaatcttcagaaaactggtggccaactctgaggtttcacattgacgtttaatggctgttcctaaagaagtgcgtgctttttaaaaaaatagaggatgggaggtaggttggaaagggaagataagcggcaatggaaaaatcgagtgtgattattgcatttttatcaaatatgtctgtctggattatgtggttagaatcactgcaaatttggcttctataaatactttaaaacttttttccaatgttttcattatcagatccactatgcaggctttgagtgggctgccatttagttcagatatcaaagtattttacaagtaactaatagcatttattatctacacgtggaaaactatagcaaagaaaggtcaatcaaaagttgtgctctaggtcatcagataaaatgagattaatactgaaaaattcttccacgaagaccaggggtccagctaaatgtgtggtggtgggaaaaatgtttatctgacgtccctctaaagaaacctcagatgggagaaaaatgtcccagccccaggaatggacacatttaggtttttccttttttttttttttttttttttttgagacagggtctcgctctgttgcccaggctggagtgtagtggcgcgatctctgctcactgcaacctccgcctcccgagttcaagcgattatcctgcctcagccccccgagtagctgggattacaggcgcgcgccaccaggcccagataatttctttgtattttttagtagagatggggtttcgccctgttggccaggctggtctcgaactcctggcgatccgcccgcctcgcgttcccaaagtgctgggaccacaggcgtgggccaccgcgcccggcgcacatttgggtttttcgtggtcagcaaaagcacgaccaccccaacacataaatctggcgaatcatacgcaaattccctcatgctatataaccttccactgctcttcgtacctttggacaggaacatactgttattttagggaaggaaatggatcagataccttgtctccttcttctgcactaccaaacaccccaaatggcgtccctagcaatcagattccagaaacgtttcctctcctcttgaaagcccaccgctcccttcacccaaaaaacagaataatcaggggcctaatgaagctgtccggccaacctgcaggagagagctgaggaagaaccacttgccgcgccaggagcatcccgcgccgcactatggaggcagccatcttggagcgtaccaaaaggaacagccaacgggttacggacagaggaaggggcggggttacagctcgacctctcggggcgcccagaattggacgaatcccttttgtcgctctcgacgacaggaccgacgctccgcctcctcgccccggttccagtagttggtatggtccgagacagtatggctgctgcatttcggccctcgaatcgagttctcctgcaggcgctgcagattttggtgtatcctggggtgggaggctccggctctgtcagctgccgctgccctctcggaggtatccgcggctttagcctagggaaggaggggagggatgggagagaagggagtgttagatcccagctagcatctctgtggagcagccacagctcctaagtcactcactggcctggagcgcaccctcgccctctagttgcacgtgggtgcagtggtgaccactgggggtcgtggatacccccagtgcctgcaaatcgaaggactgctggggtattgaccttggggctgtagtgctccctcagatggggcgacgttcgtcttcaggaacatccctcccgccttgggtgacttttatttatttatttatttatttttgagacgaagtcttgctctgtcgcccaagctggagtgcggtggcgcgatctcggctcactgcagcctccgcctcccgggttcaagcgattctcctgcctcagctttccgagtagttgggactacaggcgtgcgccaccacgcccgggtaattttttgtatttttagtagagacgggtttcactatgttggccaggctggtttcgaactcctgacctcgtggtccacccgcctcggcctcccaaagtgctgggattataggagtgagccaccgcgcccggcctttttcttttctgcagagtttggaagcagaggtcttatggagtctcagttctgctaacaatctaaaagacttaacggcacgtttcttcatttttcaaaactatcctctaacatctctatgaagagagttaaatctgaagatgctagtgagtgatagtaaaaatgtttgtcaggcattactttaatgtagtttacatacattaattccttttctctagacaacacccagcaagagaagtaccattcttttctccatttacagaggaggaacaaggttaagtaatttgcccaaagtcagagggaactgttagaggtgggatttgaacacacccaacaatagaaacctgctcctaaccacttcactggactgcctttctgtaaataaatagcaacttttattgttaccttgttactgcagctcacagaactctgttagtgcgtgattcttcggccacgcttggtccgttttatctcatgcacagccaaggatcctaaagaaaggatgatgtttcccaaatctactaagctgtgatcaatgatttccatgtatctcaaatgtattttgagtccacatctgagaggccttaaccccctcatttcacagaggacaaaactgggagttccagtggtcatgctgcagctttttccactacactgtgcttctccctggataaaccaaaactaaatatgcctgttttgcatttaaatgttattagttttttttttaaatgcccttgatacccttaaccgatggcaaatgcccatttgtacttcaaatcccaacttcctgtcaaccagtccccacacaggtttatcactagctacggttaatcactagcttctttcacacacacaaataaaacctgttttgctgaggatttgcattctctggtagttcagaaattgtttttcccaggatttatatttgtacagtttgtacagttatatttgtacctgtctaatggattatctataatagatgttagaggtaatccagctctattcatgttatttgctaacttctaaaacagtcaaaatgactttacttttttctttctctgatttttagctaaaagatacctacttacagataatgtggtgaaattaaaagaatttcaacaaaagaaagtggctgttgcatgtaatctttctggca

SEQ ID NO: 318209 - DNA, 4001 bp, Homo sapiens
tagcaaatgataacttaggaatgattgaggtaagagtctgggttatgtggtaatttaactattatgacttaaatataacattcaaacatttattgtctacttgtgccatcattacaatgaacagtaaccaaagagattcctcattaggagtaataaaagaaaataagattaacaagaatatcattcaccataaataaaaatagggctattttatgaacatccaattcaattttcacaataactcccaaaggtatgtatacttttcattatctctattttataggagaagaacctgggtcttgacaaagttaaacaggttttctaggccatccatcaggagtagtctaagtccatgacgctttcctcaagaccacttctttctcaactggggaagggaaaaaacatgcacacaacaaggctaggttgagcacacatctacagtcctaacattacttcaataaatattaagacatacacttggtagaagatataaaataatgaatgcgtcaaaaacaataatttttaaaattatttatacgttaattacttttcatgtccgccctgaacagttacacggaagctgctgattttttactaggaacttggaatgggagtttgaagtttgaccccctaatctcttagctatagggtgtcaggcagacacatttaacgtttctatgcctcagtttgttacgtttttgtctttttttcatttaccaaaacattgctacctatcgtgaacggttattgtgagcattaataagttggcacatataaaatttagaaccagggcctagcacataaatactgagtaaacgttaggtatcttagttaatacttcatttaatcttcacaattctacaacaaagaactactaccgtaaaacgcgaaaaattaagcaaaaaagttactaaagaaaaagaaaagacatactaaatttaaaattaaggtaaaaagaagttactactcagccatgtgacacatggtcacacagctttgtggtggaacagccaacaggaaacctggcccgccccactctcttaagtggcgtttctcttcatcaccactgctcttccatttggctgaacactcacaaagtagaatccaggactggaatcctggagagctcaggctttcagagttgaagagctggtaggtgttagcgcagccacacacacctagtctctagattcctaacgcagtgactgttacaaaaccaggccaccccagataggaacgaaaggactaggaaaacatgaacgaagcagagagaaagaaatgacgaggggtaaatctgcggcagagtaacccagtacaatccccatctctcccttccgccctggggcggaatccaaggctcaccgagggcggcagcggccagggccgggttgtgtgggctgaggaggcccacgagggttgacaccagctgatccaggaagggcaaagatatgacctcgctctcctcgtaacggtgcacgcgccgcctgcgccgcaggtagaagtgctcctgcagcaggcagtcgcaggcgaccgcacgcagcgccgcgaggtccagcgcaggttcaggttcgggttcgggctcgggctcgggctccgctgggggcggcggcagacccgacaggaacacggtcttggtgaagtactggtaccagcggtcggcattcagcgcgaaggtctgcgggtaaaccatgtacttcataaactgcatcttggtgaggattcgcagcttctcgtctaccgactccgcagcgtgcaccgtcgcctgccagcgctcgatccgccgcagccgtgcagctttgctgtcggctgtcatggaggccacaatcggcgggtaccgcgcgacgggggtcgccgcgacgtcttggcaggtcgtttctgtagccgtggcggcggcattagccgcggtgtgcaatgaaagcctcggaccgcgtagcaaaggcctccaacacctggccgccgccatctttgcccgcgattccggacccagaggtcaacttaagcaattgtccttgccctcttgctgtagggaccaatcggaaagcggaatctgagccagtctgggaaaggacgattctcagtgggcgtgggttatgttgcgtcattcatggtttagccaatcatataacttctccagtcgtggtttcctgcgtttgtagatggaaggaagaacttgtgtgcttagacctgacgctgggaggagatgctgccacctaggttacttgtaggaccctatacggcaacctcctttgccaggaactatttataaacatcctgcaggaaaatggtaagcccttggttaaatttattggcttcatttatgtatctcacaacacttcttttctgttttagttctaggaatagaaacttacttttggaaatacagtactagcatgtttttcagtatatttgattatatttaaaaattatgcaagcatcactcgtgacctactattcatctttgggaaaataattccatatatttatctgtgctaaatacagacaatttgtttaatgatatttattttgaaaggggggtgtatttttacttggatttaactggggaagacagaaagaaaagggaaataaaactatcaaagaagtgtgtttaaattttgccttgtattaaaacccattataaattaaacacgagttcttactaatctgtgagcctcttaaaaagggactgatttaatttttaatcttcagcaacaaatcaatacttgtgcataatgggtgctcactaaatatctgctaagaagtcaccaaagtctcatttcgggtaatctaatttattgattcactcttctgtaattagggaccagaatattaatttggatttattgtaataattcttcagggtattaaaacacaaatgttgctaaaaagaatttataactatatttttaagttaaaacagatggtacggttaaactttgaaattgcaagtctattaaactgacctttagaaataaaatgcaatacttcagtttcattaataatatcttctgtgagaagttgctagtggaatctaaaatatcctttctacattgttaacaaaaggaggatataaaaacttgagatctttaaaccgatattcaatatttaaaaagtgaggtgctcaattttatctaagttgaagtgacagttttttgtgtaaataagtaataaatacgctgtttgagaatgtatcatagaaatcctaggttgatattttttaaattcttatagtattacagcatagattttaggattagaaattagagctagagaccaattaacaccaaaagacataatcctgtcagaaagtgcctttatggttttttgtgagtgaatcaaaataacttcaatttattcaatacttactgatcatcaacattatgaaccaaggaaggaggctgtgggaaagagagtatacttaatcaagggtggagcagtctgggccagaggaaaggtggagtaagactggcaatgaacaaaacagcctacggatgagaaaggactgagtcagagccatggaaagtaggctatctaatatgatccaaagcttttatattacacacaaggaaacagacataaagccaaagttatatagcatggtaggggcagtattgggactggaatccaggctgctggcctctcagtcagttttacttgatgaattttattgattgccttttatatgttaggctgtgttctaagtgctcaggatacttaatgaacaaagcaaacaaaagtttgcactctaacagggagacagacaataaaatataatcatagtagtaaattatatgatgtgttagaaggggataagcacacgggggaaaaaaacagctggagaagtgaagatcatcagtgcaatgtatttggtgggggtgggggcaggtgaggagtgttgtttgcaatgcttattgaaaggattacattcttctagcaaaggtttgaaggaagtgaggagtgaaccataccagtatcagtgaatggtattctagaaagtgcagcta

SEQ ID NO: 318210 - DNA, 4001 bp, Homo sapiens
ctcaagtgatattatattagcatattggttgtattctctctttttttctttttttttaagagcgcaatcacgaacctgatttgaattctaaataggtgagtacaggtctttgttcctatgttagaagggcacagaccattccttactgtatatctcacagtttcttcatttgtttgcacacatcagctgttagtattgctttggactgtactattttaacaaactaccacaatttgtttatgcaaaagacagacatagagattgtttgtggtttgggggctatcagaaatagagccagggaccccatggcagtatatatagtacctgcctgctgagatgccacactcctgctgccaggctggaacccctcagctctggaccccagttctttgctagtaactcttttttttctgtgaacatttacgtacagagacagtatgtgcattcacttctcttgggcaataaacctatgagtagaattgctgggtcatacggtagatacatgcttaactattagagactgacagctttccaaagtggctataacattttatattcccaccagcaatattgagggtttcagacgcttcacattctcatcaccactgacgtctaaattttagtcattttggtggatgtgtaggacctcatggttttaatttttattttcctggcaagtaatgatattgagcaccttttaaaatgttcattgctcatttgggtatcttttgtgcaacacgccaagtcttttacccatttttaaattgttatatattattgatacatatggttatatattatggataacagacctttgtcagtctctcagtccttacagaatctttaactagttgatgctcagtaactacctactgaataagtaaggatcattcattgcaatgggaccaaagactgggatctaggattatcattcagacaacaatttcaggaatttagaaaaaggtcttttaagagatgtacttatataaagcggaatgtacttctcatatcaaagataaaagtcaattataaaataatatagtttcagggttcaaagactatgtaaaccaaccacaaaagtggaggttgtgttccacttatataataattttacctaagttagaaccacagctgaagaaacaaataaaaaggctatcaggagttagtagctgataggtggattaacaaagttactttagctgtctatctaaaccaggggaaaataggcttgtgaaaccaacgcttatacacacacacacacacacacacacacacattaatatacacacacacatactaattaaacttaagtttacttttctatttccctcatctggcctgtagccagacgcttggagaggttggggagaacccgctccggcgaggacgcagtacgcggggccagttgcccgaccattcccgagaccttgaagggacagtgggtcagatccagggttcgcttccttccacgccccgctaccgccttccttccgattggctgatcgggggcaccacagccaatcctagacggcgattggccaggctaccgccagggtcgcctcacccgcacacgcctaagactaacaaggtcctggcggaggagcgggggatcccggcagtaggtacaggacctacctgccaagatgctgcacggttgccgcaaggctcgaaccctcggcgccggacccacctcactgcccggtccaacaggctcaaagtcccatcctcacacacacccgcgggcgccgtcactggccctccgcagaggcgcggtcaccgctctgcctctgccaccgcctttactccccgacgccgtcgccatagtcagcaccgtccctaccgcccaagatgcggaaacgcgacaaattgctttacctgaacgaccctactagcagacgccatcttgctgcccatcatgacccccgagaaggggcagtttccggggcgcgagcgagccgcggcgatcactggagtcccgggcagctgtgggcggtgcttcccgggacgtcacggaggcggagaccggactgggctctcctccgccgtggggctggctccgccccctgtgcctgaccccgcccaccccttctccctactaggatccacccacgtgtgttctattgtttcgttttggggacaaaattttgttaaggtgggtctctgctcattagcctataaattgtctaggaccatttcctttccagaaagccagtctataatttcgatatagttcaaaattttatctggaaccaaataaataatacaaccttcttatctgacagctcttgcaaagattaaaaaaattaaagaaaaacaaaaaaaaaaccttgcggtttcctaaaatgaataatttcgttaaaatgggagttagtggcaagctcacaagagtttactctggcttaaaaagggccatgtcacactctcttgctgattggcattgcttgattgtaatttgtttctgttttctttaccgtttattactcctgatatcgaactgctgggcctttgcttcaagttgagataactcaaaaattcagaaatatttgaaatgtaagccactcatatctttcccccaaaattacattacgggcggggcgctatggctcacgcctgtaatgccagcactttgggaggctgaggcgggcggatcacttgaggtcaggagttcgacaccagactggccaacattgtaaaaccctgtctctactaaaaatacaaaaattagccgggcgtggtggcgggcgcctgtagtcccagctactcaggaggtgaggcaggagaattgcttgaacccagaaggcagaggttgcagtaagccgagagtgtgccactgcactccggcctgagcgacagagggagactccgtctcaaaaaaaaaaaaagttacattacgttctgtgataatgcttaggttatatatagtattgtaagcttgaccaatgtgtttgatgatatacatcagtgatttctaagtcttgggatctttttagaaatataaattactgaacccaggtatggtctattgggattcagtgactacagagaggccattaacccgttttgttttgttttgtttttgtggtttttttttttttttttgagacggagtctcgctctgttgcccagcctggagtgctgtggcgtgatctcaggtcactgcaacctttgcctcctggattcaagcaattctccagcctcagcctccccagtagctgggattacagacgcccgccaccacgcctggctaatttttgtatttttggtagagacagagtttcaccatattggccagactaatctccaactcctggcctcaagtgatccacccacctcagcctccctaagtgctggtattacaggcgtgagccactgcgcctggccccattttaattattttcaaatgtgcagttcagtcacattaagtacattcacattgttgggcaattgttaccatcttcagaaactgtacccattaaacaaaaacttattcctccttccctcagcctctgacaactatcattttactttctgtctatgaatttgactactgtgggtacttaatgtacgtggagccataacagtatttgtccttttgtaattagcttgtttcacttagcatgtcttcagagttcattcatgttgtagaatgtgtcagaatttcttttttaaggctgaaaaaatcccattatatgtgtataccacattttgcttatccattcatctgtggtaattctttttttttttgagacagagtcttgctctgtcacccaggctggagtgcagtggtgccaactcggctcactgcaagctccgcctccctggttcacaccattctcccacctcagcctcccaggtagctgggactacaggcacccgccaccacaccaggctaattttttttgtatttttagtagagacagggtttcactgtgttagccaggatagtctccatctcctgacctcgtgatctgcccgcctcagcctcccaaagtgctgggatt

SEQ ID NO: 318211 - DNA, 4001 bp, Homo sapiens
agggacctttctccacaaagaaaaaagacacaattctaatacgctcttctgccctctggagaattccagaataccagagccatgactgaggagaaaaaagaatcccccacaactcaccagagttgccagacattcccagatcacttcctccttccttttgttggactttctttactttctttttaacaggcccatcattttccaatggtctcttctttcttctgtcaatttctgtagcctatatcgggaaggttagaaaatgatgtgttatctctactctgagaaggcctgacgtatgtgaagcaatttaaaccttacaactgaatgacaaggttccttgccatccactcttcaaagaatcctctacttttagctctggaaaaccctatgggtgaactgtttttaacaccataaaagacaaggtagagtctgatagtcaggagcctcagcaactcaagccgtgtttagaattaattgaaaccaaggctgctaccggtcttgattcaatgagccttcagctttctctaattataaaacttgaatcaccctacttacatatgctaaataaaatacctctaagaaataaacagttatgtagcaaaggcacagaggggaaaagataggtaataaaagaacagtatcatttttgacatgttcactgcaatttaagtgtttcctgtttaaaaggtttatgttcatcactaaagatgtgacaagattatgaattttttcttggcagaaaacttgccaaaagcatacataagtccttcaccagctaccctttaaatggtgggtgcaaaattttggtgaattcatgaaaacgtagctcgtcctcaaaaaaaacagaagaggagtaatcattttaagggagaaatatatacgaaaggaacaagattttgaagcacccaagctgccacctacattaaaacacggtaggtggctaaacaccagtcttcaatgcccttccacagcctcaatctgaaaaatactgtgcaggtgacccaagtgaggggtcacccttgggcttttcctgtggcagtatctctggtttaaaaacaaacaaacgtacttattgcgttgaaggatggcaacaggaaggactccatgattagtcacatctataccatcctaagaaactttatccacccaaactgtatttcagactttataatctaaactacaaaaagagttcactggggaactgcacaatatgactgcttttaaccgtagtgatttcaaatattgagccatgctgttgcagtcttaaaaactggagacctaagggcagctttcttctagtcacccaatccagcacttttttaaaaaatcagtaaaactcttcgaccaccaaggaaaaaaaaaaaggatggaggttaaaagacgcaccccttgcccacaagccccctcatcagaatgggagtcaggagacctgagttcctgtctcaggcctgccattaaaaacctgcataacctttgcctatctcctcaaacggaagtactaaaacctcagcgcttcacccaatttgtagccccggctgggctcttcccaccttccccttcttcagcccgccccttcctcctccagccctatcatcgggcggagggtccccgcctccgcccgccttacccacaagccccgcccccccagccccgatggccctgcccagtcccagacagaacctactatgtgcggcggcagctggggcgggaaggcgggagctgggggcgctgggggcgctgcggccgctgcggccgctgcagccgctgcagcgccagggtccacctggtcggctgcacctgtggaggaggaggtggatttcaggcttcccgtagactggaagaatcggctcaaaaccgcttgcctcgcaggggctgagctggaggcagcgaggccgcccgacgcaggcttccggcgagacatggcagggcaaggatggcagcccggcggcagggcctggcgaggagcgcgagcccgcggccgcagttcccaggcgtctgcgggcgcgagcacgccgcgaccctgcgtgcgccggggcgggggggcggggcctcgcctgcacaaatggggacgaggggggcggggcggccacaatttcgcgccaaacttgaccgcgcgttctgctgtaacgagcgggctcggaggtcctcccgctgctgtcatggttggttcgctaaactgcatcgtcgctgtgtcccagaacatgggcatcggcaagaacggggacctgccctggccaccgctcaggtatctgccgggccggggcgatgggacccaaacgggcgcaggctgcccacggtcggggtggccgactcccggcgagaggatggggccagacttgcggtctgcgctggcaggaagggtgggcccgactggattccccttttctgctgcgcgggaggcccagttgctgatttctgcccggattctgctgcccggtgaggtctttgccctgcggcgccctcgcccagggcaaagtcccagccctggagaaaacacctcacccctacccacagcgctccgtttgtcaggtgccttagagctcgagcccaagggataatgtttcgagtaacgctgtttctctaacttgtaggaatgaattcagatatttccagagaatgaccacaacctcttcagtagaaggtaatgtgggattaagtagggtcttgcttgatgaagtttaccagtgcaaatgttagttaaatggaaagttttccgtgttaatctgggaccttttctcttattatggatctgtatgatctgtatgcagttcccaaggttcatttaccattattaaaaaatttttgtcttagaaattttatgtatgtcaacgcacgagcaaattatcaggcatggggcagaattggcagctgggtggaggcttcggtggaggtgagcactccgaaaggaaaacagagtaggcctttggaacagctgctggaagagataaggcctgaacaagggcagtggagaagagagggtaaaaattttttaaggttacatgaccctggattttggagatctcgaatttaaaggtgatgcaccagggatgaacgctcagattttcagtttgaaagctggcgtgacatgtaaaggagtggagaataatgtaccattgtaatgatgaggcgcctctaggacatctaggataatttcaggcgtggggatctaggtgaattgaactgttggagggaagggaataaccaaggaaaagaatgtgggggttgagagatgccccgtttaaaacctaagagacctggatatttatggttgtaagaggaggcatggcagaggaaatggaaacagtaagaaaggagcagatgctgcatctctttaatgggacagatacaaggcatttgggtttgacacttaggtcactggtagagatgatgacaagagcccgtagctaaagaattgataaaagccagtctcaaaaatcccaatatagtctggtaatgttaatgtttctttggttcagatagctgactctcaaagttattttcctaagaaactgaaccaaaagtggacgctatatgtaaaaagtttttatagaagtgttataagagtaggatagagacataattaaacatgttttaaggtaattgagtggaacattaagcacctatttttaaaagtatgatttaatatcaatctacaaagtacacaaatataatacaattgtatcagacagttgtgacagcactgattagaggctgaacattattctaagtctttaattcccacaacaaccctagaagcaggaactattgttatctctattttatagataaagtaaaccacaaggggttaacacgttttgtcttgtgggtgacaaaatgcattcaacttgagcactttgactcagaatcttttttttttttttttttaagagggagtcttgctctgtcgcccaggctggagtgcagtggcgcgatctccgctcactgcaagctccgcctcccgggttcacaccattcttctgcctcagcctcctgagtagctg

SEQ ID NO: 318212 - DNA, 4001 bp, Homo sapiens
tgccgattcctctctgaactttgctgaaatgtcctcatctgttaagaggccggctgctgccctacagaggagataagataatacggtgaaaagtgctataaagcactatccaaacttgagtttaaattctttgagtcccttaatctcctcgccctttgaatctttcagagtttctaacagggtggagagagactgccagaggggacagccactgacgcctgggtatatggccttgttttgttaacaaaatacagtgcgtctagtcttgagggctgaatgatgtaaatagtgaaaggatctctctcagctttggagaaagtccctccacagcccccaccctcacctttcctacaggtaggggatggcgtggtgggaaattagggggtagagaaaccataaaagccaagagataaaagtaaaagaggctgtaaaggatgacgtctccaaattgtaaaaggactcagggaccaaaaatggatgctgaagcggagaattctctgcagcctcaattctcaagtggggtgcaggtgcggatctctacctagtctctctggggagaggacgcaaaagtggtcagggcatatcaaacagaggagcagggcgtgggcaacaggtgcccctggccaatcagtggttgttggtaacctgggacaagcaaaggccgtcttctttaaaagcctcagcgtccacgtctgaaaaatagggtagtcacaagtccagtgtctacacttgggggttctagtgaggatctcgatctggtgagctagtgaacatcactctgcaaactctcaagccctgctggaatgcggttaattattactgtgagccaagaagagcccgtgcgcttctggccccagcccgctcccggcgaagctcagaaccttgccggggaggtgctggctgcggagaccacagagagacatttcctccccgcaccagactctgatgccaccatccctggtgccaccatcccttcgtgggatccggcttcgacacccgcgggactcacgaaagaaaatggtttctcctcaatgtctggctaagcccagttagctcatctttaaaatgggggcacaactctcagggttgagttttgaacctgtctcgttcctggtacatccaagtgctcactgaacatggatccaactccttcactccccaggcagagactccggggaacagtgaaacaaaaacaagccaagtggccagagcgcagggccgagggctgtagaaacggaccaccgagcgaccccgtaaacccagctggggttcgctcttgaaaaaacaatctgtatgtcgagggagtctcagacacacacagcgcggttattacccagagggtgtcttggatgcggacggcgcactgggcgcgccgaacgccccgggcacccaggagtccagaggccctgggcttgctttcccgggagtgtagcgcacgcagaagggtctcggtaccctcagccctggaacacccgccccccgctccctccagtaccccgcgctacctcctactcctgccccggcgcgcactcacttggcggcggcgaatatcggccgggttcctgcatccacgccgctccatcttctgaattttccgacttgaccgaggcggtctcgaagggcttcaccagcggcccggggctgtgcgcttcccgagcgccgtgccccgacagcagcagtggccgcagggtggccccggccgaggcgctttcggccggcagcggggacgcctccttgggcggcttcttgtcggacatgagcgcctccacgctgaagggcaggctggagaccttgacgcggcgctcctccgcggccccctcggcgcccccaggccccgggcctggtccggccaccactgctgggccctcctcgtcgggcgaaaacaagtcattgcctttggacggagaagccatgacttctctgccctacgtagctcccgacgcgcgactccgctggcaacccggcagcggcgactcaaacttttttgctgcggagacgggaggggcgcgctgggagctgagcctttcctccgaggggaagtgggagacgcgcgccgccaatccgcgccgggcctggcgctgacgccagagacgctcgcccctgattggctcttcccgaaggggctgccccccctcctttttttttttttttttttttttcctgtttgaaataaattaggagttaattacaggagcagtcagcagagttgttattaggcgatccctgaagggttataatcacgccgaaactgaaaagcccgagacctaattaagagcgattatttaaagcggaagttcgccgagtcccatttcttctctcttttgacccttctttaaaagggaccctgcgcccatcccactctccctctaccgccagaataagttcaagattcgcaaacagcattgcagaaacatttacgaagcccctactatgcgtcaaaattggcttactttacagttccagaaagtcggtgctgaaactcacaggccagtatccctgtgaaagaaatgtatgcacttagaagagtaactcgccactagccagcgctcaaaagcgcccactgttattattacaactctttcccctggaaaagaggggccggaaggagcccgagaagtggtcaggagtgcctctctcccaaatggttcggagtgaagaatttaaatcagttgtccccatctctctcactagaaagcaaatccagcgcacttttagaaagttgaaatctctgtacttgtctcctgaacctcctttctgagcgcgatccggatccgacctttttctcaagacagtgcaagtgtgcattcatgagtttgtttgagcctgtgtttgtcgtgcgtgtttgaatgccagtgtttgcctcggagggtaatgggggtgggggggaggaggaaaagtcgccaatatctagtgcctccctctcgtttgcaagtctcagaaataccggcttccaagtttgcacaccccaggcctacatatcattttgggaagcacatttttattcatggcacctggttttttataaaaacatagatgtctccaccccaccccaaattataccctcggtaattcctttccaaagcctcagtgatgactgtctcagcctggggaaggggagagcgagcttcgaggattagaggcctcggatctctccgctggtcctcaaaatgcctgacctagaaggttagcttcaaaagacttttttcaggctgcggctgtcttttcctatatctgaacgattatcctgcgactgacgaggtaaataggaagtcacccagttcaggacctcgcctacagcagatgcttgctaaacattccctagagcattggaagggagagacattgtttttaattatttaaatgaccaaggcttggaggctacctcccagttcaggagtattagaaacttgacccctagacctacagacccttatgtacccttcccaatgtacctctctgaggcactgtttgcttcaccccaaacctttccctgaagtgaaactgtgctggccggagagaactggaaaaaagtattacctgaatcttagaggataaagacagtctgcacaggccagttaattcagtttgattaaagatggtcctgaaaaagtaaaagagtaagtaagtcctaaacacagtcttctaaaacttctgagtttctctctcactataaagaatatgcacatttcttcttaaccaactggaggctcaaaaaagttaaaaaaaaaaaaactatgaaaactacctggagatgtatgcgttttccccttgagtcatacctggtgatagttgatttgatatgcatctcaaatacagtacaggtaaatccagattaacttctgtaccttctagatgtacaaggcaaggtgcaggctatatattttggaagcaaatctgaaattcgtttagccctcagctgccaaagtgtacaaaagggttcaactttcagttaggctaaacgcagccaatgttttataattattcctgaaaactccttgtta

SEQ ID NO: 318213 - DNA, 4001 bp, Homo sapiens
gattacaggtgcgcaccaccatgcctggctaattttagggtttcaccatgttggccaggctggtctccaacttctgacctcaggtgatccacccacctcagccggcccaaagtgctgggattacaggtgtcagccaccatgcccagcccaaatatttcatgtatcccattaaatatatacacctactatacccacaaaaattttttaaatgtttaaatgttttaaaaagacacaaagagaaattgaccacattgcttaaatgtgataccacaagggaagcccgctgaaactttaagatgaccctgactccacatcaagtgctaacagaggaaatggtttgtattttacaactaggactaaaaataagacccattttaagagcactttcccctggagaaaacacacatatcttgaatttaaagatacatatgcaaatgcctcaggccccaggtggtctttacggaagcagtccctgatcagatctctcatccacagcccacgtgcttctgcattacagaggtgggaagacatctgcaacaaatttggcggtgcttctgcacttctgctggagagaagggcagaaaaaaacctttacagatgcaaaacaagaaggcttctcattaggcatttggattaagaactattgctcaagaagccctgagcaaggcctacaagttctgatctctctaacctcctctcctatgactgtcccccttgtccatgggcctctgccatgctggcttccttgacgctccgccaacccttcagacacactcccacctcacgaccttcccgggggctgttccctctacctggacgactcttctctcagacctctcgtatcttcaagtctcggctcaaatgccacctttgcgaggaggaaaaagatttcttttctttcccatgatatttatcacctcctactacaccgtataatttacttaattatctataattcaccccgtttctcctttccccctcaaataagctccaggaatgcagagatctctgtcctgttcactgatgtctatcacaagcacttagtgcctgacacacagtaggagctcgagaagtattttctgaatgaatgaacaaatttcttgacctgaagattcagaagagtaagaagtgggtggaaaggatgatggtgaggggatgaggagaaagaagcgacagcggagaattcccaagggagagacaagcagagactggctgaggccaggccgacccccttttctccccgcagcgctgacgggaggcggacgtaggtgcagggcatcccgccagccgcacccgaggcactcagacgcaggcagcggaggccggcgggcttctgggctcactgagaaagtccagaggcaggacggacccacgcgggctccgagcaggccccgttgggggctccgacccacggccctacccctcccagcagtgcccacaaccccaggtcctctccagaatccccaggggcgttccgggccgcaatcccttctcggctcgggcccctccaccagcctccagcgctcgggccctgcgctcaggcacctgcctgcctgcgccggggtccccattccggcccgcgcggaggccccagcgcgctcctgcggcctcagcccgcctggctgccccgtcgcccggcacaagggcaggaagcgctccgcggcgctccccgctgcaaggaaggggctcccggcgcccctcgccccggccgcccctgcccgacgccccgcctgcgcggcgccccctcacctcagggcgtacgtacgacacgaaggagggcttgggggccttggtgccgccgccaccgccgactactcctttccccagcataccgccgccctgggaagcagcgacgcgcggacgcagaggcggcggctcgggctccagctggggcagcagcggcggccaccagcactagcggctggggctccgcccatccccaaggccgcgaccgccgcgatgccgcccgcatccggctccgccgctgacaccgctcgccccgcccaggcccgtgggccccgcccatcccgtgcgcgggcccagagagccgggagaccgcaactggaggccacgcccccccatcacgtcaggagagtttgacccgccgagattcaccaccttcctgcggcagagcccgccctcatgctttctctgattggcccgaggcgctgccggccgaaccccgctcccaacccattcttgagtgcacttggagagatgtttcctccaaccaatccagagagcgttctctccggactttccaacgattggatggcgaggataaaaccgtcgtccaatgatcctgcagtcaccaagttgtcgttagcaggggttcacggcagtcgttttcttccgtttgcttgtgtctttggaataaaacgtccaaaaatgggatgtatggaatcttgctataggagttcccaacttacagcgatgacgttcaaggttttttattttattattatttacttttgagacggagttttgctcttgtcgcccaggctggagtgcaatggcgcgatctctgctcattgcaacctccgtctcccaggttcaagcgattctcttgcctcagcctcctgagtagctgggattacaggcgcccgccactatatccagctaattttgtgtgtgtgtgtgtgtgtgtgtgtgtgtgtcgttctgtcgcccaggcttgagtgcaatggcgtagtataggctcactgcaacctctgcctcccaggttcaagcgattctcctgcctcagcctcccgagtagctgggattataggcgcctgccatcacacccggctaatttttgtatttttagtagagacggggtttcaccatgttggccaggctagtctcaaacccctaacctcgtgatccgcccgcctcagcctcccaaagtgttgggattagaggcatgagccaccgcgccatgccgctaatttttgtatttttaatggagacgggggtttcaccatgttggccaggctggtctcaaactcctgacttcagatgatccacccgcttcggcctcccgaagtgctgggattacaggcgtgagccaccgcgcccgacctcaaggtttattattttaaatgtaaacaaaaatgagacaaacgatgactcacgcctctaatcccagcactttgggaggccgaggcgggtggatcatctgaagtcaggagtttgagaccagcctggccaacatggagaaaccctatctctactaaaaatacaaaaattagcctggtgtggtggcgggcgcctgtaatcccagctactcgggaggctgaggcacgagaatcgcttgaaccaaggttgcagtgagccaggatcgcgccactgcactccagcctgggtggcagagcaagactgtgtctcaaacagaaaaaaaaaagtgtcaaatcaagtgttaacaaggcagtgaggaataagtttgagcgtttgataataaaagactttgtcaacttcatttttccaaacctttcccttctttgtgtttccaacaggaagaatatcaagagcccttaagagacttctatttactctacgaagttattgataaaaccctcattttttagtcaagattgcaaagaaaattcatttcagttctacatttggtgccaagcgttgttagttgcagataaataagatagaatccagctcttaagaaattcaatctagtggaaaaaaacataaatatttgcagttaattttttaggcgtcaggcactgtgctaagtactctcattggtgaccttgatttttaccctcttaatctccatgtgctcccccttcccaaatacactccaagtaaatataaaatcttagtgaaaacaaatgtgcttgcttttgcaaacatagtttcaacgcaagtcctgcagctccgtttccagctagattgccacctgtaagccaatatttggtatagctgtgctgcagccgcctctgagtttccttatcccagtttccaggtgacaaaacagagatgcaagtaatttgcccaggtctcac

SEQ ID NO: 318214 - DNA, 4001 bp, Homo sapiens
gtcccaaaaaatagttgttttgactttatgtgaaactacaggttattgattacactgtataatttatatttgggcctactgaatgatggttcaagataacttgcaaatctgataccacagtgagctatttaatgtttaatgtaacttttcaaggtgatgaaatcaattactcaggtagtagaataagttattgtcatgtagtataaataactgcttattaattttctataatcacctttgtgatattaagcagcttcatcaatagctccttttatacaatttcattttatcatatactgatctccactatgagacatgattttcttgtggtgaatttatgttaaggtacttacttgagttctctgctgagaactaaattaattctaccctttaaaggtcgattcttctcaggaatggagaaccaggtcttcttacccataatcaccagattctgtttacctataaaatcacaaagaaagcctaagtatattttgggaatatacatatattttcatgtatttatatacaacatgtccttgaataacatcgttttcttctaacgttgatgagaaaaataatcaattcctggccagggccaccgtctgtgtggagtctgcatgcttttcccatgtctgcatggggtttctccaggtattccagtttccttccacatcccaaagacatgcacattattcttcttaaatgtatgtatagctcatatttacttcagtgttttctattagaagtgtttttggccttcatttagaagtttggtgatgtttttgtgaccagcaatatgccctaggaacttaactcttgtgtacatccagtagcctatggtaaaattggttttgctctacattgtttcacttaaagtcacagtttccaagaactcacagatgacattgaggacttatctatgtgcatagatatgatggacatcctgacatttagtggatctcctttaaaaaactgaacttaaaagtctcttcacgggcaggtcaatttcactggttgaaagtaagagacagctgaaccctcgtggagccattcatacaagtccctatttaaggaacaagtgattatgctacctttgcacggttagggtaccgcggccgttaaacatatgtcaccgggcaggggtgcctctaatactgataatgctagaggtgatgtttttggtaaacaggtggggtaaggtttgccgagttccttttactttttttaacctttccttgtgggcatgcctgtgttgggttaacagtgggggtaataatggcttgttggttggttgtagatattaggctgttaattgtcagtttaatattttggtctgatgtaggcttatgtggaggagaatgctttcatgttacttataccaacgttagttcttctataaggtaatagattggtccaattgggtgcaaggagttcagtcatatgtttgggatttttcggatgataggtgttgagcttgaacgctttcttaattggtggctgcttttaggcctactatgggtattaaattttttactctctttacaaggttttttcctagtgtccaaagagctgttcctctttggactaacagttaaatttacagggggatttggagggttctgtgggtaaatttaaagttgaactaagattctatcttggacaaccagctatcaccagactcggtaggtttgtcgcctctacctatgaatcttcccactattttgctacatagacgggtatgctcttttagctgttcttaggtagctcgtctggtttcgggggtcttagctttggttctctttgcaaagttatttctagttaattcattatgcagaaggtacaggggttagtccttgctatattatgcttggttataatttttcatctttcccttgcggtactatatctattgcgccggtttacaatttctatcgcctatactttatttgagtaaatggtttggttaaggttgtttggtagtaaggtggaatgggtttggggctaggtttagctcagagtggtcaagttgagttgaaatctcctaagtgtaagttgggtgctttatgttaagctacactctggttcgtccaagtgcactttccagtacacttaccatgttacgacttatctcctctatataaatgcgcaggggttttagttaaatgtcctttgaagtatacttgaggagggtgacgggcggtgtgtacgcgcttcagggccctgttcaactacgcactctactcttagtttactgctaaatccaccttcgacccttaaatttcataagggttatcgtagttttctgaagtagaaaatgtagcccatttcttgccagctcatgggctacaccttgacctaacatctttacgtgggtacttgcgcttactttgcagccttcgtcagggtttgctgaagatggcggtatataggctgagcaagaggtggtgaggttgatcggggtttatcgattacagaacaggctcctctagagggatatgaagcaccgccaggtcctttgagttttaagctgtggctcgtagtgttctggcgagcagttttgttaatttaactgttgaagtttagggctaagcatagtggggtatctaatcccagtttgggtcttagctattgtgtgttcagatgcgttaaagccactttcgtagtttattttgtatcaactggagttttttacaactcaggtgaattttagctttattgaggggaattgatctaaaacactctttacgccggtttctattgacttgggttaatcgtgtgaccgcggtggctggcacgaacttgacgaaccctagggttagtatagcttagttaaactttcgtttattgctaaaggtttatcactgctgtctcccgtgggggtgtggctaggctaagcgttttgagctgcgttgctgcgtgcttgatacttgttccttttgatcgtggtgatttagagggtgactcaccggggcagggatgcttgcatgtgtaatcttactaagagctaataggctacgaccaaacctatttgtttatggggtggtatgagcctgtcgaaacattttcagtgtattgctttgaggaagtaagctacataaaccgtatggggtgtctttggggtttggttggttcggggtatggggctagcagcggtgtatatgttgagtaaggtgggcagggagttgcattgatggggttagtagaatgtgagttgagggaggatgatgtgttagttgaggggtgactgttaaaaatgcataccgccaaaagatgaaatttgaaatctggttaggctgatgttagggctctttgtttttggggtttggcagagatctcctttaaaaaactgaacttaaaagtcttaccaaaattcatacttatcactcattacctaaatctaactatttttccctttggcattatccaatttatatccaatatttagttttaatcatttgcaattgtgtatgacatagtaaagattctggggaggccaagatgggcagatcacgaggtcaggagatcgagaccatcctggctaacacggtgaaaccccgtctctactaaaaatacaaaaaattagccaggtgtggtggcaggcgtctgtagtcccagctactcaggaggctgaggcagaagaatggtgtgaacccgggaggcggagcttgcagtgagcggagatcgcgccactgcactccagcctgggcgacagagcaagactccctcttaaaaaaaaaaaaaaaaaagattctgagtcaaagtgctcaagttgaatgcattttgtcacccacaagacaaaacgtgttaaccccttgtggtttactttatctataaaatagagataacaatagttcctgcttctagggttgttgtgggaattaaagacttagaataatgttcagcctctaatcagtgctgtcacaactgtctgatacaattgtattatatttgtgtactttgtagattgatattaaatcatacttttaaaaataggtgcttaa

SEQ ID NO: 318215 - DNA, 4001 bp, Homo sapiens
ctacacacttctatattaaaaaaatgctggtgatatcttactataccattgaacaaacacatttctgttaaaaaacaaagactatgtggtggtattagtgtccttttgtttcataaatatcacttcccaaccaaaattcttcaaagcacaaaacggtaaaatccactgtaacggctctaaccttatcggattcactaatacagtgaagatctgcagaaaatccatgtaccacagcttgctcacatatttcttctgcgatggcctttgcctgtccctgctgtgtagcatatagtaacagaaacctcctcatcacttcaaggcatgtaacagtgaaactgaaaaatgggggaaaaaagatcctctttttaatgaagcagtaacaacctaaagatattaattctccctcaatctttaagaaacaatgcaacaatacccacacataatatgaaatggccttttctaaatttgttttcagcactaatctcaaatgagcctaaataagaattcatcaaattaaggagagtgtacgaatgaaactctaattccatggctcagaaatcagatgatcggctcgaaactacttgggcttgaatctgtgtttcctaagtgcaaccctgtagacaagctccccaaatgatccgtaccacagctcctttatcctaaaaatgagagtattaccacctacctgaaaaacgatgtggcacaagccaagaacctgaacaaaacttgagccacagtatcattcacaacagtcttaaatagcttttggtttcctctttttaaaaaaagataaaagtaaaaactatattaaaatgataggattcttggttcttatttgatcctaacgctaaacaaactaatcatagtactaaaggtaactgaagcacatactctccttcattatttaatgcaaatcaaaaatatgtgagtgtatgggcatatatacaaacgggtgcatataacgaaaaaatatttccaatccacttaaacattttactaacacgtttttccgcaagagataagcagtagtaaaacaaacgacactcacagatttttttccatactcatctaacggctaaaattggtgggctgtcaatttgcagagacagatttaaactgaaacccaaaccaaaagcttggctttcggtgaatgaaccgcccagaacggcacctggcatgaaactggtactcgataagttatctgaatgagtgaataaacaatatgaaaacactacacattgacagctcacagaaaacggtggaaacgataatgaaaaccttactacagctaaaatttctatcacttcccatgaaacacacatcctgagggcttcccaggatcaatcaacccctcatccctgctactgccccacaatccggcaccaccttcccacgactctcagcggaggcccgggccccagcagccccggaagcggcgcggaggcggtgggcagagctcacggccgcgggcagaactcacggccgcgtcccgccgggtgggcgctcggaacgtcccgggttccccggagcgcgccgccccaacccggcatgttccccagttccccgcgtccccgagtgcggtttccctaggcctggaaagcgcctagaaccaaaggcagaacatgaggagagaccccacgccgcccaggggcctcccgcggcagaggccgacgccgagcccaaggacacgctcccggggacaccaaagccaaaggccaaaggccaagtccgagccccagcccgcgcccgcggcgacccccggaggccgaagggcgtgggaaccacgggcgcaagccggctgcccacccccgccccgggccgcctctcccaggagattagtgcagggcgagcggccggaatccgggaaccgtagccgacaggcagcttacccacgccgcgccagccgggcacgaacctgcacaacgcgacttccaccaaccttgcgccagcgcgcactgacgcagcgcccatgctcggtacccaggaccaatagaaagctccgaaggggacctgggccaatcacattgcgccgccctgagtcgtgctcccgccccgcgtttgctacggaggcccacgacgcccaggcgcttccgcgaccacccggagtgattgcccggcagagcgcggtaggtgtcaacgcggggtctccgcgcagttggtccggctgggtgtcaaagacctggccggctttctcctcaggctgcgccgcccggcccgtgtctcagcgcaggtccccggggcgccgagtttgggggtgctcgccccgcgggtccctttcattcctaggaaaacgcgccgcggggcctcccgtctgtctgtcttgcacacacgtgttgccaaatccccccgcaccgtctttagatctggactggccgccccaccttctcccttcattgatctatgttttgctttttcttttcctaccttgtttccattgacaaagtagaccctttccttcaacactaaccttctcccgacaccgaggggaaaccaacagcttagggcctttccagcgcgtttttacccttgccttgctctaacctcgcctaattttgcccactttacctgttctttgatttctatccaaatgcaatttcttccttcaaccaacatttaagggccacccttaagagctacattgcctgagtttgaaccctagctctgccacttaaccacctgcataaactgggcaaagtaactttgtgcttcaacttcttcctcgtgtaaaatgatagtaaaagtactgaatctgtgtaagttaatagaatacctacaacagtgtttagcaagtaatagcgattgttattgttcaatgtcagccactcttctaactctaggatgcagagactttgcccctctggtgtttatatgttaaccatcctttttttttttttttttttttttccagatactcgtttgtagtttcataaacattgatgttgggtcaatcatgttctcaatgtatttaaccatgtgtttttaaattttttaatttagttatcaaattgagaatctgatggtatggcattaatcaccttgaggaagaacctttatcgtttatctgattttcagatgcatagagctctggctgctttaaaaaataaacctctaaatcatgttcacaaggtagtcaaggagcgtctgtgcccttggttgtgttcacgacaacctgagcctttcggggtcaaattccatcatgcccattgtaaaaagtttcattcgaaaaatggaaatgaccttcatccactcggtggaccagtgttctctcaagtatctgactgcgacaggcttgaacaaaatgttaaaaatgaggagagtcagatgttttacaggagactgagcaacttgacttcatcagaagaagtgctaagttttataagcacgatggaaaccctgcctgacactatggcagcaggagctttacaacgaatttgtgaagtggaaaaaaaggatggtgatcaagggctgccaaaagaaatactggagaatagcatctttcaagctttatgctttcagtttgaaaaggagccctcacagctgtcaaacactagtttagtgactgctttgcaagctctgattctgttgcatgtggatcctcaaagtagcctgttgctgaacctggtggcagaatgccaaaatcgtctcagaaaaggtggcatggaagttcgcaatctttgtattcttggggaaagtctgattacactgcacagttcaggttgtgtgacactagaactcattataaatcaacttcaaggtgaaaaattggaaacatttaccccggaggatattgtggccctttatagaatcttgcaggcatgtactgaaaaagtggatgaacaccaaacatttttaaataagataaacaacttttccctatcaatagtttccaacctgagtcctaaattgattagccaaatgctcactgccctggtggttcttgatcaaagtcaagcatttcctctgattataaaattgggcaaatatgtcgtgaggcatgtccc

SEQ ID NO: 318216 - DNA, 4001 bp, Homo sapiens
aagaaactcagaagtcaaagagcagcccaaagacagtaaaactaatcaaatcaggattcatatttttccttacaaatagcaaacgtggtattaaaatgggagaaagagaaatacaaatccagtgaaacctattgcttaatgcacataaagttcttagcacagcatcacatacacaatatggtcaataaatgttacaatattaactactattattttcatgcttgttaatgacctagttcagtgcatggcatgtagtacaaacaaagcaactattatttttaacaagaaggaaacagttccaattggctgtgtttctccccaagacaaaagaaaaaaccttccaatttataaaagttcaaaatgttattgacacaatttttttaagtacagtattggcaaaacaaataacttatccattcatataaatctttacatgtttaaacattttggatacataattctctactgttaaaacatttagatacattattccataaaactgctattaagagctttttaaaaataatatagttgctagttggtgagagctcaggtgtcatgcccagcacaaaatgtgtaccaactatgtgacaaaatacacaatcctatcaataagtttaatagtgaaaatggctaattaaatctacttacatacaaatttcaataaaattcaagcaaagtttattaaaatataaactgactacctcttcatatgactttcaaatcacagaactcatgctttagagcagtgattctcaaatctatttttacatcttgtcccaggtatctccaattgtctaatgagttggcaaaaaaaaataaataaataaaataaagcccaacatgcagggatcaacaatctaccaatctacttcttcaaagtgaaccacccacctgttttcttaaaaagtttagtatttttgctggctgagaaaccatgtcgtcttcagttgtcaaaattggtacatcgcctataatcaaaaaacagtttacatacaaggacacagtgtgatttcctctgagagattccaatatcctaaaaactatagcagttgcacatttagaggggaaaaaatgagtaagcttgtcttggtttttttgctgtttcacaaagagcggttctaaagaacattttcgtttctcataatttccagtgatttcgcttgcactttgaggtattactcagaatgatcaaaccataaacaacacagagccaaggtcacggtaagaaactaaatcctcaatattatagctatatacctcacagctttaaatggaagaagaaaaaaaagagtgcagaaaggggagtgtaaaggtttacactatacctcttgaacctctccaggtgttatctatcacattgactttcaagggtgcaccagaaaatttggcataagcctgaaacagagtttgcaatcaaacattttagaccaagtgcgtaatgcaaagctgcagagcagctttacttcacagccccatcccccaaaggcagaaggcgactgatactgaggccgcatccctccccgtgatctcaagtagggacgcgggcgccagccacccggctttcgaggactttgctccccaaaaggtcctggggatgcagagtagggagggcgcgccccttgcttcggggtttcactccaccgcccagacagctttgtgaggcggacaaaactcggagccaagcggagaagccttgatgtcgccgccggccttcggcgggggtatcggccaggttgggactcgtcggtgggagggagcccagggcaatgcagcgtgcagcggctcggccctcctggaccccgcagcgcagcgggaaactggggcaagtcagcctggcgcctccagccccgccccttcctcctgcgccctggcccgcgaggcggcctcaccatcaccaccagggactcgctgtgaaccgatgggagtccccagccgcctccccagcaactgagttccaagggggccgccatcttgcgcgggccgacctttactatcccggaagtacttttcctcctaatttccggcacgtgaaacgcgggggcgtggctaagggagggaagggtaatttgggggctcttgagagatgagagaaacaacgactggagggattaagaagaactcttaggagcagcttggcctaaagggtaagagttgtgtgccttaagtcagacccaccagtaattcttcaaatattaatatttattagatccctagagtgttccaaaccctttgaacattaaatctgtgtgatgcctaaattaacctgtttgtaaaacagggatgacccagtatttacaagattgtggtatttacaatgtcggagagaaagaacttggcacacaggaggcactcagtaattgttcaaccccttctcccatgtatgtggcctctgcctgcctttccagcctcaacctgttctcaccctcatgttcactggcacaaccctgcttaaaagttacagtatttctgaacgtcaggtaaattgtgcccaccttcagtgctggtccttcaatctggaatatctttcttccctatgcagctgctccctcaaaaatgagcttaactcaccttccctgtgatgtttttacaaagttaggagctctgggttcttgtagccccttgtgcatatttgaattgtagcttctctccctagctacagaccttttgcctttcacagaagagggctagcttcataggtttgggacctgtgcagccacacaaggctctgtgcttaaaaaggctcctcatttggctgatgctcttccgtcactgtcttgaaattcttaagttttgaacaaggggctctgcatttttattttggactgggcccctcaaatcatgtagctcgtcatgtctgtgggcctaatgagcacagactaaatgtttcttgacgttaaacctgacagtttctcagaaaaactattaaagaggaaattttggtcttggaaatgctatgatccaaacatatgactgggtctcagagttagaacttgggtgctgggtcttttttctagaaggcacagtagtctttctgggacaccctcgcagtcatgcctctgagttctttcctctattccactgagatggtcggatcttcttaactaaaactcaaaagaaacctctgcaacttttcgtaaaattactattcaacaaatatttgctaggcactcccttactgtttacataatcattcaaattacagtgccagcctgctaaagtcttttttacatgtttcaaaaccaagagttctaagaaatgaaaaagagatatgtcagaaatgagaattcattaataataactgtataattggaaaatgcataacatatgtaccattaaaactgtcgaaacatttattgagcagctcctatgtcttagacatcataaggttctggaacaatacagaaatatataaaacatgaattctgtcctcgggagtttacagtgcacaaaggagatatacacacaccaaggtgtaacaagtcagataatcacgagtagggttagaaatataagcaaaatactacagaaacacaaaggagggacagtgcatcctctgtgtgatcagtggagactatctgttgagtcttcagtataaagaaagtaaagtaattcaactttcagattgtaatggaacctccctgttttgagggttagaaatgtcaaaccatagactgacaaaggcaaggcagggggaaagaaaatcctaagccataaagctgagggtccatatactacattcaggcatttaaaacaatcatacagaaagaatgtggatttcctgagccttgtttgtagcaggactgagaggagtgaatgaacattcttagtggacacataacacagttactcagtttggccttcttccgtactgctgctactacatacagtgatttcatttgcattaaagagaaattaaatctcttcccttagtgttgaattgagacagaatagcatgtcattgcatctgatgaaagaatccttacacacaggtttattag

SEQ ID NO: 318217 - DNA, 4001 bp, Homo sapiens
tcagagagctgtcctaagtcacacagttcttgagctctgacctcaggtctcgttccccagtcccaccagcccctccatagcacagccctccatacaccagggcaagccagtccgggcgcagtggggggcctcacctggatgtgcatcctggcacggcgcagcaggctcagcgtggtgtaccgggcacagtcggcccccaggggcatctgctgcttcagccgctccaggcaccgcttcaactgggccctcctgtggggaagaggtctggagggcagtgccagccccaccttgccggccacaggaatggcaggggagggaaggccagagggcagtggcccctgggggctggcgctgtcagggcaggactgggactcacctgcgcttctccagttcattgtgcactgacctgccaatgccagagaggatgaggtgaaggggaatcagctactgcccatgccccaatcccagggcccccagtggctcaagagccactacagatgtctgccccaaacaagtcccctgtggagagctcatgctggcctcagacaccagagtcccctggcagggcgaggggagtcaaagacacacggagccaaatgcttaacagaagcctgcccaggtgggtatgagggccctaacaagggcgcctgccagctggccagaaaggacctcccagaggtgacagctaactgcggaaacagatgtttcccaagccggtactggagggaggggcattcaaataggagggaacagcatatgcaaagggctggggagaggagagaagaggaggaagccagcgggggaggtgagtggcctgatgtgtggggtgcgggagtgcgagtggaagcgggaccccaactgctgttggcagttcccggcacatctagaggtgctcaagaaatagtccttgaatgaatagaaaggtgtgagtgtgtttggagagtggggagatggcaggaggggtctgaacgcttcctggagcgggacacctggcccaaaagatgcaagcaacaagtgggcagaggagggcccgaccaggggcggcgcccacccccacccccactcccgccgcccccggcctcctcaccgcccgctgtcctgcgcgccaggagcctgggggggtcgcttcttcctcctgtggatggggcctggactgcgatgcgggcacagggacgcataaccatgctcggcctctgccagagagagtccccgcccgcgtcaggctggggctggacctggtcccagcggcagccccaggcacagcacggtcaaggaaaggcttttggcgccaggaccatttcccccacccgtccctgctctaccgccccgggactcctctcgagttgagggcgaggcgccccgggattactgtcctagggcggtgcatccttcaagctgggagccaggtccagtccaggcccgtgtcagcgaggtcgccgcccggaattcagccaagggtccttcctcacctctctcacggcgctccaggaactcggccgcctgcagcaggacctggatgttgctggccaagggttccatgtcggcgacagctggcggcgggccggcctagggtgccggccggagcaagcggctgcagcacttttgttacaaagtaactgacacggtgcaacaaacacaggggcccgccccgcccccgggacgccccgcccgcgggaacgcccagcccttggctccgcccctctggaacccgccacggagccgcagcccaccctccggcagccgccccgccccgagtggtctcagactttccaggggcaggtaagggcgctggctccaggcctggccctggagcgaaccctcaggctaaccggtgctgcttcttgcccgcctcactcatccacccacgccggctcattggcgtctttgatctcagcttccagccccgtgctagtgactagcccccaacatagcacggcgctctgggggcctggtggtcccctgaaagcgccgggcccagccgctgcacgtgggtgccgcgggggcggggcctccggccgccgctcgcccattcgcacatggcttctcaaggatcgctgttgtcatcctcggggcggggtcggggagcctctgatgccctattggctggcgctctgccccgccctctcccgccgctgatccacacgttcgggcgggaaaagaagcaggtttcaaatttgaaaacccaagcgatggggcggggttgagaggggagctgggcctcaatgcgcaggcgccggcggaggggcggcggacccggctcctgccctccggggtctgtccccaagcctgcctgccatctgcccccgaaggcccccgtgggccccagcttcctactgtgtcgaatgggaataatatctcggcccccctcctcttctgtgaggaagctgttgttgctacgaaaacgtcagtggggtaacagcttcctcaggcaggccataccctggaggcacgcgaaatggccttttccggggccttgggctctggtatccacgcagttggggtcctctcctgtcactgatgtctcagctgtgtatgactcaggaggtgacctccgtctctaagcctcaggagccctgcgacagcgttgaaggatcagagccaatgcctctgcggtgcccatggcatgaaggagccgcccatctcaaaggccagtgcaaccagaccgcggcgtttgcctcccaggcagcccctgcttgccttactcagagtccataaacccttcttgcacctgactctcctagccggccgaaggagtggctgtgatgacttctagcctcagcaccagcaggtggggccacatctggggacaggaagatgaacgcagctgtagcagggtggagcattgctgccagccacgggctgagtctgtgactccagtaatcccaaaatagagaggggagggaaggtgggagggatagatgctctgtaaagagacagtcctggtaaacacaagcacatgtcagtcaggcctcagttccttgggaaaaatcttttttttttttttgagtcttgctctgttgcccaggctgaagcgcaatggctcagtctcgactcactgcaacctccgcctcccgggttcaagcaattctcctgcctcagcctcccaagtagctgagactacaagcgcccaccaccacacccagctaatttttgtatttttagtagagacggggtttcaccgtgttggccaggctggtctcgaactcctgacctcaggtgatccacccacctcagcctcccaaagtgctgggattacaggtgtgagccaccgttcctggccgggaaacatcttgaagtttcggccaggcgccgaaaaaaaatgaagtttctctaagagttgctcacagcggaataactgccctgtctaggcagacgatccatctacccagccgcctgtccttaactcacaaagtatttgctgagctctcactggacaccaggcgctgtgctgggggctggaggacatacgataggcaaaatcatacagggtccctgcccttgcagagctcataggcttgagagggaaagacaccaatacagtcgcaggaaggcggaggtccagctggacaggtcctcacagggagagaccatgccccacaacacattctaaggaacatttgacctaattggtgaggccagagaaggctttactggggaaatggatgaagaggtgttatctaagtataggagagatgaaagaattctagacaaaggaacagcacatgcaaaggccctggggctgaaaggagcatggcaggggcggtgtggcttacagagagcaaatagcctggtgcaggctgacactggagaggctgcagggcccagaacatgctgatgggttcccccaaactcccccctgcaatcagccatctctgaaggaaggagccgcaagggttgtgaatgaatttccaattttatttcactaaagtcagcaccatgcagtgcagacacgaacctactcagatgtctgggccctaggtggcctggcctccagtctgggt

SEQ ID NO: 318218 - DNA, 4001 bp, Homo sapiens
gctcagacaggctacaggaggagtgagatccgtgcaaactgaatacaaatttctatattttcatcagattttctaagggacccagaacacaaaaacaacaaagttaagaatcattgccctaggggcagggcctccgttttcttacagatgcaagcaattaaacaccggaactcactgtagcccgagggtcctttaccactggacaacgtgcaactcttgcagaaagttctggtgcctttcgacaagcatgaaaacaaaagtctatggactagaaaatgcgagcgtctcacaattatatatatttcactttttttaagaaaaggaaaaatatgtattgatggataattcctttctagtcttccttccacaatgaatgtgggtatcacatctgaaacaccacttttaaaaactagatatgactactaaacaagaatgcatttatcactttggccagtatgaatagctgtctgagaatacagtcagtgagcatgcagaaagcagaatgacttgaaatattatatccaattaaatcagataaaccaagtcggctaacacagaggcaagccctcatcaatctgatttgctggaagactccaaagcggttctgcactcagaaaacattccctggctttcaacgaaaatcacatcagactctctcaagtcaactaagtttactttgagccacttcaaacctcaaacttaaacagaatttattaaataaacacaaccaagaaaggaaagggagccaagaaaccacagtaagtctcgatcccaaagggggaaaaagggttctcaagttaagtttcagtgtcccaccctcaacgaccctaaagagggcatccgtttcatctattaaaatagccactgtttgccctaaacgaattttctttacattcgaattcaaaatctgcatggacactctacacaaatacatgatcatttgatcccagggtctggagttatcccaagccttaaaagagcacttctcggcgagcaaagtaaccgattaaacccttgcctctccttctcacacttcattaagccgtctcctctggaagtgtttgaacccctgcacaggaagcccgcacgttttgcaaaggaaataccagacaagacctttcttggagaaaggcaggtccccgctgaacattttattgggcttcctgcacccgggcagtcgagcgggcggatcgccccgcccgcgccccggcgcgcgccgcctcacctggcgcgggtgtcccagggcgccccgagagccagccacccacgcaaacggaaacgcaccttcgctacctcccggagcaaaatgcgagcgcgggacaggacgaaacaaaacctgcccgggcttactcatcagagactccgcggggggatggggggtgatttcaggagactcccagaaagttgcgccttccagggcttaggaaaaagtacccagggcgcgcggcgtggtgggcagacgcctctctccctgggctccggaggccaggtcggactgggagcgcacttacctcggtgaagaagttatccattgttccagcgcagtcccggactcgccgagtgccgctccgactcgcggaagtcagcgccgccgcgggtccggggaaaccatgcgtgtcacggcgccactcccgaggacgcgcgcccgcggggctcccctgctgccatcgcccggtcccttcttgtccttctcaccttttgttcgcccaaacccaagtccctaactcgcccgtcccgacggcagcctttgtctcttcttcctccaagttcctcactactgggcgcagcgctcgcaagcggagaacagctggtggcacattcttcccccaggcgggggaaggcggcggggtgctggcgagcgcggccccctccctctgcgctccggccgggggccctcggggcgggcaggaggacagcgggccgcaaagtgagcaggagccgcgatccccgcgcgagcgcttggaggtgagcagtcccgcgccgcggctcagccagctctcgcccgcgggactacagcccagcgacctcgccccgccctcccgcagccggccccgccctcccgcagccggccccgccctcccgctcgcggccccgcccccaggagcttggccctccgccaaccacaccgtctggccccgcccgggcggagcgccccgcccccttcccgaccaggccccgcccactctaagcccgaagcagccgcaggctcgttagcggacccgggagggggccgcgtgtttccccaggtcttcccacgtaggcgtggggaggggatttaactcttccctctgcagagagagactaaacaatcacttagaggggaggagaagggactgggggcttctgtgcctttcatgtttagcagacccgggaaccggctcaacacggatctcattaatgcagcccggtagactagcaatctcgggaaggaagcgcggtcagcggagctgccggggctgcggggccagatcaaagcggaagacggaggctaatcagaatttctggaagctgcattcccgtgttgactttctgtcctgcagtcgggtttgcttaagacgtttgcgtaacagcggggaaatgtagttttgaaactggaaggggacgtggccaatatcacctttaaaaatgtaacccttttctagacctcaaggaagcagagatggcagatggcactgagatggacgaatgatcaaacccacctggcactgagtcccgtttcccctagggcagttcttttaactttatgctgtgcgagggtcacctgggaaccttgttagaacgcaggctggaacaatctgctttccaggtgcccctcaggtgctacctggtcctgtgctgaacgaaagcttgtaacaagtagagaaattaagagtaaacgtttgtagcaatttaataatgccacgacatccaagcacatgatcagtggactctttgaaccgagtataaaccagtttgggtgttgtcagactcacgtggtgagtcacacctggcgccgcagtgtattggtacctggccgactgggaacaaaaatggctggttcttcagcacaaaagatttgagatgctctctccagggaatttgccaactgctactcaacctttaaaactcagctcacaaagtcacaccttccaggggaaggaacccttcccaaagatgctactccactcaccccacccaagctccccgtaaccactgggctagatgcccactctaggatttattcctaagactgttggggaaggactgtgctttaagatgagtatccccaggctgtctcacagcatgaatgaatgaatgaaacatccttctgtaatccttatggggaaagtcaagcatgtttgtaacttatcccagtccagttcttcaccattaatatcattgctcccacctcacttccctttagaaagagtcaaggtgtaaattagttaatgatattgtgcaatgttgttctgtttcacaggtttacacgcttaaggcgctgagccattaaagcttgtgtccaaggtcgcaaggaaagtgaagatggagtcaggataaataccaacaatcccagtgcttagtcaaatgggtcctgcaaccactggtgttcagatactggagcagaacaattacagtcattatggtattaatctgcacacaacatctctgccagagaaattaccagggagattgttgaagtgagtgtgtgggtgtgacgtggttcccagcatcagcccagccactgatacgttgggcaacctcgccatgtcatttcaaaagtcactttccatatcggctcatcagttataacaaatgtaccacactaatgcaacatgttaataataggggcaagtgagggtgaggggctgggaggggtctatggacactctctgtactttctggccaatttttatgtaagcctaaaactgtttttttaaagtctactaatcttttaaaggtgattttcctgccaattatgaagatatcgttaataattgcccccaatttgactcacgtaaaga

SEQ ID NO: 318219 - DNA, 4001 bp, Homo sapiens
acttatacatttttctgtttttattatgtatttttaaacagaatcataccttataattctgttatttttagattatacttcctagttgttggtcttgatgttcttttaattatctagagttttactttttattatttgtttagtatgtattttagactaattttgttttttggtcttttttttcttttttttgccacacctttggagatctcagactaattttgaaattgctttagctcttttactttttcttttcaaatggcaaacaggaagcatagaagtaaataagacacatatgaaactagtctataccttaccaagaaaagacaggtgccattcctcctacttagctctgtagtgggcctcctgccttcctacagtacatcctcattttttctcagatgaaacatttgccatgaaaatcaaccttgaaggattatatttgtctctgattttttttccattagtatggtaaacctaagcgggactatatatagacattacacacaaagactagtcctataaattgttttcacactaatcctgttttcattgaaaatatcagataaattgattcaaaatacatttgcctattttgtttcatctggtataagccaatactgagataatgacaaatcaaacttttaactgaaaaattaaccaaattgtttgtcatcattgaaacgaagtcttctaattattttagttactgtcttggataaaatgttaataaaacttttccagaccaaagagtttcatcctaaataataggataccttcaaaaaatagtatttcaaagttgcctatgtagtttagagttaaattaaaactagcaattttaggaaaaaacagaaatgcaactaaacagccaagagaaagacgctattgagaaagaatacttaaaaagttaaatattccttaatttcaagtttatgaacacaaatacattaaactagaatgcattttagaaatgaactactttaggcatttaaattgttggggaaaaacatcctgaaggagggccttgagtagatctaaaaaaaaagtctatttcaaggcaagtagttttgtagttatcggtttattcagtctgttgcagaattgaatccagagtttgattcctaaatttctttctgggcaggtacattattgagactcatttcagatagcaaggaataaaccgcttatgaaatagtagatattttccagaaacagttctctttttttctttacatatattttcagaatggcaactgtcttgtacatgttgatattggcctacattgttaataattagtgatatttttaaaagcccaattaaaaatatgttatttcataagtttcattttatccatgtgtcaaaattttatgcagacatttacgcaggtgatcctgtattttctttatgtttgtagttactgttcaacaatttaattctataatagattctgttatatgacagggtcattttattccaaataatgttaaatgaatttcaaagatttttataaataaagtactattcagtctcctttttaaaaaatcttaacatttttttcctgtctctaatatagcatagacttgcacagaagactgatagaggatatgttgcgttcataagacatcaccacaattacatcagatcaagtgtcccttttcaaggaaaaatggtgatttaaaaataatgacacacagctatctttccttctatcatttgtataatgccttccagtctcaatgaaatgaatgagtcgctttctctttaaatttttgtgtaataccattataatgttgtggctttcaaactttttatctgaaaatcatctttgtatacactcatctgatttggacaaaaaacaaaaacaagacctaaaagtgtagtaggaataaagaagggacttacccgtagttccagagggtgccagctgggtttaacccactattgaagggaaggaagaggcatctccttccctcacagactaatctagtggctctgtgcttagtattatagcaccactgacttttatcagctgccaaacagtgacatctgatgtgcttgcctgtccatctacctatgctggcatgtcaaagtaagagtccacaatctaaacaatatctcacgtgtcttagtggtatttaaggagtgggattacatgagcttcttttgcaagcctctttatttcagacgtgaattttgactatgaactttagcaagctcatgtgagggaagggcagtgaatagggaaatgggaaaaatagaaaaaaaaccctcttatttctttattatggtggggactttgaattttcccagtttaagagagaggactaaagggaaaataatatttcaagagtggagttcttctatctattatactaagacttctccaggaataagaccagtgatagatgggctcccaattgatttgtattgcataattcttcatctgaagtcttttttcttttgcctaatgagagtaggattcaataatagatttgaggtctctcagtactagcagtttgttccgaggtggagggcagtctgggcaaagcaggagaccgaggtcatagtgacatgtcactgggaaggtagggaggtggaaaaacatgatggtgtttcttgagcaagttttctgaatctgtatggcatatgccccttttgcctagtacttttattctgaaagagttttgaaacacttaagaaacaaccaaacaaataagcaatctatataattagagctgtcaatgcatgttcatctccctttattcctaacagttagtttcctttcactttttgtcacagagaccatcatggtatttagatttccatttttgtgcagggaagtaaataattgcagaagaataaaatgtcgaatcagcaaatgtggtgaagtagggtaggtggcatgaggattgggccaagggagtagaattatctccatggggtggcttcagttcccctccctcatgggtagataccccaatcttgattgaattaacatgtatattagaatccagcaaatagatgtttgagcacatatgagccatataaaatccttcacagctggccaagtaggtgtacctttctttggtgttcaaagaaagcttgataatttctgcctgggcgtgcagcccttagtagaaaaagcatgctagacttggtgagtaggtggttgcctacaaagtcttatttcaggagtctcccaaaatattcttcaacatctgttcactgatatttcaaattccagtaatacagacaaaacctttccatctaaattagagagacttaaaatacaaatgcaagtgataggataaaagtaataatagccaatatatagcatttattatgagtaagacactccttcaagcattttattttattattagtttttttttagagacagggtcttactctgtcacccaggctggagtgcagtgatatgatcagaactcactgcagcctcaaactcctgggctcaagagatccttcctctgcagactttcaagtagctagggctataggcatgcagcactatacccagctaattttaaaattttttggacagacagagtttcgctatgttgcccaagctggtctcaaactccttgcctcaagcgatcctccacgtcggcttctcaaagcactggaattataggcataaaccacatgcccagcctatctattctaagcaattttaaatgtggtatatgtgactgacatttggttctgctggagaacagggtttgattagggcatggaaaaggaaataatagatttgaggtctctctgcactaaaagtttgaggtatacctcaccagccaagtagggaagacatccaggacaacctgctaaattcccaattttgcctacagcaggttctaagcatactacactcgaggaagaatttagttctgcttactctttgtctttcaagctttgcctcttctctaggtctttgtaagatacaacccaggttaccgtgtgttacatgtgatagccttca

SEQ ID NO: 318220 - DNA, 4001 bp, Homo sapiens
ttaggccagccccaaatcacaagcaagggatgtctgagctggaagggacttcagggtctccgtgcagaggagactgaggcccagggaacgagagggaggtgctcaagtttgcacgaatctattttcatgttgctagggaagcactgtctcttcaggggtggtttctagggccttttcccagctctggcatcctgatcagagggagagtaggtgccaggggcatccgggtggggcaggcaaaggtctcaggcactactgtcatcggttgacccaggagagtcctagtccaaggctgaaagaagttggaggtttaagttaggggaagggggaggatggactaggttggggttacactggggtctgcaaggctggtgagcccctttcatccttggcacttggccctgacgcttgagggcacaggctggtccaaccaagcagagagaaccatcccccgtcctccccatctccccgctactgggctaacttccgtggtgttctcttctccctcgtcccttctcttcctcctgttccatccccctatttgtatctcatggcactttcaaagaatcttggaagagatttgcaaataaaatgaggtccagagcccttaacttgcccaggtaccttaacttgccctctggagaagaggcagagcccttgagctcctcgactgaccacccacctgggtacccttctcctttgcctccaggttttcctatactccttcctttagaaaacaatctgccttcatctgtatccccaacaccgacaaggggccctgggagtcagtgggcactgcattgtgcaactggagtctagtgggtgtccctggctttctctgtaactgcgaacaagtagctttccagctctgcacctcagttcccccatctgtaacagtagggggttaggctaaatcacagagatccatggatgggctttagggtgttcacaaaccccctaaaactatacgtaaacatgagtgtgtctacatgcatttggggtgagggtcatgggatgattgagaatgcctcgatcacaaccgtttaggattccacagtccacagatctgtttcttgataaacactccctttacagaaattcacagatgctgggaagggtctctcattttacagagaagctgcttccctctactgcctaaaaatcccaaagtcctgagcagagccattacctattccccacctttaatcctagccacaccctccccatttaatgcagggtaacctagagcttagagttcctctcctcccaaaccaggatcgaggcttgcatggggccccaaactccctagatccactgcagggcccttcctctccgggggaaggagctctggggattggctcacctcctctgcccactcccctgagttccccaagctcccctaggatgctggtacctgagaggatgggaccacaataggcaggagggaatcttagaccctcaagattaacacctctgtcgggaagctgagagttgcgtggcgtccctgtaggcagtcagcggtcagcagtcagtaggcagcgagcagggtgtcccctgcagccagctctggcttcagctgatgagaatcattcctgccttgccatgggtcacagccttatttcgggctgcaataggagctggagccagaggctaaaagcaccagaccctagggaagacaggtgccctggcaacaggcctgtgcagacagagggcttgcacccacgtgtacacacacactcacatatgcacacaccaaagtcacctggaaatgttgagggtcagctgctggtagcttccgcttgttaactgttatatccttagtgccaagaatggtgcttgataggaactcagcagatatttgtcgaaggaaggaatggatggatagatagatggatgaatgaattgctcctcaatatctttgcttgacttatccttttcttccttcctttcttctctcctgcctttcttcttctgcctccttcctgcctgccttcttttctcccctcctccctccctccctccctccctctaccttctcacattccctgagcctctctctaaggactgaaaataaataaggcagggctctgtcttcaaggagctcagccaggtcagattcagacgggtaaacaagctttggggaaggctctgggagagcccaggggagggagttaccagctcagcctggggtggggggtgagaaggcttcccagaggaggacacactggagttgggccttgaaggatgagtgggagttcactgggcagagaaggggcatggcaggcagtggacatgtcacctacaaagatgggtagggggttggcaagtagagccggagctgggggcagtgctgagagattagcccagacagtgggggcagcggccagatcccagcaggctttcaaaaggaaactgtgtttataaagggttgctgacaagattaaagtggtgaaatggagtgatcggattggcattttccaaagatatctttgctgccatgtgggaaatgggttggagggggccagactggaggcaggaggacctgactgtcaccaggggtggctggatcagggcagtgacaaggagatggagaggagagggagttgagggttatttgaagaacccttgggtcttggtgaggaactggatgtggaaggtgaggaaagggagtcccactcccctgtttcatgcttgggtgactggaaggggaggagcaggaggggtgggggcagacactgaggtcagttttggatgaactttgaggtgtcgggggactgggatgagatcaccagtaggcaatgggacactgtgctgcagtgaggccccagccgaagataaagattgggtccaaggcacacactcctggggaagggtgggcctagcaaggatgggctgggtgcagggtggggaccaccggtgtctgtgtgctggcagactatcctggggtgtatttctgacacctctcaaatcagaagcctagattctgctgtccaccaccctgaccttagcttcctggccctcggtgggcctgagcttctagagaggaagagtgaggtgtgttcccagggcaagcttagcctcacctgggagcaggatcacaatccccttctctggccaaaggacactcctgccaggagaggatgcctcatggcccgagtccttgcctcactggggctgcctggctcagacgggacctcttacagtggcgcctttcctgccctggcacccccacctgccatgaggaaacagcctcagagcacagagccctgacccagcttggccctgcccactctggtgatagtgctctgtggtcagggcctggacaataccaccctgagacattacctagacccactctccccattatacggatggggaagctgaggcctagagaaggagtgggctcacccagggtcaccccgctcgtccatgacaggaccaggactgcagtccaggtacttctatggcctcaagttgtccgttgttcccatctctccccatggctgcttcttcccaagctcccatcccatatgtctcaaatattcccagccacccagagtcccatggactgctccatgcttggggagaagggaaggacatcagacacagctgaaaatgacacaggaggcagaagaatgcaggaagcatttattgagggccagagctgcattctacaagaggcaagaggcaggacacaggcaatctctagtgggttagaggagaggttggggagagggcagtgacaatgagagaacagccaggcgctggcttgggaactgccggtttctcaaggctgcctcctgctagtcctctgggaaatgcaggtagaaatggatcctctatgctactgcctcagccagaggcctgatggtgtcccttccctgggaggggcccttagccccagtctcctgtgctacaagggacccagcagcaggtaggggctttggtaaatatagtcactcatcattaactgagtaagagcaccttctcatcttcacagc

SEQ ID NO: 318221 - DNA, 4001 bp, Homo sapiens
agagcctaggggagcccagcaggagcctcagatgctgcccagcccacagtggggcaaaccaaggctccaggagcttcatcctatccccaagccccgggcatcacctggtaggccaggggccccctgtgaccatcacgctgatgcttggctctggcccctcgctaagtcctgggcctgtgagacgtttcacttggtccacttctcgaactccgtagctggtggcagtggagaggagaggagtacagttttggcaggagcccagccagggagagacccatctccacagcaagctggacatgctgggcatttgtggaattcagagagggaaagcccctggcccaaggtcacaaggtgaccttgtccactggccctctgctctcccacttgctctcagctccagagcccagacttcatcccagccagcccctcccttggaccagagtcctagaggagtgtgtgtgttgtgtgagcggctgagtgggaatctccacccaccaggcctgcccttggaggagggaggtggggggcaggattggcaactcactcctgccagttccgggagcagctccggtccaggacatccgtgtagaccaactcgctcagctcccgccgccccccagagtttgaggtatgaagtttggtctctgcctttgccagattttgccacatctggaacaaggagggactgggaggcagggcctcaggactgctgctcagttagggggaggtggggaggataggagcagagtctctggggaaaataaagtggcaagagagccgtttgagcaggaagcacctgtgaggctgttgcatggcccctcccccagcccccaaagctctctgggatggggatgggggatgggaaagaaatgctgaagtggtaggtgaggcctgggcactggggtccctcgtccagggcacacctgcccagtggcaagtgtcattttatttttatttatttatttatttagagagagtctcacgccgttcgtcgcccaggctggagtgcagtggtacgatctcagctcactgcagcctccacctcccaggttcaagtgattcttctccctcagcctcccaggtagctgggactacaggtatgtgccaccacacccggctaaaattttgtattttcagtagtgacggggtttcaccatgttggccaggctggtctcgaactcctgagttcaggcgatcggccccgctcagcctcccaaagtgctgggattacaggcgtgagccaccgcgcccggccggcacgtgccattttaaaccacaagagcaaggtaagaaaaactggagcccaatattcaatcacacaagtactcccaggcccccacctcacagagacactggcacgcaggcatgctcagcaggtgtgtgtgtgaagccagacacacgcatactcacgtgcaggcgctcacacgtgtgcacttgcaccatgtacacatagccaaagccgccccgtcagggttggggagggagtccggactcaaggatgggcctggaaagggagaagtctaaggacaagtgagtgattccctggggtctcaaaatactgaggaggtctcccagattgtctgctgttaggcaggcagatgggtaaactgaggcatggaatatatgaaaggctgcatctgtggcttgatgcccagtggtagggattggggatcaaaggccggtggtggaatgtgaggtgggtggaggggtctggcttgagaaggggtgtgagcagggcagggtgacagtggtgaaggactcacctggtaagccacagctctgcaggcatcacagcgcaggtgagcgggcatgtgggctgagtacatctcctcatcatccagttgtggggctgtggctgtgagtggcgccctgtccccgaggccccctgggatggcccaggctcccagcagcagcagcagcagtggcagtgacagcctcatggccccaggagccagttcagcaagtgtagtctgtggttgaggtgcagatgtgtgtgtgcttgtgtggtgtggggaccgccacagaacacctggcctagaccaatggggaactgacacctcacccctcccatcctcctcccactccctcctccagggccccgaagatgccacgtgggcattgtcctctagctggaccctggctccagccatctcagctccatttcacagatagggagcactgaggcaaggagaggggctgggcctaggcaggaacacataggggccgatactgcccacatcctgtgatctggccaagtggcaggcactgtgctgagtgccttgtgggaagagttggttggctgccgtcatctttttttgtttcattgacctttctgagaaatgagactgtcatgtttattctgcctcttccgacacaaaggctcagagagaggtgacaaatccaaggccacatagctagaggggccatgctgagaaacccaagcctgattgaccccaaggctccctggccactcaaccaccagaaggaatgaggtgtggctgccagcctcctgggaggcaagttcagggagacagggatgctacagtgtttccaagacacacatggtctccttccctagccctgaggtcccctccacccaggccatacccaggcgtggaagggcactgtggagggtgttgagaggctgtggcaggaaatcaggcacctcacaccagttatttcagccatgatggctccatggtcagtgatttattacacaccaggatgaggtaaagacacctggggtggccccagggccctccatgccatcggagctggcatctccagctagaaaatggccagttgttctgattcgtagctctcctagtcagcttccagtccagggcagagggcagggactgctagggacctgggccccctgacaggcctggaacaacgaaggcatccatccccatccctgccactgcttctcatggaaactgtccttcccaaactcatcacatcacacaccaggctggcaagggccagccatttccggttcagaactatatacagacccccacgcacaccacctcccacctcatgcagacccccctcatctccctcagaggctcctggaatctcagggcaactgaagtgcaggctctgggccctgtcccttgctgtgactggtctgtagggccagcccctctctggccattgttgccacatctgttactggggagtggaacctgccaagagcttcagatccctctggatactccaccaggggtatcgcttctactgctggccctaacccaccttctggccacacagaggggtcaagaggctcctgtgggacaagagcccaaccctccctcttctcagagcttcctgatgaccatttcacctactcccgatgtagggggtgggggactgaagccccacccctggcccaaaaatgagtcagctcagctctgagggccaggctccccatcttcccaccccaagttccaggctaacccccaacccaggccctccctgtattccttgctttgcctccacctgctgtcccccgccttagctctttctcggagccagcctggcctgggctgtactggccactttccccccagtaacctccagggccaaagctcagctcctcttcctaagagcagactcgacagccagagtccttcctgccacctcaccaggggcactggccagcctcacctcagctgggcccaccatcagggagggcagacagttccccgccctgtctcctgctgctcccgttcctgctgccccacggcagccacagcacctcctctgatcggctcctggggacaagcccagggatgcctcactttccctatttgcttgcccgcatatacacatatacacacacccacacaccacaccacaccacgccctgggaatgcctgggaaagggatacataattttgttgggggaggaagtaggcagccacttcctgggtgactccagctccaccagcctcggggctcagattcattctctgaagatcacttcctgtccgacg

SEQ ID NO: 318222 - DNA, 4001 bp, Homo sapiens
tctcggatcccaccttgcatctcctctggggtgggacattccagtccccacatgggcaggagtgctgcctgccctggctacagtcagcccctcctgagccctggccccagggaaaggtcccaccacctgctgggggatcagctctgctaaggggcgtgtctgcagctgcccctaaggaatgggactggaatgtcccagctccaaaaggggggggtagtaggcaaggggggcccagagaggggctgggagaggctggcccaccccatcccctctgtgacagacacttgaggcagagacaggggctaaagcctgcggaagtggtgcttagtatcaccatatagtgcttcacggctgcaccgcagtctacagttttttctcagcccttctatttcattatctcatttcatctccacaatagcctcgtgggggcaaacaggacagtaattaccctcacgccattttacagatcgggaaactgaggcctcggaaggcgaggtgagttatccaagatcccacagtgagaagcaatctcaactccctgggcaaggtcctttctacctcagcaggttgtcctaagccaggggtcacgggttcccctccatgggcacacactgctgtgtatgtattgcatatatgtctgcccagccctccatgcctgtttctcccaaggacacttgcaaccaggctgccctagactgcggtccaccaggcctggaatccctcctgctgccccccaggtcaggaagaaatagaggaaacctgcctcatggggactccgagtcgctatgctagctctagaggcggtggcagaggcaggctggccgcattcattcacagtctggcacatgcacaccacacgctgccagccggtagagaagccctgcctgggagggccctgggaggaggctgataaccgcgcccaggatggcctcctgcgtccgctccctcccgaggacagccaggcccaatctgttcctatgtggttggggtcggggggtggcccagtgggaggcaacgggtctcagttctctttctggatacagccagggccctgatttcggcttgtccccaggccagccctcacttgggccaaaggctgtggccgggactggaccgggtgctctggcggtcaagacctaggaatgtcccctacccgcagacccgcagctgcagcctggtggaccggcagggggttgggggataaaggaggtgtgggaggaagcgagagatctcatggggaagtcagaggggcaaacgaggttgcatccccacggaatttgtgtcaggaaagcaggggtgaaggcgagggttccccaaagctgcgggaggtcccggagctacctggggggcggggtgggaggcgcgtctcctcctggcccctccctgaggcctgccgggagcggctgggccggggggcggaggccgaggtcagacgccggcgccaaggacgcctgccccacccagccgtggcgcaggggtcccgcgcgctgctccctggaaagcgcgtttgcaggggttggggagagcaaggtagcctgccgcctgcccctccagcggagcatcggggtcggtccccgatccggtgcctcggtgaccgggagcaggggacacctgggcgcacgccgcaccttgccacccccgcccatctctcagacgggagcctcggccagcgggacagcagctttgccaaggacgcccgaaaacaagaccttggcgacccgccccacccctccccaccccccgagtccagcccgggtccccagcccctcgcgcgccccacttaccatggtggcgacgcgctcgccggcccgcggctccgcagcccttgcgcgtcgcagctcccccgcgcggatttgaaccctcctgcaaggcgtcggctcgggccgggactgcgtgccgggtcggagcggcggagcggcaggcgccgggaaaacgcgggcgggcgccggcgccggagccggattggcgagggagggacgcgctccgcggcgctcgatcgcctgccccaaaggcggagggaaaacccggcctgactcaccggcgcgcggcaagcccacagcccggccccggcccccggatgtggggggcggggccgcctacccgcgagccaacctgggccccgcccggccccgaccgcgcccccggccctgacccgcagaggcgccgcacggcggtggcgggcgaaacctggaccggctgcgcctcgcgtcgctgcctccttgagcgccccggctcgttcccgaggggtgggcagccccgagcgcggcccacgccccagagagcgcacagcgcccccgcttctcctcctccgccgttcgcctcgcccgcctcctctaaggaagaggcgcgtgaggtccctcacctccctaattgtagccgcctcctctccggaaaacctgatttcccccctttggggatgaaccacagtagtactttgagaagtgaaaagattttaccccacgactctggctgaattgggcacagagttattttctttttgcctccaaagtattctaggggcagcaaaatcaggtgccttcaggggccagaaaaattacgcaaatgagtcgtgagcttcctactaagacagtaggaagacatggaaacagacacagacacgtaaaggagtcatattcgaaaaattaaaacaccgtttctaattcaaaagttaagcatagagttaccatatgatccggcaattatagtcctcaaacaagtaatgttcttggcagtactagtcacaatagtcaaagagccaaaaggtggaaacagcccaaactaacaattgatgagggtgtaagcaaacaatggtagatccattcagtggaatattattcagccataaaaaagaaatgaacgccatgtgatgactcatgtctgaactctcccagcacttttggaggccaggagttcaggaacagcctgggcaactcacaaaactccatctctatcttaaaaaaaaaaagacctgatgtggtggctcacccctgtaatcctagcattttgggaggccgaggcaggcggctcacttgaggtcaggagtttgagaccagcctggccaacatggcgaaattctatctctaccaaaaacaccaaacattagccaggcatggtggagcgagcctgtaatcccagctactcgggaggctaaggtaggagaattgcttgaacccaggaggcagagttgcaatgaacggagattgtgccactacactccagcctggatgatggcgtaagcctgtctcaaaaaaaaaaagaaagaaaagaaaagaaaaagaggaatgaaacactgatgatacctgctacaacatggataaacctccaaaacatggcaagtgaaagaaaccagacacaaagcccacatgtgttaatgatgccatttataataagtaaatccagacaaacagaaagcagattagagccagaggctgtggggagagagaaaggcagagtgattgcctaacaagcatagggtttccttctgggatgaggaaaatgttttggagcctgacagaggtggtggttgcacaacgttatgaatatacaaatgtcattgaattgtttgctttaaaacggctaattttatggtatgcacattttacctcaattaaaaaacatcttgtcacttgtggaacagatttggtctacggcccacaaatttgcaaccccttgtgttctatgctgttcttaccaattcttgctaggacagcatagaacctctaggaagaacttctggccaggcatggcggctcacgcctgtaatcccagcactttgggaagacgaggtgggcaaatcaattaaggcaaatgatttgcctgcctcagcctctcagtgtgctgggagtacaggcgtgagccaccatgcctggctgaaagaactttttttttgagatggagtcttgctctgtcgcccaggctggagtgcagtggtgcgatctcagctcgctgcaagctccgcttcccgggttcacgccattctcctgcctcagcatcccaaatag
